United States Patent Application Publication US 2014/0230087 A1 - sequence listing, part 13

SEQ ID NO: 10316 - DNA, 18433 bp, Vitis vinifera
  Intron number 8 from transcript GSVIVT01020999001 (locus G SVIVG01020999001) derived from phytozome v7.0 (chr-ID chr5 ; pos 15619568 to 15638000 reverse strand)
ctgcaaagtcttccaggtttgtttcttcaattcattttttaaatgaactttctcaggttcatcacataagtttggttgtgttggaaacatgtttgttttattggaagaaaatatcaaaattgatatcaatatcctatttgtcaatggcgtcataagagtgaaacagttatattaaatattcatgatgtaatggctattgactggatagaaaatatgatcagctttaggcactcatcaaagccagggctatgaaatcttttgcctgtttagaagtttttgtgtcaatggaaggtatctgaaaaagttgtttgttttgttattattatttcatttcagttgtatgtggtagttctattactatatatccccagtcagcttccattcagtctagaaattcagtatgattatgagaccacaatgctatgtgctatagaaatgttgagaagttaatagacaacatgttaaaaaactgtctacatgagattaggatattcataccagtgtcgatacaaggagatgaaataaaaaatgaatacatttgtgagaaggtagcaatagcactaattgcagcaaaggcgagtgaaggttgtatgagatgttttaaccacatgcaatgaagatccatgagtgcacttttctggagtgttctgattcaagttgaaagcactaaaagggcacaaggaggctaagaaggatttcataaacaggatgaaacacaatatcactgtgagagtttagctaaatgacgaaacaggatttcatatacaatggacactgttgagagagagagagagagaaaggagaaaaaccttattttcattcatctaatctctacttacaattgagagatatatatatacaaggctaggagtcctaactaccatacatgtgacctatattaacaaggaaagatagtataccatacatacattatatttaacactccccctcaagctggagcatatacgtcatatgcaccaagcttgttacaaatatatttaatcctaggacctctgagagatttagtgaagatgtctgctagttgatcatttgaattgacaaaacttgtagcaacacatcctgatgcgatcttctctctaatgaaatgacagtcaacttcaatatgcttggtcctttcatgaaagactggattggatgcaatatgtaatgcggcctggttatcacagatgagtttcatctgttcattctttccaaatcgcaactcctgaagaagatgtctcaaccatatgggttcacatgttgccaaagccatagctcgatactcggcttcagcgctagatctggccactacatcttgtttcttactcttccaagatattagattacctccaataaaaacacagtaccctgaagtagaacgtctatctgtgggtgagccagcccaatctgcatctgtgtaaccaacaacttgagtatgacctctgttctcgtacaatacaccttggcctggtgtacttttgatatatcgaagaatacggattacggcatcccaatggctatcacatggtgactgtaggaattgactaacaacactcacaggaaaagaaatgtctggacgagtaatggtgagatagttcaatttacctacgagccgtcgatatctcccagggtctcctaaaggctccccctgtcctggtacaagtttgacattcggatccataggtgtgtctaccggtttacagtctaacataccggtttcttccaggatgtctaaagcatacttcctttgaaaaaggaccacaccagaactggattgagctatctcaattcccaagaaatacttgagtttccccaagtctttggtctgaaagtgggtaaaaagatgttgctttagtttctgtataccatcctgatcactgcctgtaatgacgatgtcgtccacataaacaaccagataaatacagtgccctaaggagttatgatgataaaaaactgaatggtctgctgtactgcgaagcatgccaaactcttgaacaacagaactaaaatggctaaaccatgctcgaggagattgtttcaagccatatagagaacggcgtaacctgcacactaaaccagactccccctgagcaacaaaaccaggaggttgctccatataaacttcctcggcaagatcaccatgaaggaagacatttttaatatccagctgataaagaggccaagagcacatagcagccatggagagaagcaagcggacagaagcaatcttggcaacaggggagaatgtgtcaccataatcagaaccataaacttgagtatagcctttagcaactaagcgggccttaaggcgatcaacctgaccatcaggaccaaccttaactgcatagacccaacgacaaccaactgtagatttaccagggggtaaaacaacaagatcccaagtgccattagagtgcagagcagccatttcatccaccattgcctatcgccagcctggatgggaaagagcttcatgggtgctcttgggaagagaaacagaggatatagcagaaacaaaagcagaatagggtgaagataatcgatgataactcaaaaaattgtaaataggatgagggttacgagtagagtgagtacctttccgaacagcaatgggtaagtcattaggagaaggcagagccggggcaggtgaagccgaagggataggaagtgagtcagcaggtgccttaggaaaagggagaggagcaacgatacgcgggcgacgatgataaacctgaagtggtcgagggggcatagcttcaggtggggagacaatgggaatgggcaagacttcagaaacgggaagagactcagaagtggtggaaaagaatggtgagtcctcaaagaaggtgacatcagcggagataaagtaccgatgagtctcaagggaataacaacgataacccttctgaagtctggaatatcccaagaagaggcacttcatggctttggcggaaagcttgtcctgtccaggagtgagaatttgaacaaagcaagtacaaccaaagacacgaggaagaaggaaataaagtggttggtcagggaaaagaagggagtgaggaatctgatcgtgtaagacagaggagggcatacgattaatcaaataacaagcggtaagaacagcgtccccccaaaaacgaaaaggaacgtgactatggaggaggagagtacgagctgtctcaacaagatgtcgattcttgcgttcagctaccccattttgttgaggagtatgagcacaagaagactgatgaagaatcccatgatgagacataaacgaagtaaattgggctgaaaaatattccctggcattgtcactgcgtaacacacgaatagaaatattgaactgggtttggatttcagtataaaatttctggaaaatagagaataattcagctcgatttttcattaaaaataaccaagtacatcgagaatagtcatcaatgaaagtgacaaaatactgaaatcctaaagtagacgcagtccgacaaggaccccaaacatcagtgtggacaagctcaaaaggagactttgcccgattattcaaacgctttgggaacgagacacgagtatgtttcccaagctgacatgactcacacggaagcgacgacaaagtggaaaaacgaggaaccatcttctggaacttggagagactagggtggcccagacgattgtgaatgaggagaggagcatcagtggaaatgcaaactgcaggagatgaatctgaggtgaggtgatagaggccttgagactcacgtcctatgccaatcgtcttccccgtactccggtcctgcaaggtcacaaatttatcagaaaaggtaatagagcaattaagagtacgagtgattttgctgatggaaataagattaaaaggacattcaggagtataaaggacagaagtgagaggtagagaaggcagaggaagggccaaaccaatacctttagccacagtttgagaaccattagctaaggtaacagtaggtaaatcagaggtagtagtgatagaggagaaaagatccttattaccagataggtgatcagatgctccagaatctagaatccagggtccaagagaagatgtgtgggtaaggcaagcagaggcattaccaggctgggcaacagaggcaatagaagcctaagatgtctgagatgcggaggagctcggaagctgaggcagcggagaatcagaggactgggccatatgggcagtgcgaggaggtcttccatgtaactgatagcaacgatcgcgagtgtggccaagtttattgcaataggtgcaatgaggacgttggcctcgacctcgggtaccactgcgtcctcctcgagaggtagtttgagaaactaacacagaagaatctgaagcgctatcagatggcaaagtctgagtggacgagagacggaggaggcgagcaaacacgtcatctaaggacggaactgatgaactaccaagaatctgatcacgaataggctcaagatccggacggaggccaataagagtaaggaccatgaagaacttgtcaagctgcgtttgttgagccccaacatcaggagtaagaggcatcacagtcaagaactgctccttaagagaggcaatctgaccaatataagtagatagatccaagtcctgttggctgagatggacaataggagaagccaccttatagagacgctggatatcattcgtgtataatcctttggcctgagtccaaaatttaaaacaagttttataggcctgaagatgaagaagaatctggggatcaaccgattgccataatacactacataactgggcatctatcttcctccactgtacgcggtcaacctcagggatatctgcctcctgggtaaccaagtgatcttcatatccttgacccataaaccaaagttcaacagaggcagaccaggagagataattctcactgtcaaccaatttctctgaggtaatcagaggagatccagagagaacagaggtaaagatctgatttttggtggtcatattcacgtatttggatcgaagagagccctggagaggaagagaagcaacacccaagcctcggagatggagaggaagccctgtcagatgtggtcggaatggcaagaaagccaaaaacaggaaaaaaagtggagatgcagggcttgtggaggactgccggagggctagaaggccaagacggcgccggacgagcctggagaggtgtcggacgtggccggaaagtgagccacacgccgtcacgcgccggcgcgtgggtgacagtccgacggggaagatcggcgcgtgggggctcgtgagactccggttgccggtggggtttccactggtgtgtagatcagcctccggcggttcggaatatgtggtcggtgcccggaaaagaggtcgtcggaaaaattcgccggaaagggttgccggcgtggtagagatccgacggcgatgaggttgtccggggtggttcgggaagggaatgaggggaccggagtgaaacacggtcactggacggttcgccggaattgagtacacggctaaaccgaaaaaaaattaggttttctcctttggctctgataccatgttgagagagagagagagagaaaggagaaaaaccttattttcattcatctaatctctacttacaattgagagatatatatatacaaggctaggagtcctaactaccatacatgttgtaatgacccgctcccaaccgtgtagatattgtccctttggacgttgtgtcccatgaggggggtgtttgtgatgtcccacatcggataggggagaatgttcctggcgctatatatgtagaggctcctcttaaccaagtagacgcgttttaaagccgtgagggcccctttgggtccaaagcggacaatatctacacggttgggagcgggtcgttacacatgtgacctatattaacaaggaaaaatagtataccatacatacattatatttaacagacacaatatgatatgtcatcctttttcttttccttttttctagaatgttaattgatacatatctttggtttatatctcattttttattttctgaaacacaaatatgatacataataagatgcaaatgatgtatgacattatgcaggagacataattgactatttttagtagttctttagcaaagtcaaatttatttattttttcttaaaggttatggtcttaatttaaagttagaaatggttgaaaaagcaaagggggagaaggaatgaccctgcttgacaacattatacatgtgttgtcaaaggaaggcattgaagattgaagcaagggggcaagttgttggtttgatttggcctgttttgtgtgtgtgtgttttcaattactttttctaagtgtttttcttctttgaggagggaactatgatgaaattggggaagtcatataattttgaaaaagacaatcacaatttaccaacaatccgtaaattattgtaatttcttctttgttgtgttggttagtaacttgtatatgcttggaacttttggtacaagtaatagttaatagcaaactagtctgaacttcgaactgaacattatagtaaaaaattcaagaactttattttgtgctttgcccctcggaaaagaaaaaagaaagaaatagaatatggctgatccatgggaaagaagaccaatcttttccatctcttgactcccacaaaaaagctcccatatgctagttcgtcaggacactgtggccacctgatactattacactttggctatttgaggggaagatgctatctccccaacattcaaattggtggtaaacttcgcagcaggagcagtcttttactttactattgataaactgcattcatggggttggaataaaaaacttgctgagcagtcgcaaaagaattgacgatgtatatggggctcaaaggaagtgcacaagtcatcccatttgaagctaaacagttttcatcctacctaaggaatcggaaagtttgaagtgggacgtggaataatcccttattgtttttgcacattaagctcaatcatcaggaatccttatttatttatttatttatttatttttattatatatatatatatatatatatatatatatatatatatatatatatatatatatatatatatagataaaaccactttcattaaaaaataaaaagtgccactaggacacaccaaagtacacgggacatatacaaatagcacctaatagcacaagaaacaagaaagaaccccaacaataacactcacttaacaaaaacccaaccactcaacaaaatcaagacagaatctgtctctatgtattactttacccaagtaaagaagtctatgtaagaacatcttcaaaaaaagagttgaatgctcctcgttatcaaatgatcaaagattcatttccttccaaactgtctaaaagatacatgagctgctctccaaacccttttacattttttgcccacaaatgaatcatgctagcctaaaagagcatcattaacagtagcaactttttttttttgatagacaaagagacaaaattaaattaaaacacgccaaaacagggggcgctccctatatacataggtagtatacaaagaaagccaaaccctaggcaacaaaggagagaaaaaacttagaaaggacaaagttaaccaacaccccaatcacccaagaagttcagaaaagagagatagtccaagtccataaactgttgagatcactcaagaagagaccgtagaaagaggttcctcaagctcgtatctgacatctcttcctctttgaacaatctttaatttcgctctccccaaatacaccaaaacagacaaataggcgccattctccaaactacactccttttcttccttaggcccttaattttccattcaagaagcagatttctcacaaagtccgggaacacccacatcaccccaaaagaagaaagcaacgaagtccaaagctcccttgtcttaccacaatgaattagaatgtggtctgccgattcctcattctctttacatatagattgcatctattaaccatagaccaacccctcctcattaacatatcaactgtagaaattttaccccaaactgcttcccaagcaaaaaaacgggttctcaaaggggcatacgaaccccaaacctcctttgctggaaataagggaccgttctccacttttaaaggcctataataagatttaacactaaattttcctttcctctctatcttccaaactaaagaatcctccccttcttgaacctttaccgtagaaatgtgattcagcaaacgattcacctcctccaattcccaatcttgaaaggtcttctaaaatacacctcccaaccccctccaccacctccttgtctcccccaaagatcagccactacaacagaattgtgggttgcaattctgtacagcaaagggaagaaatccttcagcttagaatctcctacccaaaagtcccaccaaaatctagtgcgtctcccatttccaatacgaatactagttctaggaaagaactcctcccaaccctttctaatgtctttccaaaggcccatcccataagactccctcacctctctagtggtccaacctccttcctcctctccaaatttacctacaatgacttcctccaaaaactctccctttctaaaggaaatctccaaagccattttccaagcaaagcatgattgaagtccttcaaaggccttaaccccaaccctccatgcctcttatctttgcaaataactgcccaacttaccaagtggatcttccttctctcctctaactctccccacaaaaactcactttgaattttctccaatctaagtctcactcttcttggaatcacaaaaagagacataaaatagatgggaagatttgagagagtgctcttgatgagggtaagacgacctcccttagaaagatattgttttttccacgtagccaattttctcttgaatctttcctctaccacatcccaaactctacacgaattatgaggggctctaagaggtaagcctagataagtagtagggagattccctactttacaccccaaaaccgcagcagctctgtccacatcctccacttccccaactggaattatttcacttttcaacaagtttatttttaggcttgataccacttcaaaacatatcacaacccacttccaaaaaaccaactggtccctattaccctcacaaaaaagaagagtgtcatcggcaaacaacagatgggaaatcgaagcccctactccacgtctccccattaccttgaagcctctaatgaaacctttctcctcagctcttgatattaaacaactaaaggcttccatgatcagcacaaacagataaggtgagagtgggtctccctgccttaggcctctgaacgttgagaagaactctgtgggagtgccattcaataaaactcccattcttacagttgatatgcagaaaaaaaaatctagtttcgccatttgggtccaaaacccattttctccaagactgaaagatcaagtaacttgcacctaatggacaccaaaaagatcaaacagtaattgccaaaggatcttaatcagtaaacaatggaggaggatataatctatggattcttcctcttctttgcaaagaaaatatctattgaccaaagaccaacctcttttttgaagttgatctaaagtcaaaactttgccctaagaagcccctcacacaaaaaagttaactttagaagagacccatgaattccaaactatgtgctttggaaatgaaactagatccctcggttccaacgcaacatataaatacttaacaaagaatttattattgtacaaattcatccacaccatcgtgtcttcccccacactatcaactgtctttccttgcaacctcaaaaataaatcctcaactttgtcaactttctaatcattcaaagctcttgtaaaacaagggttccaatgacctctttcccctgtttgaacccaaagatccgccacccattccacttttaaagaagggaatgaaacacatgacggttcatccccacaccatttatccgtccaaaacttcaccctcctcccattacccaccataaaagagagacgacccaagaaagtgtttcgttccttcctaatggatttccaaagctcgactccatacccatctttaacttcacaggaccaccacccaccctcttcctccttgtatttgccactaattactttagttcaaaaggcatctctttcatttgcaaacctccaattacatttgcacaaaagcgccttatttaacaaagaaagggtacctaattcctaactcgtccttgctcttctccaaacacactatggaccacttcacatgatggaactttttctccaaccctccatctccccaaaggaactctctttgaattttcttcaacctcaatttgactatccttgaaatatggaataaagacaaaaaataaatgggaagacttgataaagtgctcttgattagagtaagcctcccccctttagagatgaatttccttttccacaaagtaagtcttttacgaaacctctcttccacctgattccaaattgcaattgatctaaatcgagcacccaaaggcaaccttagataggtagaaggaagtctaccttctttccaccttagcgctaaaaccaactcctcaacttgttccactataccattaggaatcatctcacttttctcaagttcactttcagccccaaacaagcttcaaaccacatgaacaatcagtataaatgaaccatttgatcttgggaagcctcctaaaaagcaagagtatcatctgcaaacaacaaatgagatacctcttccccttcaccacctctccccgtcaccattgccgttgaaatatagccgcattccatagctcttttgagaagacaactttgagcctccatagccacaataaataaatgagacaaagggtccccttaccacaaacctctagagctctaaaagaaacccataggaataccattaatcatcaggaatctattgtattgaagtgtcatattttgttaaatcaatttcttcatgacaagattttttgttaaatcaattttttcatgacaagttttacatgttttcctatgttgaaattgatggattcctatatttacattttttaatattattatcttttcacagaattagctacactaccaaattcattataggccaattagctattgttttcattcagatctagaaccctttttttgaaatgctttctgctccctttttttgtataggattacatatgaatatatacagaataattgtatgaaaatagcctaggaaataatgcctacgatcatgctatcaaagataaataaaataagtgaagaatgctaagaaaggaaaaaatcctaggagattctatgtacaactatacaattattacagctcatatgggctggaaaaatagtcaacacaatctgccagaatttccaactggcagattttccaactggtagattttccaacagctatatatatatatatatatatatatatttttgattggaaacaacacagatttattgatagataaaaataagtacaaaagaaggatgaggaatcctcctgccaaagaaagctaaactatagaaaaatacactgaaaaacaagcaaacactctaaaaagaccactccttatggagtacacactgctatccaatcaagttgtatcacattaaggggagtcctcttaaaaaccatggaacaataaaagcccaaagagaagcaaggaaaacaatagagtcccaaagaaactctgaattccttgctttatcctcaaaaatcctcgcatttctttccctccacacaatccgaataagagcgatgtttgcagcttgccacaaggctatccccctcttagacgaaccaaatccattaaatttgatgtacatcatgtcaaggatgctcctcggggggacccaatccatcttagctaactgaaataacctgtgccataacccaatcgtcaaggagcaatgaagaaaaatatgatcagctgattccccatgcttcatgcacagaatacaaatatccagactaagggctttgtagggtcttctcacttgtagcatgtcattagtattcactttcttgtgtgccactaaccagatgaaggactgtactttgaaaggaatttgagaattccaaacgaacttagaaggaaaaacctgaggagatccagaaaattgggataaagctagaaagaaagatttaactgaaaaaagccttgaagaagataagggccacaatttggcatctggaaccgaaggagataaatgcaatccatcgagagatcgcatgaggccttctaagtcttctatctcagaatctgacaggttacgacgaaaatttaaattccaagagaaaggacgagtaggaccgaggactgaagaaataagtatgtttttatccaagactactctaaatagacttggatattgggatcccaaaggttggtccccccaccacaaatcttcccagaaccgaattctttccccatttcctaccacaaaccgagtaaacgaggaaaactcctgaaatacttgagtaatagccttccaaggacagcgatgtgaccatctgactattgtgttgacatcccaaccattggagtgtgaaccataaatgcttagtatgacctgatgccgtagagctgaaccctctcaaaggtacctccacaaccatttccttaaaagagcgagattcctcagagaaatattccccaaacccaaaccccctatttccttcggtttacacacgacatcccacctgactaaatgatcctttttgccttccccaatccctgaccataaaaaatccctctgcaacctctcgatttttgcagcgactgaaacgggtaacttaaataaagaaagaaagtaacagggcatatgggtaaggcaagattggatgagagttatcctccctccgaaggataggtatgccttttgccaaccatctaatcttcttgaaattctctcaatcacaggatcccaaaatccacctgccctggggttcccacccaaaggaagacccatattgagtataggccaaccagaagccttgcattcaagcgtctcagccaatcttgaaatatgagcttgatccaaattgataccataaatattactcttgtctagattgaccttaagcctagaaatatgcccaaatgctaacaaaagactcttgagagtctgcaagtcttcctccctagtgttagaaaagaagatggtgtcatcggcaaattgcaaatgagataccctagttctgtttctacccaccctgaaaccctccaacatatttctctcctctgctctcaaaagcatcctactcaatacatctgctactaaagtaaacaaaaagggggataaagggtccccttgtcttaatcctctcgatgccttaacccaacctttagcgctaccattcaccaatactgcataagataccgaggacaaacatccactcatccatttcctccatttaggactgaaccccttcttctccaacacttgatctaaaaaatcccaccttacgtgatcgtaagccttttcaaagtcaattttaaagacgacaccttcctcccctgatcgtcttctctcatccactatctcatttgctatgaggaccgcatccattatttgtctcccttgaacaaaagcgtcttgagtagaatggatggtttcatgtaaaacccctcttagacgccctgagagcactttgactattatcttgtagagactagtgatcaaactaatgggtctaaaatctgagattttctttgttgtactctttttgggcagaagaacaatgaaagaggcattagtgctttgattgataactccgctcctatgaaattctgcgaacactctcactgaatcctccttaatcacatcccaacagtcttggaatactgcaatagtaaagccatcaggccccggagccttgtccctatccatctgaaaaatggccttagaaatctcttcttcagtgaaaggggcatccaaacttatcgcactctcttccgaaataggggaccaatctaatccttcaatactccaagactctcctataggactcgcgtagagtttttcaaagtaaagtaagatctcctctgtgattctctcggcattatttccttaacccatttcacctagctttttgtctccaatggatttcctccctcaaaattaattcctctagctccccttttcttaaggctctttgatctaccaattcagaggtgagacccccatcttgctcaatggcgtcaaagttagctaaatccttgagggtactttttttcttttcattaagctctccaaaagaaagcttattccattccttcaatttggctttaacaaattgtaatctcctcatgaacttgtggccttcccatccgtttccttgaaaacccctccactaatttctaaagttctccttgaaactaggatgttgcagtcacatgttctcaaatctaaaaggtgttgggccccacatgaatgggttggtatccaaagcaattggccaatgatccgaggtccttctgataagggtttcttgaatgccttggggaaagagctgcccccactcatttgagtaaagaaaacggtctaatctcttacacatgggagactcttgcatatttgaccaagtgaatgatgcgttccgaagaggtggatcaagcaattcacattctctaataaaactatcaaagtccctcatgcttgaagttagcctagagccccccaatttttctgaacttctccttatgacattaaaatcaccgcccacacaccacaacggaaaagttagaccataaatgtcataaagttccacccaaaaatccttcctaagtgagggactatttggaccataaactgcagaaatccaaagaggtccatagccctccaaggcgaacttgaccgatatcgagaaagagcctaataccacctcctccttgcacaacttttttgagtcccaaatgaacaaaatccctcctgaagccccacacgccgggagaataacccaatccttatttctgaccgtccagacactgcccactagccttctgtcacacttctccttttttgtttcctgaatcatcacaacattcggattctctaacctaaggaaatctttaatcacccttcgcttattacttgaacccaaacccctaacattccaactgataattttcatggaaaaacactcaggccctaaccctccaaaccaaatccacctggattcaaacgcctatggacctctattcttcctcctagagtacaccttaatgtctagagagcatagaacctctcgcactttagccattttcctaggggacaggccatcgataagaaagtcttctggtggggatgcctcattaacccccggactgcctggcatcaggttagaagacttcccaggggtagatctctcggacatctggttagaaacagctctctgattctcctcctcaacatggacagggatgtcaacaaaatttaaggggccaacatcgcctatttcaggaaaaaatttaaatttaccttgatttaccgaaggagactgggaaagaaattctgaatttgggagatgaggactgagggactcggaagattcttttccagattacggaaaggataggaataaggctcgggtggctgagaagaaaaaggctgactttcctccaagttttccactctcggaatttcacaatttcctcccaaaatgatttctttacctctggttcttggaatagaaggtgacaccgtgactgaagaaccacaaggatcgtaccccgctcggccagtaaatcctcctttgtcatctttgagttgcgatttttgcgattccatctctcctcttgacgtcgaggtctcttccttcgaccagctgctgcatatccttggcagaagacaacagaagatgggactctctctgatacctcgtatctgttgagatcccatcccgccatccacttccagattgcggacttcgctaagtgacgctgcgctccgtaggggaagaggctcgctgctactccattgtccatgacggcgagccgcgcttggaaggaagagtttggaccacatcttccttgaatccatcgtcttttccccttgcgtgaagtcttccatctgaaccattggagctttcccctttctcgctgcgctttcttcctctcgagacctacctctcatgccagaggacatcgatcctcctagaacttggcccaaccccgacgggcctattgacttacagcccacagtccgacgcccgtaactcacatcttctgtctctgaaggtgggctagggttggatgaagtctgggcctgtaactcatcggcccgaccatcctctccatatattacctcgacgccggccctctcatcgcctaaacgaggctgcgtggtcgcttttgcaaaggagcccactcgctagagagaagaaggggatgccgctgcgtcatgggcttgaggggcgtttgggccagcgtgaagcccacgactccttctccctctttgggccgttactagatgggctttagtagaagtctcaggcactatgggcccaagaatgttttcttctactaagcccaatctgctcccttcccatcctttctcccttttggccgccatgcttgtacttgagcaccgataacgtgcccggggaagaagctccctactgtagcactcattacccctgatactacctcgtaacccctctgcaaattttgttgtctgagagacgcaacctccctctttcaaccactcgtacctgcagtgggatgtctcggacgtgacagtgtcgtcttcaccctcttcttcgatgactgaaactgctactgtatgtttccaggccccgtcttccacctcaagcaacgctggaagcttgacattaggatgcatctccacccacagcttcaccttcgtcaagtccaacagcttcacggcttcccttgctacctccgtcaccctcccccacttcttcaagatgaatttcagctggtcttcctcccacaagtgaaaaggaaggcctttcaactctaaccagcctcttctgaattttccaggaataatcatattttctcttggcgaccatcttcttaggagaacaagccttcctttcactaaaagtctctcctgctcttggaaccattttgctcttcctgctgtactcacaaagaaacaccccttgaaggcggaaatggggtttatagacaccatacctttcacacccatcatcctcgcaatggccttgccttcatgagtccagtcttggactttttctttgcattcacatattacggctctggcccattttccagctgataatagaactccactcctaattccatcctctgcaaccacctctgcgtatgaccgaccacctctatatatgcttttactcatctgagtattgccaaacatcttcttcaactcttctccgacttgatcagaataatcttgcactgaaagaatcgccctcctaaggacttcccatccattacctttaacaccctcggggatgacaagaagtagaggtttccttcttgtagcaatctcggtgattttcatgaatcgccctctattgttgaagcaaatctccatcaaatgaatcttattctcgcccctgaactttcgtgtaaatcccctggtattctccaactccacagctttcttcaaatgctctgttaaccaatccacctcctcccttccaaatcctactgatacaacaaaaccacggctcctttctgttactgatacccaagttccaccattcgatccttcaaacttcacctgaaaagactttttttccacttcaaacttttcaactttgcacttcatcatgcctcagatgcttactcaagaactctcacagcagaacccctagaatcattttcagaaacagccctcattcaaacttaatggccagaactatccaatatggtctgaacatgtgtgcacgtttctgaagagaaaaggaaagctcggtcacttgattgaaccagtgtttgtccagagtcataattggagcaagttagaccctagatccataaatgcttccatcctccttctcggaaatgctttgtttctatggatgttaccttcttttccaacagctatatattgcatcacatgtaatgctgtgtgtgtgtgtgttgggaggcttgcagtggctcatatttgtatacatacttttttttcctttacttttcatcatatataatatgatacaaaatacaggaatatagcaagaatgatacacaatatgagttgacaattatggttgacattgagtttttcttgaattgagtgcacttgtatctatatgcattatttatcattgctttagtttcaactgactattattttttgtgctcccaggaaattattttcacat

SEQ ID NO: 10317 - DNA, 3419 bp, Vitis vinifera
  Intron number 15 from transcript GSVIVT01014047001 (locus GSVIVG01014047001) derived from phytozome v7.0 (chr-ID chr 16; pos 10025171 to 10028589)
caatccaggattatctttgttcgttcaagtcccaggtatcattgttgatggatatttctttcagctaataatggaagttgagttgtcatcaagttttctgttttttgttgtatacaattagtagctatgctcagtttggtattgctgcaacttttaggaattcacttttagctatggtaaatgaaaaatcaactgtgatgaaaaacaattgaacatttggtaaataatggtttcagaagcaacagttaagtgtttgacaaaaccagattattacattgccgtgaacatgtgtaatgactaaattatggatatttaaaatttaaataatcttatataaaaatcaattttaaattaaataaatcattttattatttaaaaatcaattcttaatatttatcattttccttttttattgcttttaaaaaataatactgtcatttttttagtttaattgaattcaagcaaacatattgaagaaagctttggaaaaattctttctaacttttttgaatgagtacaatgctttaaataataaggaatagtttgactaagtagagctaaacaaggaaaaacatctagcctatactaattccattttgatttcctgggatacaacacaaaaatatctttgattagttctcatttgcagcaggaattagcacaatattctcaacagaatcaacataatatcctcaacactctcttaagctggttcaaatatgtccatcattcccatcttggtgatcatggattgaaataattgttttagaaagcctttaaattgttctttcattgagacaaatggtatacaaataggccattatctagcattttattgatgaaatgttgattgatctcagtatgttttgtactatcacgctgaacctggttgtgtgctatgttattagttgctttattgtcacaatacagcctcatagacccaacactacctattttgagttccttaattagagacattagccacattagttcacaaattccttatgtcatagacctgaactttgtttcaacactgatctaaacacaacttgttttttttcttctgtaagtcaccaaatttcctccaacaaaggtacaatacctgagagtagatctattattatttatagtatctgcttaatctgcatcatagtaagcttcaacctctagatgactatttttagtgaagacacttttgagtccttttttaatatctcaagatctttaccaccacattcatgtgttcatcatttggagcatgcatgaactaactacaacactaaatgcaatattaggtttagtatgtgccaattgaattaccaactagtttattaactgcagtatgttctgttgatgctccaattttgtcctttacatctattggtgcatctcctagcttgcatctcaacattcctacatctttcaaggggtttcagacatactttctttgtgacaaacttcccttgatcgagacttgaattgcaaggaaatatctgaggtcctccaatttttttcaaactcctgtgcaagtatcttctttaaccactcaatttcagccgcgtcaattaccagttaattttatgtcatcaacatacactgtaattttctcccttgacatgtttttagaacatagtatgatcaccttggctttgaacatattctgtcttgcaaattgatttgaggaatttttcaaaccatgcccttggtgattgtttcaagccttagaaatgttgctatacgactagaggagataaatacaatagaacaatgcagaatttgagtaggttaaaggcacctgaatcaataatcccagtgtgggaacaacttgctttggaggtatttaaagtgtaaatattacctatttggcttgggctatggaataggaattgtggttgagtttggattttccaactgaatcaccgcttcttcaacctctccacatcatttttgttcaggaaagtttctagagattccttgagtatagatgtttgttgaggctgccaaggtcatccttgtctctaggtttccttctattagatgaagcaaattttgaggttgccaatgcaaagctttcggaggttggattctcaggtctacaaagcattagtccctttcagccttcttcccctcaaacgtaagcaaatacctctctcatagagagaagaaggtccctctttccccatcatatcctttaacttctttgtatcttttgtgcaccccatttccacatcttgataaagattcaattctagccaaagtccttttttgaatattgaaatattctgtgatagacttggttccttgtttcatggatccaattctagcaactgccttcttagaacacatatgagtgacatcctcccagatgtcttttgtgaatgttagtatgagataggtcttactgatttcaggctgaatagagtgcaatagccagaacatcacccattgaattttctgcatcccaggtctcaggccaaggatcatcagttggtggaaatgagctgcccaatatgtagttcattgtccttttgcttttcaagaatattttggctgattggggctatgtcatgaaattgaactgattcaattttgaaattgtaattttcagagtaggatttccagtagaaaaaaagtttaggattgagtgtggaattggtgaaagtaactgtttcagaggtttctgacattctcaagggataacatgagagaagattaggtccaggttaataatgaaatggtgatcaaggccaaggactagatcaatgatgaaggctaatcacagagaaggtgttctcagcaataatggagaagagaaaaacttaggtatcaacctgctatgataccataatggctgaaaaatggaaactggtctatcattcctctgaatagtacacatatatgatacatacagagttgccttctctttggaccaaagaaaggaaatgcaactagtctattctatttacatctgatttttaggaatataaaataatttgtagaccattacacaatctgtttaaggaaaaatgaaataagtcatgattctatcaatattcctacatattgcttggggagtaggtctttttaggctgtttgtatggcttctttttgtttctattattggctcttagtgtgccctgtgtatttcctttgttctaaggttacaacttttctttttctagtcttcttttatcagtatacatctctaatttgcccataaaagaaaaattgtcttgttatgtcttgccatattagccatatttaggcaatgtatgccaaaggccctttcaataggaaatattaatgaacagaataggctactctttgtgcgacttataaagttttttatttttattctttcttttttggtctgttgttgaacagggtttgacagttgtaaatatatcagcaacaacatt

SEQ ID NO: 10318 - DNA, 9525 bp, Vitis vinifera
  Intron number 5 from transcript GSVIVT01009307001 (locus G SVIVG01009307001) derived from phytozome v7.0 (chr-ID chr1 8; pos 7198598 to 7208122 reverse strand)
ccgggcaagattcaccattatctcctatatacaaggtatctgcagtgtgctttttatttaaaagctcctattatatcagaagatatgtctattgtttatcctatctccactcctttgcagtttgttggaaatgtttattgtctgcttatttggaaaacaaaagcaagctagaactaagatgataacacattaaaggttatgcataggttgcatcattattcatttgtgcatcaggtgcagcatcttatattttaatcaaaatcaaccacaagtatcatgtagaatggggaaagttgcaggatgtcttagtttgtgtatggatacatatggatgcatatacttgtgtacctaagtatcattgatatcatctccctctgttgtatattcttttccatgggtttctcattttgttcttcatcatcatcatcatcatcatcatcatcatcatcttatattttaatcaaaattaaccacaagtatcatgtagaatggggaaagttgcaggatgtcttagtttgtgtatggatacatatggatgcatatacttgtgtacctaagtatcattgatatcatctccctctgttgtatattcttttccatgggtttctcattttgttgttcatcatcattttttttaagaagtacccagaatttctgttagaaaaacatgaggtctgagttcctgcctgcacaaacaccatttatgatgtttacttaaatattattaacattgtccttttgtctcttagtaatacttttttttttcatgtggtttctcatccttttactttttctttttttcttttttaaaaaaagattttgtgttaaaagggcttcaattccgagctcatgttagtatagacaccattagttgctagacccatacagttatgaattgactcacttcatcttttaggttaggtaggtttatactcctgtgaacgcatgtctttttttgtcaagcaccttgttaataaatcccatgttgcttataaaaaaataatagtaacaactttttaatgtttattagcaaaagtctttggaggatagcgagccattgaagctcaagttgtagtttaaatttttatttgtcatagcatggtaaaagaaaattggaaaattttaccctatatatgaaatatttacaagctactccctttggccaagtattctcttagtcatattgcccatttttagttgtttccttattaatgggattcaatggttgtgtattgtttgggtaatttaggccacattggaatttgaaatttgaaattttctagtgaagtgtctgttggatgagtaaaacaaatcacatgtgtccaattcatattggaaaattttgatacatgttatcagtcaaataattgagttgaatttatgccatgttgacaaagttgtactaaattacatgggaaattagataagctatgtaacactaaattaaggatatttgaattgggatgtaattaacctaataaaattatagggagatggtgcaacattacttttataaactaaattgatggtgaataataaattgaagatgagggatttaaaaatgaaaaagtttgaaaaataataataatgatgatgatgtgatgattaattgaggaattataaaattgtaaatccaccatttaattaaggggaattataaaattgtaaatgtggattttgggatgaaatttaattgaggaatcataaaattgtaaatccacaatttaattgaggggaattataaaattgtaaatgtggatttttgggattaaaataattagataggtaattttatagtgttaatgttgggtggttggtatagatttgaaaatttaaaaataaaaaagggaaaaggaaataaaaaaagataaaagataaataaaaaaatatatatgataaatataatatagaaagagtggttgcgcacatgacactacttaacaaaagaataaggaaatgaggcattgtagtaagttgtttcaactatgtacaactgcatacaactgattgtgtagttgtgatttattctgtgtagttgttgatgattttgtatagttggctattctaaaatagtattgtgtattttgtataaatacccttgagatatatgagaatattcattcagcaatttatcaagtaggtattagagtgaaagcaaagaactttccactctttttcactctcttcgttaccatatcatgtctacaaaaatagatataggtatttctaatagcaaaaagccatccatggtgaccattcacgagattgtctctctaacaatttttgttaaattagatggtgctaattattgtgtttgatctcaaattttaaaaatgcatgttgctggtagaaagaagaagggatatatcacaagaaagaagactatacctataaaggatgatccaaactatgatgaatgggaggtcgaagacattctagtcaagtcttaactcatcaattccatgactgactagctaatgtcacactttgtgcagtgtggaatgactaagaaggtgtgggatgcagtcaagaggagctattttgatgtctcttgactcttctcaagtgtatgaattgatgaagaaatcctttcaatcacggcaaggcggtcgtcctcttgtagaatattacaatgagttaaactcaatattcatggagtttgattatcaaaaacgtaatgatatgacatatagttgatattgagaaacaaaggaattgtactgctgagaattgggtttatatatttcttgtaggtcttgataacagtttggatcaagttagcggtcatatttttgtcacctctcatttaccaagtctagagaaagcctattcactagtccgtcatgaagcgtagaggcaggtcaccatgggaatggaagatcactctgaggcttcgacaatgactgtacggaatggaagataacattcacaaaaaaaatttgataatcaaaagcacgagcagacatttggttgatgagaaaaacaacaatcatgacaaccttaacctagaaacgttttggaacacgcatggtaaagcataaagcccgagccacctctagaatgtggcggtttttatgctctattaagtcgttacgttgtggcatgtaagtacacgttgtctagtggaggacttcattttctttgaataaatcgacaagggtttgattcacagactcacgaccattgttagagtgaaaaaccttaacccgagtattaaatttgtggaatctcttttgacaaaactgagcatcttgctgctaggtaaaggccattattcttagacttaagcaaatttacccagctcactctagtacaatcatcaataaaagacaaaaagtatttaagacaaaaagtatttatgagccaaaacaaaaagagtagaaaaaggaccccaaacatctgtaaaaacctgagtaaaaggaatcaaacttttaattgagatttattttgaaagacacatgatgatttttagcataaatgcattgttcacaccttaaagtagaagttgaaatattttgaaacaaccgaggaaacaaatgtttcaaataagaaatagatgggtgacctaatggataataccataaaagaatcttttctcttgctacttgaaaaacatggtcagattcaaattgtaactctattgcccccttctaagtattaaatgactcttccgagactaatcctgaggtgcatgttctttcacctttaacttctgaaattgctacattgaatccacaaaatgttgaacaaggtaggagatatcctcttcgtgatcataaagaacctaataggttgggtttctcaaaatcatcctctaatgttgcctatgctatttcttattttgtcttttatcatcgtctatttaagactcaccttacttttgctctttagttatcatttgtgtctattcctagtcatttttaggaagcccttaaagatcctaagtggaagtcaactatggtagaaatgaaggctttccagaaaaactctacttgggagatggttgagctttcttaggaaaagaagacaacatgatgtaagtgggtgttttatgtgaagcacaaattaagacaattgacgggtacaaagctagaccaattgccaagggatactacacacagacttataaaatttactatcaagagacctttgcttctgtggccaagaagaacacactatcagagtcatgctttcttttgcggtcaatttggactggccattgagacagtttgatgtaaataatgcctttttccatggtgatttgttagaggaggtgtacatggaccctttttcagggtttataccaaaatgaggcaaagtatgcaaactaaaaaaggctttgcatagattgaaacaatcaccaaagacatggtttggcaggttgagctacttgatgatgattttaaacagtgatggcagatcacactctgttctataggagagattgtgatgatattactttgcttattgtttatgttgatgacattattgttataggtagtaactctacaaaaatagaaaaggttcaaagctattggccaaggaatttgaaatgaaggacttaggtactataaaatcttcttgggtattgaagtgtcttggtccaagcaaggactcttcctctcacaatgaaagtatacattagatctcttggctgaaactgataactccattttcaaatcgataaatcatggctcgcccatctaccttgattagatttcaatgaacgaagaaagatatcagagactagtggggaaaattaatctatctaacccacactagacttgacttgttatatgcagttagtattgtaagtcaattcatgcataatctgagtgatcgacacatgaatgcaataaatcgtatcctagtctatctgaagtcctttctaggcaaaggtactatgttctctaggtatggacatctagatattgagggttacacgaactctatctttgtcggatctagatcgaatagaaagtctacgttagggtatgtgtcatttgtaggaggaaattttgtaagttggagaagtgagaaacaaaatgtggtctcattgtctggtgcagaagctaaataccgtgtgtttcatcatgcaactatggaacttgcttggttaagaattctcttaagtgagcttgggtttggttctaagaaacctatgatgcccttttgtgataacacgaccaccattgagattgcaattaatctagtgcaacacgatcgaactaagcatattgaacttggcatgaactacattaaggataacttagattttggcatgataaaggttccccatatcaagagtacagattagttggtggatatgatgactcatgttgctactagtggtccattctatgcatcattatccaagttgggcatatataatatctatgcaccaacttgagggggagagttagttgtgttagttgtgtgcaactatgtataactatgcatacaattgtgatgtacagttgtgtgtacaactgtgtacaaccaattatgtagttgtgatttattctgtataattgttgattattttgtacaattaactatcctaaaatattcatgtgtactttgtataaatactcttgagatatatgagaatattcattcaacaatttatcaagtagtgtgtagtgtgttgccaaaaaaaaaaaaaaggaaagaaagaaactaaggaggagaaataaagtctcagccttgggttttttccatgaggagagccaccattttgaggatccaatcgtactccgttttttatgaaatcttgataaggtgttttcattgaggcgaacgtaattatggtgttagattgaatttcaatggctggattttcaatatttagtaaggtggtttgttctcgaatcatttcataattttggaatcaatatgtttttcctttatattgttccttttgtgattctgttatatatatatatatatatatgtatgtatgtatgtatgtatgtatgtatgtatgtagtgccttatttttctgtgattatgtgattgtctagttggtcatttatgataacaatgttaatatgaaatcaatagtttatttgttagtgataaagctcatgctggttgaatataaatacatgtgttgggcatttagatattgtttggaatgtggctttgacatcttgaattgttaaatattgcgatactggaatgatatatttcactagcatcatgattgcatgaaaaaaaagaataataaattgtgtgaatgagaattaaaagaaaggaaactaagaaaaagaaatgactccacaagaggcaaattaagaagagagagatttctggtgtgaaagacacaaaaatttactctatgaagacctcaagtggggagtgtatttaggtacggacacgtatccttcaagtgaaagcccgagaacaatggtgcattgtgtgtattcattctcatgtgcatttttgctatgatgagatttgcatatgttatatacaaagttgaactgaattattattattatttttgtgtatgcatgcttatttcattaggtaggagtatttattaggtgcaatgcactttattaagcgatttgaaaatgcttgctcctcatttccttaaaaattttagatgcatatatagctatagaagaaccattggaggatcagggagcgttgtagaatgccccaagaagttgagctgtttgaaagattgttattaatttatatttaatttttaacttgtactgacttggttaaaatggatgattgtgttggaaaatgggaattatatttgttgctgggaatgtatttgctgcccaactgtgttgtatagctgtaaaagtttaaatccctaatttgtagtgttgataattaaatccctgatttgtaggaattaatgaggtcctactttcatagaattgttaaattctttagtataaattctgtaactatggataagtaaaattctgattttaattttcccacagattgtaatttggactttacgttgtcactttgtaaagaacctttggaagcattttgaattaagattaattatagaaattttttaaagattagttgtagaaatttttatcatttcctcaagtggatattggattagagaactatttatatttgtatttgtggcctagttattaagaattcactttattaaatcctagtctagtaattttgtcataacccattgacattggatggatattatttactttgggcccataaccttcacgattgtcctcactactttaaaactcatccaaccaatttagaggcatcaccccttgtgaatgtcaggaacttctccttcctaggtgatgtggaacatcacaactcaccttcccataaatgcctaatgtcctctcaacccatggctcaggtgtagttgactctgcacactcaaagcttaggattgactttgataccacattgtcatcactcgaattccaggtgacctgaaactcaacatgtgaccccaagtcaaaagttcgatcttaaggattgaatgtattcaagttgatggtcaactaattaacctgattttccttgtataatttaaaatctaattttaaataaaattactagatgaggatttaactaagtgaattctcaataaccaagccacaaatctgaataattctctaatccaatatccacctaaggtaatgataaatatttctacaggtaatctaaattcatctttcttgttccctttttgctcttggatctaattggtgtcctcaatatcttactcaattagttatcttcttgtgactatctcaaagtcgtctcttatggctaatggtactgccttattcttgatcactgacctcaatccattttgaaacattcttcccttctcatcatcctctctaatcacatcctaggcaaaccttgatagctcaaagaaatgggactcatactcttacactatcatggtcccctataaggtgtttaaactccattcttttggtgtgtctaacaacttccctataatatttatttgggaaaatttcttcaaatcggtcccacatcattgcatttgtatcattcaccctcattgtttcccaccaaaaatctaccttgtccaacatgtactctaacaaacttgcacttcactcttctggaatatacaagcccttcaatattctctttatatacctaaaccaatgttttgccacttttgcatttggttacacattagatgatggggttgcattaccataaacctcttcatagcttccatttggctcatgattgcccttgttaggtgagttcccctcttgagtattgtcagaatcttattatgcttgtgcacccccggatctccttgaaccttgacctcttaagtagttgggtggttccccctagtcctcttctcatttctttgagttcgtccctgatcaaatccagttcattctcctgcctcaacctccctctccatgaccttcttgacatttctcactatcaaccaaggcctaattcagtcaaaccgtaagacaagtaaaatatatccacgtacaataatttaacagttatactgtctatagcatttttctatcacaatatctatgcaacaatagaatttgtatccatgcactataataatacatttttccttaaccaagacaaccactaacatattatatcaaacacataccaaaaatgaataaataaacaagcacacaccaaaactattcccagggtattattgcaaccttggctttgataccatgctgttatgacctgttgatatgagatggatatcgttcgctttgggtccacagccttcatgactgccctcatggctttaaaacacaatcaaccaattcaaagtcattaccctttatgaatgctaggaacctatcctccccaagcaatgtgggacattacagtgtgagtgtcaagtcatgcttgcagcttttgaaaggggtggagtgggagcttagccaagggcttggctttagtgtgtagaactcaggagtcaacttttaaaggttactaattctgcatgccttgttagggattcttttaagttgctgtctgcaagagaaaatattactgcatttagatattcaatccagccaaaatatttcagcttggatgaaattccttccagcttcatattctattttctttacttctcattgtccttgcttcttgtacttgcttgtaagttcagattgttgtgattatcaattgtgtgattactggatgggtattttgaatttattctcattcagtgaatagatatatatctcaacacctgctgtaagtgctgcatgcctgttcttgcttttttccacatttgacacttagcttggccataatcatgtttcatccattttttgttgtcttttatgtataacaactgcatttatatttttgttatatccctttcttttaaagaggttgatcaaaatctgtatatgttgctaactatttagtgtggcctgcaaatctgtgtatactgctagctatttactgcgtcctgtggaaaatctgtacaggttgtgaagactgtat

SEQ ID NO: 10319 - DNA, 8680 bp, Vitis vinifera
  Intron number 4 from transcript GSVIVT01029959001 (locus G SVIVG01029959001) derived from phytozome v7.0 (chr-ID chr8 ; pos 2315011 to 2323690)
agccttcttcaccagctgatcctgcttctgtgccggtaaatagaaaatcatgtgctctagatgaatttttatgttgcgctatcatttcttccctttctgtagaatagcttcaacttatatgtatagttgggagggttagctggattggaagatgaacgcgaactaacctatgcatgcgatattgctacaatcatactaaaaactactttcttttctctatgtgaaacctaagaatgccttgaaccatatttacatagtgctacttagtactatatatattttttgggttaaatatactttgcgccctcaacctttggcgcgttttacactttactccttcacatttaagacccaacattttgcccctcaagtttgctaaagagcaacactttgccctcaattacaaactctccataaaattataaaagagattgctcttttttgtgttcaagtttgaacactggttcgaacttagatagaattagttttgaattagcaactttgaagtgaaatttctcaaatgctttcaaaatatgataatcaacagttttgatttttgtttttagagagctgttcacacgactcttcttgattttcacatgtagctgtgaagtgtgacaacttcgaatttggactagtatttttctttgtatttcagctttgttttttttgacttaacaaactgcttattgacttttaaacaagtttaggggataaagcgttgctctttaacaagtttagggggaaacgcgttgggttttgaatgtaaggggacaaagtgcaaaacatgctaaaggttaaaggggtaaagtatatttaatttttttcccctttacaattgcattcctctatatattccttgtctctatttagacaatgtgtttgtctctttgatcaatattcaacattttgtattaagattctcaaatcccgtgtgatgtgttcaacatgtgtttatacgtgtttgattagaaatggcctttgataggacacatgtcctctgttgaactgttcttgtagcataggttgtaattaatgctaataccccctaattggtaccaatccatgttctgagatgactaattgtttttgcttcttaaagtaaccttcattagtcattgtctagattttagccaaactactttgttttctgcctaaataatgagatcaatgaaattagtccctagcaaactggtaaaaggaatttggatgggtagggcgggtcttgattgtagtttttttatattgaccaagaagaaaattttggtcaagttttctggccacatcataaaaatgtttctcaaacattgtttgccattttaatccgtatcctaaggaatttcaagtatggtttggaattgagttgagttggaccactataaaaattaaaatctcctttttgtgtcctaattggcatatctttgtctaaatgccaatttgataaaaaagagatgcttgtttgaaaattttgaaatcctgattggaatttctaaaatcaacagaacccccatactttgtatcaaaatccactaactctcttaaacaaagagaatgagagcctccaaggtttaaattttagttgttgaacttatcttcttactctttgcacattataaactcatttttagtgtggtcttaaaagatgcatcacaagtttagattttgaactgccatatctgccaaatgctaacaactagaatagttgtcatcttaagaaaactagactagggaggttttctatttctgcacactaaggtcaagtttggttcattggacatgatataggatagtataacaagtgagatagggtattctatttcatatttggttaacagtaagataggataaatgaagaaatatgagaaggaaaaatgattctattttccagttcttgagaagaaaatacattgctattctatttcatatttggtttacaatgagaaaggataaatgaagaaatatgagaaacaaaaatgattctattttccattttttgaatggagaagaaaatacactgcaatgaataatggagtggctgaaaataccatcccattattcacaagatacaactactaacttacctagaaagactcacaaattttaggaaacaatctgcctatgagattaggtaacatgctactagaatctccttattatagaaaatattaagccaaataaaagcaaccaatttacaactgttaaactcctagaaattagaacaatagctgaaagatttccacactcccccttaagctaggttctagatgttgatcaagcctagctgggtattaaaatcttcaaagttgatccccaatagagctttggtgaggatatttgctatttgaaggcatgttggtttgtctaccaactgaattatccctttattttttcctttatgaagtgatgatttgcctctacatgtttcatcttgtcatgatgaattgggttcttagcaatgcttatagcagactgattgtcacaaaacatcttcataggtttctcaactgagatacttaattctcttagtacccttctcagcctcattccttcacacatgttgtgtgctatgcctctaaagttaaattctgtactactccttgacacaacaatttgtttctttcttcgccatgtaactagatttacccacacataggtccaatatctagatgatgatctacggtcagtaactaaattgacccaatcaacatcaatgaagttttcaatatctttgcttgacgtcttcttgaagtataaaaccttccttggtgtcatctttgggtatcttaggatttgatgtataaccctccatgtgttctttggttggattgttcatgaattgacttaccacactagtagaaaaattgatgtcgggtttagtgtgagaaagatatgagttttcccattagtctttgtatctgcctttgtctacatgtgcactgtcttcttttgctcctagtttagttgttcaatccatcggagtattagcaggcttgcacctgagcatccctatttccttttgtaagtcgaggacatactttagtgattcaacttgaggaatttgagaatagggttagtgtatgaatttgaaggattgtgagacaagtttggaatattggcttcaatatcctaaagctggtattcctgtgtgtaattctccccctgattatcagatttgagatagtaaggttgttcaaaaaatgtgacattcatagagttgtagtatttttttgtgattggtgaataacacttgtaccctttttgatttggagagtacctaatgaatatgcacttgattgtttggatcaagattgtttcggttttgttgatgtatgtgaacaaatgtagagtactcgaacacttccagggtggaaataattcgagttctaggatacaaattgagaagaacttggcaaggattttggaagtttaaaactcgagagaaggcattctatttataagataagctactgtaagaactgcctcaccctataaatgttttggaacatatgtagagaacagtagtgatctagcaacttctagaagatgtctattttttctttcaacgaccccattttgttgaggagtatctacacaagaactttgatgtactatgctctaacttaagagataatcaccaatgattgatttgaagtactcttttgcattgttagctcttaacacttgtattttggtttggaattgagtttgaatcatattgttgaaaattttaaaattctaaccagcttttgatttttctttcatgagaaatagccatgtaatcctagtgtgattatcaacaaaagatatcaaccatcgagttctggtgatatttttgattagagaaggcccccacacgtcactatggatcattgggaaaggacaagacactttctatggttgattggggtaggaattatggacatgttttgaaaattgacaaatttcacaatgaaaaattttggacttttattattgaataatgaaggaaaaagtttctctaggtataagaaatttggatgacctaacctatagtgccgcaacatttctgcactatcattatcagaattatcaactgaaaaagagcttttatgaaactgacctttttaagagtttgggaaaaatttagtaacacaactgagttctcaagtgagtttgctaatagacagtagattacagtccaaatttggaacataaggaacagaatccagggttagattctttgaaataataataaagcctataccaaccacctttgagagagatccatctgttatcctgatagtaaaattttcatgtcatgggctatatttgtggaaaatattagcatttctagtcatatggtttgatgctcctgagtccacaatccatggactcatcttctctttattaaacagttaaggcatttaaaaaattacctttttgtgccaaggacctagttccaatttcagaggtgacacgagcttgttgtgattgattgaacgttttttgcagaactttcagttgttctttgctggaaagactaggtttagatggtgtggagttcccatcaattgagaccaaattgccatgactttctttgtcaatagaaggacgtgtaggcttccaatctgctggtttaccatgaatcttccaacaggtttctttggggtgtccaggtctgtgatagtgatcacaccatgatcgtccttttttttgccaattatcattgctatggtgctgaatccctcaagcaacaagggcagaattttctatggtaggtgtggcattttgtgatcccgtcattttcttttatcggctctcttctctgtggacttttaagaaggtttctcagataaggtagaagctttgatcccaacaacgtccctcgaacttcatcaagattcttaatgagtctcataaaaaacttgaatctttttctctttttgatgatcttcttatacctgattccatcttctgggtagtcccaatcatgttctttgaacatgtccaactgttgccagtgacgtgtgagtgtgttgaagtattgagtgatggacatgtctccttgatataggtcatggagaatactttcaatttcaaacaattttgatgtattttcattgctgcagtaggtctccttagctgtatcccatatttccttcgtagttccatagagcaaaaagttttctcctatatcattgatcatggagttgataagccagggcatgactgtgttattttttgatttcgatgatttaaattttggatttctttcttaggaggaactacaaccgagatgatcatctttcccttttccgcagatgaacatcatgacagattgggaccactggagatagttgtgcatattcagtttgtgtcctgtaatgggaagatgattgccatatgatcctccattgttgtttgagacggtgacttcattattggaggtgactttggagattgagcgttgcctttctgtggccatttcgtattttgtcatttggaaaactaaggtttcagaggaggctctgataccatgaagaaatatgagaaggaaaaataattctattttccatttctttaataaagaagaaaatacactactataaataatggagtggcggaaaataccatcccattattcataggatacagttactaacttacctagaaagactcactaattttaggaaacaatttgcctatgatatcaggtaacatgttacaagaatctccttactatagaaattaccaaaccaaataaaggcaacttatttatagctgtaaaactcctagaaattggaacaataattgaagatttccacaataaagaatgagataacttattcaacctttctctgatataccttctacatgagatttaataattccatggaagtacacacacacacacacacacacatgtatatccattgcttccatcttgaggaaagggtatgaggtgaagctatcaaatgtgggtgggaagactttaagagtagaatagttttcaaagtggaaaatgggtagagggtggagttttggatggataagtggtgtagagatggacctttaggtgtgactttccccgtgttattcttaatagtcaccactaaagatgtttgggtagttatgggagcagaatggggaggatgggtgttggaactctaaattcacaagactatgattgggaaataaacaaggtagaggtttttttcaagagattacaagcatagtcaatttttgagatatggaggataagatggtttggtagaacacaagatgtgacaatttcttagttaaatctctttattccttcttatacattgaaagatttgtggcattccctataagtatggtttggaatccttgggttctgatgagggcgggctttttcatgtgggaagctacataagggaagatattgacgttgtattggcttaaaagaaggggatgatgaatcttaaatagatgctatttgtgcaaaggagaaacacaaaccattgatcatatcctcctttgctaatcaaaagcagttatgttgtgacaaattgctttttctttatttgggattgagtgggtgatgcactccatagtaagagagaccctcttaagatgacttggatcttttgtgaggaagaaaacttgaaaagctactcctttgtgcttattttcgaccatctgaaaagaaagaaacaggaaagcttttgaaaattttggaaaagaggactaagttatcaagcaatcgttcatgtatattttttgagggtgggtttgagtgtatgtaggtgatagctctttgtccatgttggactccattgattggctgagctccaagtgaggtgggggagttgttttttgtttatctctcaacttagttggccttttcgtgcctttgtacgcaaagtgtataattttgtgtgcccttttgttaggcactattaatatattttatctttccctatcaaaaaaagaaaaaaagaaaaaaagttcattgcttccatccattctctctcactttagatttttttttcatgttaatcactcctggaaacaaaaagtttttaattaatatatatataccacttaaaatagttttaattcatatgtcatttaatatctagaaaaaatgctttaaatatattattattcaacacaatgtgatatttttatttataaaatttaacataaagtgcagagagctgtccatataatgctaaataggagagggatttaacatttttttaacaccaaagattaagatgctagaaataatatcataggatgtgtatatcctatcctattagtaaacataatatggtctaaggcttgtttatcaagttgagcttgtaggattcatttgaagcttaacagacacatttgaagaagttgaaagctatcaaatttttgtttttactttttgagttatctagtctgtgaatttgtctcatttttcctctcccttttccctcttccttttataggcatgaaccttgatcaaacttgaattttgactaatttccttaatagcattggaatcatgtagtcaacaaattacattagaagtcaataaaattagttatgttttctgtctacaccccttccttcaggaaagggacatcagcctataggatctccatctatcactgtggtctatatgtgatttaatttggttcaacttataattcaacttatgtagttctaaactgtttcaaattaggttcatggctttagtgaatggaaatccaattttcctctatcgaataagaatttgaaattagaattttgatctatgaaaggttatgttcagatttagatccttgtattccttattgggttgcaatccacatattaatccctagatatcatgtgatcccttattgtttcagtcaagaaagtcccatgatgcaggagcttgtctatgttagattttattgactggttgagttctggttaataggaggtgctgtttttatttatttatttattcctttctggctttgggcgccctttatacacttcccatgttcctgggttgcaccacttctttttttagttgcatattaatatatttatctttgcatattgcaacaacattaatctgtagatataatttaacctaaaatttggatttggagtctttgttattaaaatcctgtcgaacttttctctctctctctctctcttttttttggtttttgttgatattctaaacatcaggattgttatgagaataacaatgacctataagcctataatttctttctaaattgacgttctttcatttaggatatgccaatcattatgtatgttttagacttgtgagctttatgagttccagtggtaactgattttaagattggtgattgttacctttctcccataacctaattccaaaattagttctaataaggtgctttcttggagtcaatttgaagcagcccttagtttatatgttctaatcttgctgccaatccgggtgacctttttggtaaggattctgtatttctgaaacagtaaaaaggctgaatctttttgtatccatacacggttgcttatttatatcctttgttgtatatttgtataattatcagatttgtgctcagtgccttcattagttcattaagatttggaaaaaacacattttgtttttgcttgtaatgtcagatgtcccttgattatgtctaggcaaaattgaagg

SEQ ID NO: 10320 - DNA, 4753 bp, Vitis vinifera
  Intron number 2 from transcript GSVIVT01034629001 (locus G SVIVG01034629001) derived from phytozome v7.0 (chr-ID chr1 3; pos 13694348 to 13699100 reverse strand)
ttgtggggctgaaggctcagattttctctcttgaggtaacctattccttttttctcttgcattcacaatcacattcactcaaatctcctgtttgtctagcttttttctcaactagatgtgtctcaaattttggcgtctaggtttttacatggagacaagaatgatttatgaagcaaagtttttcgcaatttgaagtgtttatttaattggatttgtatttctgatgagtatgcttatcaatttgagtttattttttcctttcctatggtagagcaaactaagaaatttgggttgttcaaaatttgattttttttttttttgtatgtcactggtattgaggaagtgggttggttgatttgatgacagaagttgaatgtaggagactgtttcaggatttcaagccaaccaagtttttagatgtgaatcatcatggaatttttgttctattatttttaattgagaggtcggtctcttgttgtaaaaccttctctatgttttagggcttctctagatctataatgctttagagtatgaagattaataggtttctttcatagtttcttgttcaattttaggaagttggtgtcgttgttttgagatgtatatgtgtttgatggggattacatggatcttagaaacatgaatattaaaaaagttcatgcttttatcttattttctgcattttagatttagatgatggatttcctttatttgccttaatccttttttagcatggatgttgtaagtctcagaaaaatggtgtattatttttttcctttttattagcttgtcaaatatgtagattttgcttagtttcagtttgtgtttgtggccatcctgtctaggtagctggaccttcatcatcacttaatgtgttatattgattcttttgaatgccaatttaattgtgtgtatgtttttattgttgtctccttggtctttggttgagagagttgaatgtatgaattgagggaaaaaaaattcaagttgggtgacattctttttagaatgtttttgtattgatttgagatttgataaaatgattggcaggaaccatttgattaacaaaaaataaataaaaatcaattaggtatctattttaagatatattgatggtattgtaattgctttgggctcatttgattgtactcttggtcaacggattatatcttaacaatttgaagttttttgtttgatagatatcactaccggatcctaacattgtttttaaatgttgtttaatgaatttgattttctagacatacaatcaaaataagtgactttgatgctggattttctatttgaaaaaaaggatagtattagaagttaaaccaaaaagtatacaaataaaattaaaatatataacatttattatttatattattaatgttaaaattatattgaataacgtataagtcatgttatagtgtttcatgataaggctttggtatgtatttctaagtttataaaatttgtgtgtttaggagttcgtaatgagtttttaaatctgtgtttcttttataatttatttgtaacatggatgaaagtgttcgattgcaacagaaatgatgatgttcatttgttattattattattgaataatctgttcaatttggacccgctaaaatgatggcaacaaccatgtgagatgaaacttgacaataactttgggatgaaatttaagcgacaagattgtgaactgagtttgagttgatttgagagctgatttttatttattattcttattgacatttcaatttttctttggagcaataatgaatggcttgttgagccgagaattgatattcatttttataggttacatttgtaagtctttatatttgggacgagagttattttattttagtttttgtgaaatggtaccatgtttttcagattacataacagatgtaaacataagcattatgaagggtttaatgcaatagggctctatctctttttgttttggtgggataaaatgagagtgactactgattattgaatataacacaaaggacgacctctatccaagttccaaccactacccacctatatgcattaagagtattaatcaatcaaaccaaggtctgtacaattttcaatttctactattaagagtggaaaaccttgttgtatcagtgatttagaataaaatgaattagtcatgtatgtgttaagaattatggtgttggtattgttaagactcgatgtagcaaaaaatgatgtgcagaagattggagaagagaaagaagcaagtagggaaaaccccagaaggtacatgaaggaattgtggtaatgttcttttgaaagctgttttagatttagtggtactgctccatctcttagaaaacacatgcattagattaaatgggttgagtgtttttttggtaattgattatttatttttgggtgaatagaggcaaggaaaaaaatatacttataagggaatttgactagagaaggaaagagaaggaaataaacatgtgagacgattgaattagctgtagaaattgcatatgagatcttattgaaattgagtgaacaagggagagtacttccctaatatgagactcatatagacataagtctgcttgccctttgttactagtagttgtatttatttatgaattgaaaacgaacagtaagagaaagtagtttgcatatggcaatgatggattcgacaataatgtttttaataagagaagaaagtagtaaggaaaatgtacctggaactggaaaattcatagagcttctctcttcgagagaaaatgatgagggcaacctcagcataagataacatagagagcttaaaggccttcttcaagatgcaatttctccacttagaaaaagtgagtttgcgacttgtgtagttttctatatgttgcatttgagtatttttctctccacatctcctgaaaggtagtttaaatttgaaactctgcaattgcggaaaaccacatacacaacacacaacacacaacaagttgaaatattgcaataaaagagattgaagggaatgaaatgaatgatattcagagaataagttgtcaccaaaataggcaaatcaagaaaatcatgatgaggcaaaacaaagcaaagaaaccaaaaaaaatatataatgatagtgagcaaaatatagacaatcgagaaggaagaagtggatgtctgtgttttattgattcttattgcataacccctttgttttgtattgtgtatttttttctatgacctcttgtacttattcttcccctttattttctactctctaatggccaaacacacacctttttcctcattcgtcttagctctctttccctcaaattcgtcaaaccccacctagaaaaagaaacaaattattattaaacttcataagataacctcatccttcaagactcttggtaaaacccacaacacctaccaaaaagagaacattgggtttgaaacttgcacagagaaagcttcaataagtggtaagatacttacataataagttctttgcttctatattgagaaattggaattaaatgttgaattgggttttggatatgtgagagggttcgttgagaacttcaatgaccgaattcaattttaaatagtagagtttactcaatgctatgtggttgatacggaaaaggcaaaagttgaggcttaggatttattcattttgttattgttgttctttaagaaattaaaaagttgttttagaggatttgtgtttttagtttgatgtaattctagtttgttatgtactttatgtataaattttgtttattttattagaaattacatgtttagtgaacttttcattttgaaaatgtttataggtcatgaaaattataaaattgaaattttttttctttgaaacatttggtatgggacaataagggtagtaacaagtatgtagttactcgcaactagtctttgtggaatagaacctgatattgctcataataacacatttcatccatttatgatccttatttcgctaaaaaaaaattattgcatattttcatatcacttgaattatagaatgaaaactaaatggcaaaatgagtttgcgatgattgactgtgtcatttataaattatgtaactaacgtgtattcataatgattttatacgaattgtaattaggtttattgaaattgtgattaggaattcttgaatatgaaacattggaattcatagtctcttcatgattcactatttgatatcatttgggtgcatgatatgaggttccacaaactttaagttccagaaatggaaagcttgaatatggtttttgggttaaggatttatggataaccaaatgaataggcactatagaattatgacacaatttcatctttagtatttatggaggctccttgaagaatagagccctattacaaaagttattatggaggctcctaaaggacatcaatactttatggcacattatcatctttactatttatggcctacactctaatactattgttaggtagtcatattggtgcccttagaaggtccttacataggtattttgtgatttcatccttttcacttggttctcaattagtgatagcagaaaaattgaattaagggcatctactttgcactattatttaccttttgatgttcaatttcaaaatttgtatacaattgtgagcgaaccagatttttgtgcatcttcgtatacataaatacaatttgacctcttccttgctttatttatgcaggtgatattgttccaattacatttcaagctgtga

SEQ ID NO: 10321 - DNA, 15016 bp, Vitis vinifera
  Intron number 33 from transcript GSVIVT01021873001 (locus GSVIVG01021873001) derived from phytozome v7.0 (chr-ID chr 14; pos 6148017 to 6163032 reverse strand)
agagaccagaggtatgatgacttgtttataatgactggacttactctgcttttttgttgctagaatttcaatgaaatggtcccatgctatctaatactgaataattgcatgattgacattgtaaaagagtgcaagaacatcgactctctatatttcttgaagtttttgcatattttaggaatatttgtcaagtttttagttgatttgggagcttttgaaagttttcctagtaataagttgttatgagaataaagatctattggaaatttggtaccttgaatattttaatttagtaacttgaaattttgtgaggctttgcaaggtgtataaataaatatatattgctaagaatccagaatcaaatcaggtcatacaacctggacgcgtttattattaaagataataagtcaaacttggttgaatagcctaaaattccgggattaattaggctgatttgttcgtatatttggaatgttctatagctgtaaattatttgtaggaattttacagattttttcccattttttctttgtagttttttgccttgatcctaggcttacttgtgtatatatttagtagcagccatgtacacaattcattgagtgagattaatagaattctttttcatctttccctcatggtatcagagccccttttttaggttctgaaaatttttaagtggcccacattgctgctagaggacaatgtccaaagctatgtctaaggggaaggaagtcactatgggataagtttctggttccacagaagtcctactattcggattaccactcataggctcaatgggtaaaattttatgtgtcaagcacaatcagtaaggttcttcatcaaaggtcgaggcaagatgggatatttgaatggctcaaagaaggctccaagtgcaattgatcccaattatgctgtatgggatgttaagaatttcatggtgatgtcatggatagtcaattccatggagatttgtatgggatatttgaatggctcaaagaaggctccaagtgcaattgatcccaattatgctgtatgggatgttaaaaatttcatggtgatgtcatggatagtcaattccatggagaccgaaatcagtcaaggggtatgttcttctcaactgcaaaagaaatatgggatgttaaaattgcatttttcaaatatggacaacaactcaatgttgtatgatatgaaacataaggctcgtgaaacaaagcaagaagaccagacaatgatgacttatttttttttgataggaaatgacaaaggaatatattgataaaaagaaggtacaattagaaggatgaggaatcctcccatcaaagaaaaacaagactacaagtaaacaaaaataagaaagtacaaaaagagaaaagtagacactctagttacacaccgctaaccaatcaagttgtaatatgttaagaggaatccccttaaaaaccttagaacaaaaggcccaaaaagaggtaagaaaacaaatagaatcccaaagatactcataattccttgctttgtcctcaaaaatccttgcatttctttcccgccacaccacccacattaacgcgatgcacgcgttttgccataaaacaattcctctcttggaagatccaaaaccattaaaattactagataacatgtcagagatgctccttggggaaacccaatccatcttcgctgattgaaatagtcggtgccacaaccctatcgtcaaagagcaatgaaggaaaaggtgatctactgtttctccatgcttcatgcacaacttacatatgtcagggctaagtgctttgtagggtcttctcaattgtagcaagtcattagtattaaccttcttgtgagccaccaaccagacaaaggacttgactttgaaagggacctgagcattccagacaaacttggtagggaaaactggaggcgactcagaatattgggataaggccagaaagaaagatttgactgtgaaaagacctgaaggagataaggaccaagatctcttatctggaaccaaaggtgatatgtgtagacgatcaaaagatcgcataaggccctctaaatcttctatctcagaattagaaagatttcgacgaaaattgaaattccaagagaaggggcgggtataaccaagaattgatgaaataggagcatttttatccgtgactacgctaagtaatcatggatattggacacccaaaggttgttccccccaccacaagtcatcccagaaccgaattctatccccattacctaccacaaaccgagtaaacttggaaaactcttggtagactagtgcaatggccttccaaggacaacgatgagaccatctaactatgttgttgacatcccagccattggagtgtgatccataaatgcttaaaatcacctgatgccatagagctgaaccctccctaggatatctccacaaccacttccctaaaagagcgacattccttatagatatctttccaaaacccaatccccctctcgatttcgacttacacactacgtcccaattaaccaaatggtctcttttgccttcccctacgcctgaccataaaaaatctctttgcattctctcaatttttgctgccacagaggcgggaatcttaaacaaggaaagaaagtaacatggcatatgggtgagacaagattgaatgagggtaattctgcctccaaaagataaatatgccttctgccacccatctaatctccttgatatcctctcaatcacaggatcccaaaagccactcgccttaggattcccttccagaggaagacccaggtaaagtataggccacccagaagccttgcagtcaagcatctcggccaacctagaaaggtgattctgctcaagattaataccatagatattgcttttgtcaagattaactttcaaacccgaaatatgcccaaacactagcaggacattcttaagggtcatcatatcctcctcccgagagctggaaaagaaaatggtatcatctgcaaattgtaagtgggaaacccttgttctattcctacccaccctgaaaccctccaagacgtttctctcctcagctttcaataacatcctactcaatacatctgccactatagtgaacaagaacagtgatgaagggtttccttgtcttaaacctctagatgccttaacccaccctttcgcattaccgttcaccaggattgcaaaagaaaccgaggacaagcaacctctcatccatttcctccatctaagaccaaaccctttcatctccaacacatgatccaaaaaatcccaactcacatgatcataggccttttcaaagtcaattttgaatacaactccttcctcccttgatcttcttttctcatccactatctcattggctatgagaactgcatccaaaatttgtctcccttgtacgaaggctccttgagtagaatggatggtctcatgaagtacccctcttatgcgccctgctaacactttggctattatcttgtaaagactagtgatcaagctaataggtctaaagtctgagattctccttgacatgctttttttgggtaacagaactataaaggaagcattggtgctttgattaataattccgctcctatgaaattctgcaaacactttcactagatcctcctttatcacttcccaacaatcttgaaacactgcaatggtaaagccatccggccccggagccttatccatgtccatctgaaaaatagccttaaaaatctcttcttcagtaaagggggattccaacctaaacgcactctcaccagatataggggaccaatctaagccttccactctccaagattctccagacagactcgtgtagagcttttcgaaataccttaaaatctcctcttttatgctctctgaattattcatcattaggccattttcattctccaactccttaataaatttcctatttcgcctaccattggccaccttatgaaaaaattttgagttacaatccccttcttttacccatttcaccctatctttttgtctccaatgtatttcttccctcaaaatcaactcctctaactcccctttttttaaagctctttgggctaaaagttcatgggataggcccccttcttgctccaatgaatcaaagttaactaaatcagataagatatcttttttccttttacttagctttccaaaagaagccttattccactctttcaatttggctttaacgaactgtaatttcctcatgaacttgtgcccttcccacccatttccttgaaactccctccaccatcttccaaaactctccttaaaactaggatgttgcaaccacatattttcaaacctgaatggcgttggaccccacttgaacggattagtttccaagacaattggccaatgatccgatgtccatcttggcagtactccttgaatactttgaggaaatgcttgttcctactcatttgagtacaggaaacgatctaatctcttgcaaattggattctcttgcatgtttgaccaagtaaatgatgcactccttaaaggtaaatctatcaattcgcaatctcttatgaaatcatcaaaatccttcatgcttagggttaatctagaaccgcccaatttttctgaacttctccttatgacattaaagtcaccgcccacacaccaacgcggagaagccagcccaacaatgtctgaaagctccacccaaaaatccttcctgagaactgagttgtttgggccataaactgcagatagccacagagattcgcaaccatccaatgcaaacttgattgagaccgaaaaagaacctaacactacctcctccctgctcaattttttagcgtcccatatgatcaaaatcccacccaaagccccacatgccggaagggctgcccaatccttatttctagttgtccaaacactacccacgaatcttctatcacactcctccttttttgtttcctgaatcatcactacatccggcttttctgatctcagaaaatccttaaccacccttctctttttctttgaacccaaacctctggtattccaactgattatcttcatgtgaaactttgtgaccctaatcaccgaaccaaaaccagttagtctcacaatcctgtggagcatctgctcttcctcctggaatataccttgatatccaaagtctttaaaacctcacgtacttttgccattttcctaggggacagtccttctatttggaactcgcccgaaggagagcccgcaatacctcccaagtgaactgtagccttactaaactccttgaaaggtgatcttaaattagctgagagagaattgacactctcaaacatctggtaaggacaagcaggctggatcacctccgtttccatttctaaattaggaatatcaacaggaatttgaccttcatcgttgacttttttggaaaaaaattcagagtttactcggttttccatgggtgccagagattgagaagatgagtcgggagacatgggggtagagggactcagaatgtggacgggaggattcaagagggaattagtgaagccactagaagggggtatatatggatggatggaattaaaaagtgaaggcgttacctccagaatttccgcaaccctcgaaacacagttccccatcaagctaggccctttacctctggtttctggcaaagaaggcttaaccatggctgctgagccacgagaatcagaccccactcggcccaaaaaaccttccatatcttcgttggatgaaaaaatgctcagatctgcttcctttctcggcgacgagtccctttcccctaaattcttcttgcgaagccttggaaaacacggagaaaagagagggcttgcatttaatcctctgtttgcctgagattcggcgcctaaatcttctgtctttgggtcctcttcgttgtccaccttgatttttccgcgcgaaatgggctcgctactgctctggatgccttgtcggtgctctgagcttggggaaaagaaggttgaccacagcttccttgaaccgtacaacaccttcttctccgctaacctgctcgactgaagctcgaggagtccaggagctgatttccccttttcgattgcagaagatgagtctccttcttccttgcgtgacgacgccacagtcacaactggggtaacctcttctaggcttaggcccaagcccagcaggcctttaatcttgcagcccattacagctgcacttggatcaatctttgccagcgcctgggccttcctctcgcaggcccgacagcccacatcagcaatagcctcatcttctccggcccaatctcctcctgcttctccaatcccgtccatcccatctgttgatttcaaacgagactgtgacgggagctggcagcccttacccctttctccctccttcttatgtctgttatcctcctcgacacgataccttccctccgtcgttgatctgccgcactctcctcgtctttctccacttgtccccgtgtgagaagcgacagccacccgagtcaactcacccttttcgctacctctccgtctttcttcatctccgaccactacgacgacgactgtgaacacccaatccccatcagtcacctctaacatagctggaaggattgccctatccttcattacgatctttaatctcgccttgctgagatcgaataacttcagcttacgctaatcgatttcatttacagacccccattgctccacaatcttcttcaggtgaaccttcgaccataggtgaaatggcaacccccttaattcgatccatccttctctaaatttcccgtctatttcctcattttccttcggcgaccatcttcgcaactgaataatgttcctttccccaacccttaacttcctcaaatcatggagaaatatggcttccttggttgtttcaacgaaaaatacaccctttccagctgaaaagggtacgatcgttacaacgccattcttccctaagcttctcgccaccagtcttccaacctcagcccaattctccctgtcaaacttgctttcacataccacagctcgcgcccacctccccactggaactagaccacctcctcttggtccttcgtcactaactgtcttcgcgtaggatctgtgcatcgagcccactttgttgtgaggccagctttcccctcttaaattccttcctttttctactgcattcggataggggaccaccagcattgtatctaacgcttttttgatactctcccaacctctgcccttgtcgccctcaggaatgattagaacggaaggttttctgttggtagcaaactccgagatccttatgaaccttccatggttgttgaagccaacttccaacagatgagccctgcattttcccctgaattttttgttgaaccccatatgactctttaatgctaaggctttcgtcaagtattcaaccatccacccaactgcttccttttcaaaacctaatgcaaaaacagagcctctacttatctctgtcatcgaacaccattcacctccttgatctccttccaacctaatcaagaaggtctttctctcaatcaagaccttcaccgtcttcctctcaaccatttttccccggtaagtaggcgacaaacgacaatgatgacttatcaatgctatgaattgcgtctggtaggatgagggagaggaaacaaaccaacaagctcaaacagtagaagattttaggtggctaaacagtagaagattagacagcctactacatttggatctccagttttgcagtaagaaacaattggagtttctccaaaaattcataaccccttctccatctacaggaaatgtagctcaagtgggtaattttctctctaccctacacacaaaaatatccggtcctcagatcatagatttaggtgcttctgatcatattacaggtttgtcaaatcttttctctacttatactccatatacaggacatcaaagatcaaaatagacttctacttaaggttactaaggccttaaggtttcagtcaggggttcctaaacaatattggggtgaagccattttgctagcttcatattgtattaacaaaatgccctcttgcatttgagacacccatgaacatgcttaagaaattcttccttatggttagccacgttttttttcccttacactgaagatttttggttgtgttgcttttgttcacaaccataatcataccaaaagtaaattggatcccaaagcccttaaatgtatctttgaaggtgctcaccaagtcaaaagggttacaagtgctttcatccagagccccagaaattctgtataacaacagatatcgaattctttgaaaaacaaccttactagcccaaaccttctcttcaaaggtggagttttagacaggaagatcggttttgggaagtcctactggtttctattttccaaatcttccccctcttatttgatcttccttgtttggtatttcagaatctgaaaatgaaccaagaaaacaagctgaaataaaagtgtattcgagaaggaataaaggagctagcaattctcctcactgccaaaccccttaacagaacatggaaaacttggacaacacaaatgagtccctaaatttcctaagttataaatctgttcatgagttttcatctgatttgaatattcctattgttcaaagaaaaagtgttcagacttgcatttaacaccctatctctaattttgtttcctatagtcggcttaatccatcctttgaagtctttaccgctaagttcctatagtcggcttaatccatcctttgaagtctttatcgctaagctctttagtgtgagtatcccaaattctatttaggaagccttgaaggatcaaaaatggagagaagcaactcaaaaagaaatgagagccccacataaaaatgggacatgagacttggtggaacctcctcctagaaagaaggttataagatgcaagtggatattcatagtgaaattcaaagcaaatggaacaattaattgatacaaggctagactagttgcaaaaggattcacacaaacttacaagatcaattatcaagaaacctttgcactagttgcaaagatgaacatagttcaagttctcttgtcacttgttgccattcaagaatggtctcctctacactaactagatgaaaagaatgtttttcttcatgaagatttagagaaagaagtatacatgaaattacctgtaatgacctagtcctaactgtgtcgatgttgtctgctcttgacccaaggaccttcacagctttaaatcgcattatatggttaagagtagctcatacatatatagcgtcaagatatcacaatcactcctcgcctcatgtagacacaatgtcctcattgtgttccacaggattacaaggccaaacaaagtcccgcactagggtgtgggattggctttgataccatttataacaattcacttcctatcgtatagatattattcactctgggcccaaacattgtgttatcttaatgctatatatgtatgagctccttttaaccttgtaaacatgttttaaaactgtgagagccctttaggcccaaagcaaacaatattttcccaattgggaacgagtcattatattgccacttggctttaaggaagagtcgaggaaaagtttaggaaaaggaaggtttgtagattgaaaaaaatctctttatggattaaagcaatcaacatgcacttggtttgaaaaatttaccaagtcattccatgaaaaaagatatttccaaagtcaagttgatctcacaatgttttacaaacatggaggaggtaaggtgaccatgctaattgcatatgtaaatgatataattgtgactagaaataatctaactgaaatcagaaatttgaaggattcccttgctaaagaattcaaaattaaaaatttgggagatttgagatacttcccaagcattgaggcggctagatcaaagaaagggatcttcttgtcacaaagaaagtatactctagacctattaaaagaaactggaatgctttgatgcaaaccagtggacaccgtaattgatgttaatcacaatgtgggaacattgacaaaaaaccctaccattttttaaacagagtgggcaagttaatttatttgtcttgtattagaccagatattgcctttttattggaattgttagtcaatttatgcatgcaccgaatgaagaacatatgaatccaatggtaagaattttgagacatctcaagagagcacctggggaaggacttctattttgaaacaccagcaactgagaggtgagggcatacatgaatactgactaagcgggtgtatcaatgacagatggtctacttttgggtactgcacattttttacaggcaatttggtgacatggagaagcaaaaaacaattagttgagcaagatctaatgtagtagctgagtttagatcaatggcctgaggaatttttgtactcctacggttaaaatctctctaaggaactaagataaagaatgatagacctatgaagttgtgcagcgacaacatggctaccataagtataggttacaatctgatgctacatgatagaacaaatcgcatcgaagtagatcgacatttcattaaaggaaagatagataacaagcttatttgtacatcattcatgtcaactggaaaacagtaagtggatgtgctgactaagggtctactgaagccacaattctagggaattcctggcaagctaggaatggtcaatgtctacaaaccagcttgagggggagtcctaagaatctggaatcaaagcaggccatacagcctaaaggagtttactattaaatatacgaagtcaaacttggttgaatagcctaaaattctaggattaattaaggctgatttgttcctatatttagattattctatggctgtaaattatttataagaatttgacagatattttcccattttttcttcctagttttttttaccttgatcctagccttactcatggatatatttagtagcggtcatgtacacaattcattgagtcagattaatagaaatcctttgtcatcttttcccttatatatatatatatatatattagggaaatgagtatgtgttgaggaatcttcagatatttgtttttgaattaaaaaagtaaaagggtagcctcttcttcttctttctgactttaccaaagaatgaagtagatgctggattatgtcaccatcttaactgtttttccctgttgaaattgcacctggaattcacacatccccatcccaatcccttgccacttgagtgaggcctcaagtatttatcagtatctggtcaatgaaaggaggctcagatatataataagtgatgttgtttcgatgcggatctattgttgttggtagtgctactgaaatgccttaatcatgaccaatttcatctcataacattcacatacttgatgctcttggtagtggtatttaaaagtcacccattacaaagtctcattccagaacattcaagatttggaagaaaggccctttggaaccaagtgattagagggaaatatggggaggaaagaggtgggtggagctcttgtgaggctagggaggcttatggagttgggttgtggaaagcaattagaaagttgggcacctagtgacccctagatttgactttgtggtgggagatggaaggaaggtgagcttttggaaggataaggggtgtggaactactcctttgtgtgagtcattcccctctttatttgccctagcaacttctaaagaggcttgggtgaatgaagtttggacagcttttagggaaagagggggaagttggaacccttgcttctctaggcctttcaatgattggaagatggaagaggtggaaaggttgttttgttgtttgggagggaagaaggtaaatgtggatgaggaggatagggtgaggtggatggactcgaagaatgccttgttctcagttaagtccttgtatagagccttgcagctggactctctagtttcttttccttcgaagattatatggaactctagtgtgcgacctaaattaagtttctttgcatgggaggcttcgtggggaaagttcctaaccttggaccgaattcagaagagggttgggctttagctaatagatgctttttttgccaaacgtttaaggaatctatcgatcacctccttctccattgtgaaaagacaagggaagtgtggatgttgttcttttcattgtttggagtgtcttgggtgtttccctctttggtaaagtaaactctcttagggtggagggggtcctttgtgggtaaaaaacgtaaggctatgtggcaagtgtgtccgttacgtttgttttggtccgtttggaaggcaaggaatagaattgcctttgaagatagtgtgttgtccatccaaaggctgaaaacttcttttgtgtatttattgtggtcggagaccaaattgttgataaaaggtagtccttcgaccttaatagattttatagattggatgggttctcggtgagggagaaggttttttgttttcttgttgttttgggttcagttgtaagggggtgagtgtctctatactgtacatctttgggtcgctattttagcgcctcttcgtaatacaattcttttgcttatttatcaaaaaaaaacattcaagattttggaagtttgtggagttgactggttgcttgattactagttggtcaatctaagtctcatgtagaactttatcaagagaagtgatttacaaaactttgggcttttaattttattttgctcttagctggggtatctttgttttaatgcgcagtgctgtatcagtggtgaaggacatcctttttttaattcagtttttaaatttctcttcctaatactatgaaagcagaaacatccaactcagggttgctgcaatgtccagaaggttaccccctcaacttctgtggttgtttttcttacctctcttccaactaataaaggttcaggattggctgcttcatttggtcttgccatgtgctcctcaactccatctcttcttttgtggcaaagatggatgcaatatatttcaatcagtaatgaatcataattaacttgtgggatttggcttaacttagaaacctgaactatagattaatatggtgtgcgagatcctaaaagtaaacttctatttgatgtcaatgatcttgaagaagtcactggcacaagtttttgtcaatttgaatctgaaaccatggaccctgtaatttccagtatgaggagcctgctcatgggttctttgaatgtcttaatggaatttagaatgttgcacccaatggtggtttagacttagatattggaaacatatgaggtgagctaagtcatatattgattaatatgtcagataacattaattgatatccatcttattccatgttcatattacccaaaaaaaaaaaaaaatagaaatgatcatgtggagctaacaaggaagttagggctcctgagacaatgagagaatctggcacttttgctttgataattgaggataaactacaggtgaattaataaaatcccaagagaatagacaagatacttggcaattacaatgtgattggtgcattaagctgtccatattatatccaaaacctattcaaactgatagagtggcaactagagaatggaagaactgaagcaacaagacttcataaagaagttaacgaagttatcaagctgaagtgttcatgggacatgaagcaacattagagccctaacaaaataatgatgacgaatggtgtttgtgaatgatttgaatcaatccttacttcatcacacaaaaacaaattagaaactccatttatttgttatctttgttatgattaattctttcttgacttgagttcttccatgttgggacagctggttgttgtatacttcatacacacatacaggtatgcacacatgtgcatctgcacacatacacacacaaataaataagaatcatgttaactgtgttaggattaagtttttattgagctgaggtgagttcttccatattgggtcagacggatggttgttgcatacttgactcaaaacaataaggatctctatttatttgttagctgtgtaaggattaagtttttcttcagttaagttgggttttcctattggattaggcagctggatgttgcatacttgaggattggaaaacagttagaccaggttttatctcatattttttcttgagttgagtgaagttaagttttccttttgggttagacagatggttgttgcatgcttgaagattggaaaacggttggaccaggatttatcccattttcttctcaatttttggaagaaaaatcttctggagtcaaattcctccctcattaacttttggaatgatacatttcttaatttagtaactgaaatttaaattgaaaggtttgaagtatatataggtacaagcttaacatggataaatctacttgtgtattttcttgtatgtagatgtttaatacaaagacataatattcatagcctccctattctatttaattctgcgctcatcatgttttccagaactttaggtgcaactcaagcctttgttataatttcaggttcttgtaggaatgttgttcttcttacttatgctatgtgaggggagttggtatttagcaagctagtcttttgttgctttgagcacatgcctttaacaatgtatagctttttagattttgggacagattgttgtccaataagggtagtaaatggaaagtgtctataatttccataaataatgaatgaacattgtggagaagatactttggatggttgaaagaaatttgccttagatggtatcatcccatatttctctagtttggatttgtgatcattttattgcaaagaagatgttttttccgttgtaatgtcttcaaactgtcaattaccattcttaattccttcttttcacttttgatcataaggaggagattatatagtatttctcttctgttatatggctcaacctatgttatatttcaggtcaggaactcagctatcagaactctttttcaaac

SEQ ID NO: 10322 - DNA, 3471 bp, Vitis vinifera
  Intron number 2 from transcript GSVIVT01009592001 (locus G SVIVG01009592001) derived from phytozome v7.0 (chr-ID chr1 8; pos 9720892 to 9724362 reverse strand)
tctctgttagcccaagggttctcctaatcatgttttgatgataacaaaccttagttaagttactaattggtttaaattataaaaaatttcaggtgttaatttggaaattcatcaaatgacctaatagatgcaaaatcaagacttttgaaaagacctttaatcataggaaacatatgtaagatgaatgcattgatgcatttaggatttacatattatttcatgcatctttgaaaaactcgatttatgctttaaagttacattttcatcaaaatccgagatctatgaaatgaaccttaggcaaaacgtttcaaaattagcatataattttatctgaagaccttgcctaagtgtttgaagcaaaaataccagaaaaagataggttttcgggtaaaaaattgtgaaccggtcaaggctatgtccaaacaggctcaactgactagggtaccgatcgaccggttcctccttccctattgatgtccgaccgagaggtgcaaaaaacactctctctttttaagtagcctttccttcccaatcgagggatttgtctttccggttgagggtaactgtcacctgtcaagcattaatatgctgcatttttaaaaaattaattttaaatctaccataattttataaaaaatcccaggaagttgtgacccacctaagaggaggtgaccgattattggccatgcaccagcagcttcggatgctattcttatcttaccaactctggatctccatgagatagtaggagacaaaaagtatgtcaagcagtctcaccgaggtaacatttagatattgaaacagactgctggcaagtggcaccaccattgatttgtgctttttcgaacaagtcgtaaaggggtggcccgtagacttgactttcagatccttccaaatttgtttgcatgtgctaaatatcgtattgattagttttatagaggaagttgtacttcttctgataatgattggcaacatgatcctccataatctttgaaatgatataacatgtggtgaccaattacaaaatacaactcaaatggggggtcactttgccaaaaggatcttctatgattttttgaaatgacacaaattatatatcatatttagaccggatcatgcttgcatatattaaatttttatgattttatagttaaagaaaagtttagtttcattcacctcttcaaaaatgtcacataaatatgtctgacaactattattttgaaattttattaaatattttttattttaaattaaaagatatacgtgtaaaaaaaatgaaaaaaaatagatatttaagaaaatttcaagttaagtatggatgggtaaatttgactccaatcttagaaaaaatgaatgaaattatctgtatatttaattaaggatggagaacatatttacaagtcaaagttattaagactaaagtcaagtttattataaagtaacagtaaaattcttatataattgggaatcgaatttgatttttaaaaatagaaagactatatattatttgttttgatgaagatgagggggggaaatggcgataaattagacaaaacaaagaaataattatgatgttacatttcagaatgctaaccaaataatatataatgttatactttatttgcatggatagtactttagtttattgtacatcattcttagtccaacctacttttaatacaaatctcaaatcttatcatagattgattgaacctaactctatatgtctttaaaccaagactagctaggtcaactttgacctcttcatttcaatgttttagttgtaaagactacaagaagataagtgtagagaaatgaggatttcaagtggggtagatttgagaaatgaaaacttcgagtgggatagatttcatatttgtaagtccaaagctctctcgcatatcaacatgttcatttgatggagttgaaaagtcaaatgcatgtaagaaactagctaatgttaaatataatatttgaagaccaaaagctattcctagacatgctctttgacaagctccaaatggtataaattcaaaatgttttccctaaggatcaacattcttatggttgatgagaaacctctctggttagaattctatcgaatctaactagattcttggatattttggatcttcgaaaggttcattattaaacaggtgcctttaaagacatggtatccacccaaggtgcaatcctcaataaattggcatagtcctccaagtggtcttggtggatataaccgtaatgtctctgttggcccaagggttctcctaatcatgttttgatgataacaaatcatagttaagttactaattggtttaaattataaagaatttcaggtgttaatttggaaattcatcaaatgacctaatggatgcaagatcaagacttttggaaagacctttaatgagaggaaacatatgtaagatgaatgcattgatacacttaggatttacatattatttcatgcatctttgaaaaactcgatttatgctttaaagttacattttcaccaaaatctgagatctatcaaatgaaccttgggcaaaacgtttcaaaattggcatataattttatctgaagaccttgcctaagtgtttgaagcaaaaataccagaaaaagataggttttcgggtaaaaaattgtgaaccggtcaaggctatgtccaaacaggctcaactgactagggtaccggtcgaccggttcccccttccctattgtggtccgaccgagaggtgcaaaaaagactctctctttttcagtagcctttccttcccagtcgagggatttgtcttcccggtcgagggtaactgtcacctgccaagcattaaatgctccaacggctagtaaactgattgaccctcagctcgaccgattgagactgtttttttggtttttttggcttataatgttaaaaacctataaataaagagctccacttcatttatgagtaagagaacacatgcatttatttgcttacctatttgttcttgccttaaaagctctcatttcttttcttagttcattaaatctccatatacatatcctttagtgcacctttgtgattcatcctagctttgggttgtatttgagtcattgttgagctaagttgagagatccatacttgttaacttagtgctaaagtctttaagtgagttgaaacttgaagagattgtgtaagagcccattggagccggaatctaagtgtaaatgtaattagaagtttggttgaaacttcatgttagtggaaccctcactcggttaagagcttgaggagagtggatgtaggtaaggaagtgtcaaaccattataaaatctgagtttgatttctctaaccttatctttttatatttgattatcttatgcttaaatttgttgtgtttaaaaataatttttaaaaattcaattcacccccctcttgggtgtttttatcttttaagattagcctttattttctcaatttctttaaga

SEQ ID NO: 10323 - DNA, 4732 bp, Vitis vinifera
  Intron number 4 from transcript GSVIVT01025260001 (locus G SVIVG01025260001) derived from phytozome v7.0 (chr-ID chr6 ; pos 2624974 to 2629705)
ctaagaagctaaaggtaaaattactttttgcttccacgttttatgattgattcttttggggttgtagtttaacatagtaacagtttggattgggattaggatttgtgtacttcatatgtaacacatgcactttgttgtgctgtttgttaggtgctattaatatattttttgcctgcctaatacaaaaaagagagagagagagaatcagttcatgatttgttcttcttctaatttaacatagtaatggtttgcattgaatttagtaaagagatcactaatcccacgcattgtaattgggatgtaggctaactatgcaatgtgtgtatttgtgcttctttttccttttttttttttttttgtttcgtagatcttgtaagtttgcatagacttctactttcaaagttagctaagggaatgagactctccattgcttcaggtttgtgacctcccaagcatttgcatgtggctataatgaaatatcaagaattagatctctatccagcacatactttttctaatgaatagctgtgcccatttggacttggctaatgataactgagagggtggtctgtagatcctcactcgcttcttacttataccgcatcgactaggaagaatcaattttgtgtagtattaattggtggtctgtagatcctcactcgcttcttacttatactgcatcgactaggaagaatcaattttgtgtagtattaattctataagactaaaccatcacaattgtgcccaatggcaaaactattttggatcgactaatgattgtaaagatggtggtccatagttcctctagcttgttatctatcatgcatggattagtaagaacctatttctgaaggattcaattctataaggtgtatctgtcaaacaacttcttctaattttaattttaattatttatagaaatttattgttttcccatagttgatttacaattccaggttacagatgagtagtaagttagtaacttaagttatggaccttcagtggtaggagggcaaaagcccatagcagagtgaggaaactagggagcatgcttgagggcagctgtagcgataggatcatgagaagctctaaaccatgtttcaagtctagctttgatttcaaacgttatatgaagagctctcggacatattttccaagtgtctggtgtcaatttttttttttttcttgggggatggataaacaaaagaaaaatactaaaggcaccaactgaaggtgcaccaaaggacaggctgtatacaatgggagctaggaaagcaacaaaaaccaatgggccattcaagatgaacctaaccagtcttcaaaacctaccgtgtctggtgtcattttattaagggttggcaaatgcttgactccttttctctgacattgatttaaaaagaactggcttaggatctccttgtgattttatttgtagaggctttaaagctttccttctgtcaaacaaatttgtgagaattttaccaaatttcagaaatcctctcttgggttgtgaaaacttatttgtaaggaaaccaagagattcctagccacatgtcattataaaatgaaatattattatgcggctaaaatgtagcacctacaacctctgctgtcgacctgtttgtgcacttctttaacagaatctgagtgtagaagtgagtttggagcaggaagtaggaagcaggaagctcttgtcttcaaggaactcaaagtttaggggcatctaggaagcctcccaatgaacatttggtaccagacacatagaatcaaaggtttcatataattcccttgactggttgactcctatctttaaaatgaaggacataatgtctctcgagtggttgaaaaattgatttgttggattcctccaattaacaaaagattcaaattaaattttgatggttcaagaatagagaataaaaaatgcattaggatgggttattaaagattctagtggaattataaaaatggttgcaagtagacaaataggtaatgcatcaataatattgtggaatctatggctttaagagatgacgtgttagctactaagattctaatgggttttaaaacctagagattgaaggtgattcaaaaatagtaattgattcgtggcagaagagaaaagagaagggccttatttgcaaattggatatagaaaaagcttatgatagcatcaattggaatttcttaatgaaggtccttcaaaaaatgggctttgggactaagtgggtgggatggatgtggagctgcgtgtcttctgctaaattctcagttcttgttaatggagtgccagctgggttcttccctagcactagagggcttcgtcaaggggatcctctatccccttatctctttgttatgggaatggaagttctggacgtcctcatcaggagagcagtggaagggggatatctatcaggatgcatcattcggggtggtagtagaacttccttgaatatttcccacctattttttgttgatgacacaatcgtgttctgtgaggcaagcaaggagcaagtttctcatctaagctggattcttttttggtttgaagcggcttcaggtctacaaattaatctagccaaaagcgaaatcattccagttggagaagtggaggagattcttgagctagcagcttagctagggtgcagggtggggtccttgccctctcactacttcggactccccttaggagtccccaatagggctacttctatgtgggatggagtggaagagagggtcaggaggagacttgcgctttggaaaagacagtacatttccaaaggggggaggatcactcttataaaaagcaccttggctagcatgccaatataccaaatgtctatctttcgaatgcccaagtccgttgctaaaagagtggagaaaacccaaagagatttcctatgggggggaggaaacttggaggggaaagttcatctagttaaatgggatgtggtctgtacagaaaaacacaagggagggctaggcttaaggaaaatagccactttgaatagagccttgctcggcaagtggatttggaggtttgcttgtgaaaaggataacctttggaaacaagtgatcactacgaagtatgggcaagaggatcatggatggaggtcaaagaaggctagtggggcggctggagtaggggtctggaaggagattctgagagaatctgaatggtgctgggaaaatttggcttttttagttgggaagggttccaaaatcaaattttgcaaagatagttggtgcactgacacaccgttgtcccattgtttcaatcatctttttgtcctcgccgcacatagggacgctacgattgaggagatgtgggaccaagattcgagtcaaggagattggaaccttgtttttgtgaaggactttaatgattgggagttggatatggttggggatctgctccataccttgaggggtcataggccttccctggaggatgattcagttatgtggaggcaaggaagaaatggtcttttcagggtcaaggaagcttacaggctgctggacaagcctaatgccacagtttttccttcaaggagcatatgggtggatagggtgccaactaaagtttgcttttttgcttgggaggcgacgtgggggaaggtgctcactctggacagactccagataagaggggtgcaactcccaaattgttgctttttgtgtggttgtgaaaaagagaatgtaaatcatattcttttacactgtatagggactagagctctatgggatattatttttgggttagtagatgttaaatgggtcctcccagaaactgtaaaggaggctttaacctcctggaagggtccatttgtagggaagaaaaggaaaaagatttggaaatccattccgttgtgtattttttggactgtttggaaggagaggaataggttagcctttagggggggtgcgttgaatattcagaaattaaagaattcttttatttgtaacttatggaactaggccaaagtgtatttaggtgaggagtctctctcccttatagactttttggagtggatagcttccacttaaggggaggtagttcttttggtccttttcttctttttgaggctgtagccgtcttgtatactccctgtatgctttgtggcgtttagccttttctattgcatatcttgtttgcttatcaaaaaaaaaaaaaagtaatcgattgttataataaaaagtgtaacactcctagttttattatgatattaatggaggatatttgaaagttatcttaggatctaaatatgtacaattgtcatcatatttattggaaaacaaatataataacagatgatttagctaagaaaggtatttgtaatatataatcaatcatttggaggtcaaattttcctaaagatgttataaagtttggtttcgaagattattgtggttcatcttttaatcaaatttgtaaaaattttgctttgtgttatcttttcaaaaaaagaaaaaagaaaaaggtttcatataattctgaaaacacgggtggtaatgtaattattgaatgttctctgcttgttttcaaaatttcctgaagttggccaaaagtaggctactcataagaaatagtcccgacttgagcccagaatttgaaatatgctactcatgaaatgttcatctttaaagccatctggtgacaactgaaatatgcacataacctttattgctatgttctgatatctattttaacaaatgattttgatgtagg

SEQ ID NO: 10324 - DNA, 6490 bp, Vitis vinifera
  Intron number 2 from transcript GSVIVT01018336001 (locus G SVIVG01018336001) derived from phytozome v7.0 (chr-ID chr1 5; pos 10869714 to 10876203 reverse strand)
gggcttcttccaggtacatatctttcattctttacccccactctatagcatttatttatgtatttttctgtgaaacttggtatttaaatttctttggtgacattatcaaattttttaccaatcatgtgcacaatttgacattcttgatatttttggaacttttttttttctttttttatcatacatgttttagaagtgtttagttgggaaattgaaatgatttttagttggtgaagtgaaatttgaatttttataatggatcacttacttatgttgttgccattaattaattctacccattgcaattattaccatttataatgcattttctggaatgaacactgagttgaactttccacagttgatattatgtagattattgccttatcataattatttggaagggcaataatctgggacaagggataaatctcatctcctttgtttacccttatctttttgtaccttagtcttcatgcaagcaaactgggggtttcctgaaatgaaaaagacaaagcaccttcaattgatggggatcagggataccatgatgaacaggttggtgaaaaaactgagaatggcagatgctatcaggtaataaacaatggacaacaccaatgaacatggtggtggaaaatttgagatgggtggatacaatcaggtaataaacaatgggcaagaaggggctattaagttaattaatgtcttgtataggtggatgatccttactttggatgctaaaatgtgacctcaattgatttgggcattcattcgaagcagtcatcatgattaactgtgttttcggtcttttttttggttgaaggtaatatggacttcttgatcctagcttgagagtagcctcctttggctactatgtgtcgcacccctttggatccatattctttctccatattttcccatttttggaatgtagcaaaacattaaagggagccttaggatgtcactatcacctttattgtaacatttttttaaatcccatatggggatctctccctgtaaattccattagggttctcatggggttagttttgttaaacatgatgaaaagatcccataatattgggtgaggaaactttagtttcttttcccaagtcaagaggaattttcctggtactcaaggagtctcatttataagatcttggactccatcaagaactaggagcaatgtagccacctcctagtctctttccatctagaagggttggcaaatgatgatgcattctttggtgaatcataggtgaaagacgatagaagtagtcatcacctccttttgctttgtaaatcttcaatatgatttgttctctcttcattggattctaactatgcctttgtgttttagatatttagggcaactagcttgttcatctttctcaccatagctataagagggttgttaatgtcattcaaattggtgcacattggacttccttctttatatcatcttttttgctacactaggcttccttaagttcttatcattgggagaattacaattgggtaggtaaaagatgcttaaccaaccaaacaatatattctttattgagtctaatgccttagaagattgcaatgtggatcctaactaagaggaagcttgctataggaagtcttcttctaatgtctttaaggttgagtaaaagaacttgtacgaaggtagatacaaactgctaagaagttttctacacctttcaaagaagtaaggaaggattaagcctttgcaatatcaagtgcatgtgcctttgcctattattttccaatgaatgaaccaatttatcatagactcttttcaataggtaaccatacactctaatacactcaccatgataaacccattttgataaccaagataagtcattcctccaattaggaggtagtgcactataacttcaaatgaattacttaagtctatgaaccaattatgaacaaatgtacttgtaggaaacatatcgtgacttggatcttctatgcacccaaattatgtataatgtaagagattttaggcttgaatacataaagagtataatccatgatagggtagagaaattgaggaatttgaatcatattataaataatgaatctattattgttatatcatcatttttcactcaatgaccttggtctcttaccatactatcttggaattgaagctattttgacatcacttggtcttttcctcttttagacatgtacatagacgacttacttgagaaaaacaatatgcttagtgtaaatgaggttttaactctgctctcttctactgcattccttacattgcatgatggagcactgttgattgatcccccttaatatcatcaggtcattggatctatgcgattcctcttaatcacttgacttgatatttcttttgcaataaacaagctctttgagttcatacattgcccattcactaatcattggttagtagttaaaagggttcttcattatcttaaaggaagaacccttaatcttgacatccttctttgcaagcactcaccactcactctccatgcccttgcaaatgcaactaggcgagaaattttgatgatcacaattccacattagtctatgttgtacttcttggttcctatctgatcggtttgagttctaagaaacaaaaaattatagctcaattcttgaccaaagtagaatattgagtcgttgtctccaccgtagctaaagttaatttggtgtagaaccttctccatgaacttaatgctcattctctatccaatgatttattcctacaatgtaggggtcacatatttttgtgctaatccagtgttttattcttgcataaagtatatggccatagatttttgctttgttcataatcaagtgtccaagaagttgctatgggtctctcacatccaaacctccaattagctctcaaactccctcataaagccactattgtgcctctaatttctagatcatcattccaagattgacatccatgacggaagctcaatcttgtaagggcatgaaaggaaaaacacgttgacattctctatgcatatttttggtaggtattgatttgtaaccactatccatattcacttcttcaataatatttataatagaaggaattacagctcacgcacacatcatttaataagacgtgtcgagacacgctcatctttctcatcctcactaagtttacacaataaagcctaccatttcctaaaaaaaaatcagtctgaacaacatcaaaacaacctcaccaactcagcagctgaatagcaaccattttattagaatgaagagttatattagttagatggttagatggttagaactgtaattggttagctcagttgttaaaacattgcatatagatcacctctaagtaataagtttttcttcccaaatgtcaaagctctttcatggtattagagccacgaccatttttcttgaactttctctgaaaaaatcttagtaaaacaagttccagaatatttctagaaaaccaaacaagcttgaagctattttctccaaatggcaacttcgcctcaaacttctgcatacgtctaatggaaccatgcaacgaatgtaggtactgaatcatgcattaccagttaaactagatagaactaattacattctctggcatactcaaatgaagaatgtaatctctgagaatggattcgacgagcatattgaagagataaaagtctgccctttcaagacaacgacaacaggtgaactcaacccagatttcatcacttagagacgctttaatagaatgatcttaagctagatatactcttctgttacccctgagataatgggacaaataattgggcatcagacatcccatgcagcatagattgccctagagaaaatattttccgtttcttcctatgcaagaataatgcaacttcgtcttgcatttcaaaccatttaaaagggttctcttacaatgatggagtacatcctcaaattcaaaacgcttagccacaatcttgctgccattggagaacccattgcagaaaggatcaaatattgcagcttcttggtggtcttggagctgactataattctatagtagcatctctcactgcttgggatgatgacatctctcttcacttcgtcaatagtatcttgctcacacacgaataatgtcttaatttccagaataccataacagaaaacgaagctatatcagcccatattgtcactcacaattgggctactcatccaagaatctatcataatgggcaacccaactctctatttcatcatcaacattattcccatcatcctccaagaagaggatgcttaggtggacgtggagaagaacatcgtcccaataacataaatgatagacctcaatgccaattatgaggcaaattcggtcacacagtcatctcatgctatcacaagtttgatatcccatttcaacgatcaggttcccctacaacaaattctgcaaagccttcatcaaccctaaatggtgcaacaaccagcaatggtatctaagcaatgatggtctcaccttccttaacactcaatgactcctagttccttgacataagagcaactcaccgccttacccaagtactgaacaactctccaatcctcttacctatcaaggccatgacaaagtcaccattggagatggtaaacaactatccattttacacgttggatccaagtactttcctactccacatagatcttttaaattatagcaagttcttcatgttcctaatctagctaccaacctcataagtgtttccaaattttttcatgacaataatacattttttgagtttcatgctactttgttttttattaaggacaagactacaaagaagacacttcttcaaggaaccattgagtagggtctgtgcaggtttccaagtttccatcctcatttatcattagcttctcctctctctagctgacttccacacctggcaccgaagactagaccatccaactgttcctatagttaaacaaattctttcttcatgtaatatctcatgtactcattctcctactcctatatgtagtgcttgtcaactttctaattaaagttaaagactaccttttcacttgtctttgtccaaagctcaacattccctcgcattaatccatgctgatctatggggccctgcacctactctatccacaactggtgcaaagtattttttattaacatctgctacattccctctcaagatcaagtagttgatatctttaccaagcatctttcaagctcactattctttatgtttcataccaagctgtacattattcctcacccagtgagcttgcgggggaatgaaccacatcaaaacaacctcaccaactcagcagttgaataacaaccattctactggaatgagagttatattagttagatggttagatagttagaattgtaattggttagctcagttgttaaaacactatatatagatcgccttcaaataatagcatatagtagtttttttttcctaaatgtcaaagctctttcacagtcaagggcctaaaaccctttaggagagaaagcaactctaaagtacacaaaacacacataaatttgacataaactaagcaagaaaaagcaaagtatggcaaactatctccttatttatgatactagaagactttaggtggtaagggtatgcaagccaccattattatatccaccaagattggtaagttggacataaatcgtaactcttgactcaaccctaatccttgcttttctatgaaagaagacaaagtatggaaaaagtagttagataaagaaattacctaagtcgctattgacggtcatcattgattatcacatttgaatggtgagagcttttcaggacttccaatggtgaggcttttgaaggcaatattgttgatgatttcaaagaaggtgtcaaagataatggttaggactttagaatggataatgaggtgaatcgtaaaaaaaaaaaaagcctagtattgggttttaaggctaggagaggcaagtagtcctttatatactttctccaaacttgaaatatatttcaattggctatcttcacctatgttttatatgtcaagtttcattaaaaggaagaaaaagaaaaatgttcccatggaatttcctttacaaagaaaattttttgataggaaaatattaaggaattagaaattgattgtgaaaaaaaaaaaaaaaaaacttgagaaactttccacaagttttacctttatattaaaattaaaagcccaatttcttacaaaaattagagaaacaaggctgtttggacgtaataccttttttttttggtttatttaccactaaatgatctaaattctaagaatacattataatagacaaaatttggtcaaagcacattgcaattaatcaaagtaatttctggataaaaatgaaatttgaaacaagttgttaatttccttaaacatattcatacaattttttggcaccaaagtaagtatatcaattgatcacagttgataaatc

SEQ ID NO: 10325 - DNA, 3124 bp, Vitis vinifera
  Intron number 1 from transcript GSVIVT01004351001 (locus G SVIVG01004351001) derived from phytozome v7.0 (chr-ID chrU n; pos 38208392 to 38211515 reverse strand)
atcgcgacgccaattttcccgtcagattcaaggttccccatggctcgcaatctctcctcgtttttctttacttaattatttactttttttttttttatctttaggttttgattttggtcccctcaattgtgtgccttgagatgaccaatctggaggttttagcacataaaatatgccgaatgtaaaagagtctaaacaagatggaaaatgaattctcgagaattttagaatcgcatgaggagtttgaaaagataaggagttttatgttcaaattgttacgcgtagtttttttgaagaaaatacttagcagttccaacggttctgagagacacaatgacatcatatgtaaatatttgcaaaattaagggtaattttgcactcttgtattcttggagaagctcttcagacagttccttatagcatcactctaactttaatgttaattggagttgtagggggtatgcatgtgtctgaacaattatactaaacgaacttctcttatagatattcttagtttttctatttttttattattttattttttattttgataggcaaactagagaatacattaaaactgctaaaagagctagcgcaggagagagtacactgggcatatacatgtggcgccaagaggcaaagcaaaaaaagggaaagcacttgtcagtatttcttagttgaagatgaaaagggataaaatggttcataaaatattcaatttttggtggcatgaccaatttttggctttgatgtcaacattagaccagatattttagagaattttggaaattgtgaaaactatatttatatttttttgataaataaatagagcatctattaacgagtgcccaagaaagggggcacatcctttgtgtatggttgtatgcataatgcatcacaacaaagataccaaaagggatatacaaaaataacctacaaaaaaaccaaactatccacaattaaggctatctaagaaatccatcatttaggagctctccagttctaatgaagtgtgggaccaccccaatagggatttaaggaggaactccttcaacctttgatttcagatttcttcttcattgaaaatcctttggttatgttctttccacatataacataactaaaaatggggagcaatatggcaaacaattattctcttcttgtccaaccccttaaatttccacttgaggaggagatttcttgctgaagtcagaaacacccattttaggccaaagattgctaaaaaatcatccttatcactcttgtcctctcaccatgaatctgaatataaagtttgaaaagatatgagtagtttttatagttgtggagttttagtgagatatattatggattgattattctgagtaggagtttagagtagttatcttttagagaacaatcaaccatgggggggaatattaacattcagttcccatttttgtttttttgtttttttttggtttttttttgttttgataggtgataattgttttaacttgaggtcactcaaacctagaacctcctatataccccttgccacttgagctaggcttaaaggatgttcacttcttaacttttttgataagtatatagtatagatgtgggaatttatgcttatcacacaagtgatgcatctgaaaactatgttaatatactaacttctcatcttggccttggctaatttgttactcaaggttgtagcacatactgtatgtgtgctgctaaaatttaaatattaaagaaagatattgaagtaattttagaaaattttaaaaattgcatgagttaaaaaaaaaaatgggattattaataatgcttgtgattgggtaattattttgaattagctaattatcccatgaacctagaggagagagactcttagcattctctttctagataggatgcatgtgaaaattttagattgattgtattaatcatgcatggaaaagatatatatgtatctaaacttgggcgaacactgggaactgtggtcctggtaagtggcacatggtacttgattcaaatcctgccactgataataccttgaatttacccggtgttggttgttgtggggtagttagcaccccgaggtttgggtccccatggagagtcctaagggcttgaccatgatattatatctatttatgtatctaaactaagttctcattttagccctgcttaatcttttaccaaagttcatagcacatacagtatgtatgtatacttttttaaatttaaatattaaacaaggatattgaagaaattttagaaaatttttaaaattgtatgggaagttaaaaaagatgggattactagtgaaatgtgttatgggataattatttttaataggtagttgaggagagggaacttaggctttgatttctagctacataaatgtgaaatttttagattgattatattaatcatgcatggaaaatgcatgtatgtatttattgaataaactcctcttatcaaaattcctttgttgaagagggaataaagacaaaatggttaataaaatattcaattatttttctgaattgtttgccatttctggggtaatttaaggcgcagaacagaagcatcacgagtgccactgtctctagtaaatctggtatatctaatcagaattatttttttggtattacacccaaacaaaaatttgagactagtaggaaagtctataattgcttgaactaggaagttttgtatattcttttcacaacttgtcacatatttattggtgtttatattatgttatctactatttgtatcctattggaatatcttgttttaataggataaaaggtcatagtcttgctgtttctggagggtgtgtgttttcttctttctttgatgcctcttgtatatcccctatgtacatggggtgtgccccattttgttgggcagcttatagaagactttttttttttttaataggtgggcagcttatataagaatttctatctgcctatttaaaaaaggatgtctgtaactatctgattttaggggtgcaaaattcagtactgctgtaatttcttataaaaaggattgattgattctaattagtttgggaacaattgttgcagggcaattctatatcaactaccaagtacagtgtttt

SEQ ID NO: 10326 - DNA, 13036 bp, Vitis vinifera
  Intron number 15 from transcript GSVIVT01021801001 (locus GSVIVG01021801001) derived from phytozome v7.0 (chr-ID chr 14; pos 7176873 to 7189908 reverse strand)
ctagtgtgcctacagtagctcatattactacaatagttgctattcgtgaatctttgcttagattagttaagaccaaggccaccaaaagacatattgttgcacaagcttcagttatagaaaaaggaaaagggttgttagggtagccatttaaacttccagtgaaaaccaagaactacaggaaaggccaccaattgtaactgttttgccaccacaagctcctactctcttccaaagccaaagaagatatacacgggaatttcaacaaccgtggattaaagtaacacctagtctaagagatgatacatttttaatcacctgacttgaggaaaaatcaaatccagacttaaagacacctaaaaccagtttagatgagaatttatatttttcatctaaattgatgaatagtagatcttagcacctatccaccatagagatctctagacaatcctaattctaagagctttttcatatatattttctttcattatttaattgctttagattttttttttcccaattcgaactcatcaccaatttcatttaatgctgaattgttaatccattttcactcaattatattcatttcttttcatttcattcatgtcttaattaccaaaaatttaccatccttgtggatgatacctaaagccactatacaaccgtaacttttgttaaaagtcatttttgattgggcaaaagttattttaatgcctttgaattaggttataaatttggttttgatgcaacaaatgaaaattcattaattagaaactctttttttctctctacttgaaaaagctcaaatttgcttaagttgccgataccacaaattcttgatctactacttccaaaatatcttgatactcaaataataattgcatttagatcctccaaaatttaaaattattttttccatcaaactttagaaattagggttggatcatattattaccaattgcttttatttttaatcggcaaactctaataccaataatgagcaatcaaaaataatctttgcaatataagaacaatttctctgcataaaaaggatgaaaaacaataaagaagatgataaataattatacaaaatttactacctacaatgtaagaatcattccaaaattttgtgaagaacatggaaaatgagaggagaagaattgaaaaacataactcaaaacagagattttacatcctttcaaacgatttacatttaaattcaagctacttttttggtcttgatcataaatgatttgaaaataaatattgatcattaataaaattcaactattgagattgatcttctaagtattcaatgattggaattttagggatatgatgttattcaagatattgtagaatttatcaaatataatagtcataaaagtttatacttgagtacacataattgtgcacacatcaaatggcattaccatcaatatattttcataaatattaaatttcaaacaagtctagggttttgaaaattaagaatatatatatatatatatatatatataaaatgtgatttgtatatttgaccatgaaaatattcaaggttttcaagactcttgatgtgcactgcacaataaaattgatacatcttttgaacaatacaaaatttgaaaatttaaacttcattaatttagataagaaaatttaaatttttttcattaagttcacagttaaaagcacaaaaaataaaaaaaaaataaaaataattattcttacaaattaagtatctgtttgataactattttcgagaccaattttttattcttaaggaaaaaaaatacacgtttaacaaccagaaattgttttctattttctatttttaagaacaaaaaataggttgttttcggaaaacatcttttagttgttttcactattttttatataaaataattatacaagtatgtagaatgattaaaaataaaatactcgatataaaaattatttttaaaccatatttaaaatattaaaaataaattaaaaacatttcaagtttacaaatagaatttcattctacaaaacatttgagaacaattttaaaaaattgttctcaaaaattattttttaaaattatttttgaaaacattcaacaaacatgacctaaaatcaatataaaacataagaataaaatcaatcaaacacaaggtacatgttttaacttggttgagctaacaatatctagatctatggatgagaaagatttattccattaaatcatagaaaaattataaatgacaaaaaatagatataaccattggattatgaaatatctcacatttccctactctttttatttacactcaaacccacaagctctcttactccatcaagtgttttcttatcttccttagtctcaatccactacatatattcttcataagttgatatccatcttataattttttttccacttatgacttatattatttatattgatatttctaataacttatcttattttataaaatattttgtatgatattttttttataaaaaggaacatataccaacaatttgagacactttttaacataaataaatttaataaaaagaaatgtaaaacatattcattaaggaggtatttgtttttttatttaattttaaatagaactttaaattaaatggaggttaatagtgtcaagtatttaagttgtttttttttagattttaattttattaaacattaaaaaataaagaaaatcaatatgttacttttaacatttagaaaaaattcaatattttagttttttctattcagtaaaaaaattaagacataagtcaacaaaaagtaataaataaataaacaatttgaaatatgaaaataaatggttttgggcaaaaaaaaaaaaaaaaacacaaatgcaacttaactttaaatacacatttttaaaattttcttcacattttcaattattcttattcccttgtttattttctttcccttctccctttccataaacttataattcaagtaagctaatgttagttttttttttaatatggcccacgtgccttattattatcttttatttaacttaaaagataaatatagtgggcttattagttttcatttatttaatttaaaagacaattatgattaataatattaagtcttaaaatcctattattaaggagatgttttctaaataaccggtcaaccgttcacataagtagaacgtgaaaaaatagaaattaaccttatttttttagatttggttagagaaatcaagttttctctaatttgttctttctctgcaaaaagtttctcttaaaggatcaagtttatgaatcaggtattttttttttttttttgttatttgtttaatctttgaaaaattacaaagttttatactatgtttggttcccagaaaatattaaggaaaaaaatgctaagaaaaatcatttttttcatatttaatttcattatagaaaatacaaaagaaatcaaatataattaaattttgttggaaatttatgcattttaaaattatttaaagtttataaaatggaagagaataagttaagtgtgttggaatttaacacggacactaacatacaattatccagatcattatgattcaaactcgtctctgataataaaataataataaaaactttaattaataaataaatcacataccgtttgaagaagacgcagccatgagagatttccccttcagcttatagatcttaaatccttgattcttcttctccttatcaaaccttaatacacagagttatttttctgtaattgatggaaaaaagcacacacgaaggggtttctgtatatgtcttttattgataggaggagagggccaagaatacacgttcaaaaccgttctgaacgtgtcaatcgaaataactgttaattatttcaaataataatattaagattattgtaatttacccagtccatcaatggtaaatatctataacagtttaaagatagtggatttattttaattggctaaataataggttagtgggccacccacttaatttaatgtggaaataacattctcccacttggcccactaaaccgattatgaaaactataatatatatttagtttatatataaaatatatactggaaaataaatttgacacgtgatcacgatttcaataaacttagccaatacatccaaaatcatttgccataatactgaatcaatttagatcataaatgcgagtcatggcggtcacatgaccataatgtcatgtttccttccatgcaccacacatcaataacccttactgacccagtccttaatgccaaatagcccctgtaatttgtcttgtcaggacaattcttgtttatcaaacaataaaatgtgcacccataattgaaaacaagaataaacagaaacaattttaatgcgcaaattgtcaattacataaccaccatgcatcatcatacacattatggattactcaaaagactcatcctcataacatgttccaaatatgcctttggaggtaatcctttagttaatggatcagcaaccataagtgtggtcctaatattttcaattgacacttgttgtttctggactctttctttaacaactaaatactttaaatccatgtgtttcgatccactagaaaatttgccattcttagagaagaaaacagctgcagtgttatcacaatatattctcaaaggtttagcaatagagtcgacaacaccaagccctgagataaaattccgcaaccataaagcatgacttgaagcttcaaaacaagcaacaaactcggcctccatcgtggatgaagtagtaattgattgtttttcactcttccacgagattgccccatttgctagcataaagacaaatcctgaagttgactttaagctatcgagacaaccaccatagtcagaatccgagtaaccaacaacctctaattgttctgatcttttatatgtgagcatataatcctttgtcccttgtaagtacctcatcaccttctttgcagctttccagtgttcgaatcctggatcactttggtatcttcctaacatgcctacagcaaagctgatatccggtcttgtacatgtttgagcgtacatcaaactccccacagctgatgcataaggaattttcttcatttgctctctttcaatgttattccttgggcactgcattttacttaatttgtcacctttcaatataggtgcaatacccgatgaacatgactgcatattaaatctctctaaaacccgatcaatatatcctttctgagataaacctagcactcctcgagatcgatccctaaagatctcaatgccaataacatagtttgcctcacccatatcaaccatatgaaagtttttagagagatattccttggtttcacgtaataaaccaagatcactgctggcaagcaaaatatcatccacatacagtatcagaaatataaacttgctcccactaactttcagatatatacactgatcaacaatgttctctttaaatccgaaagatgtaatggtattattgaacttaatataccattgtctggaagcttgtttaagaccgtaaatggatttctttaatttgcaaactaggtgttcatttcctttctttgtgaacccttcaggttgttccatatagatatcttcatccaaattcccatttaagaatgcagttttcacatccatttgatgtaactctaaatcaaaatgagctacaagtgtcatgatgattctaagcgaatctttcttggaaactggagagaaggtatctttgtaatcgataccttccttttgagtgaaacctttggccacaagtctggccttaaatcgttcgatattgcctttagcgtcgcgctttgtcttaaagacccatttacagccgacgggtttacaattattaggcaatttgatgagatcccaaacaccattatgggtcatagatttcaactcttcattcatagcttccatccatttactagaatcatcactttccatggcttgtgaaaacgaaaccggatccttccttatcccaatatcataatcagattcctgtagatacaccacataatcatctgtaatggcaggtctcctttctctttgagatctcctcaaaggtgccggttgtggtggctctacagcattttcaatggcaatattttctagtggtaatgaaccatctctattattttgctcattatcctcaacttgttgaacaggttgaggaacaataatttcttgaggtaaaaaaggtggtgggatatccactcttatctcctcaatatctatctttcttggttcattactcccactgatttcgccattctctaagaatctggcattaccggtttcaactattctcacactatggttaggacaataaaatctgtaccctttcgatttatccggatagccaatgaaatatccagatatcgttcttgaatcaagctttttctcatgtgggttatagattcttgcctccgctggacaaccccatatatgtatatgtctcaagctaggtttcctaccagtccataactcgaaaggagtttttggaactgccttactaggaactctgttcaagatatacattgcggtttttaaggcttcaccccacaatgaaataggtacagaagagtaactcatcatactcctaaccatttccattaatgtgcgattacgcctttcagcaacaccattctgctatggcgtaccaggcattgtgtactgagcacgaatgccatgcttttcaaggaatttggcaaaaggaccaggattttgtcctgattcatcatatctgccataatattcaccgcctcgatctaatctcacaattttaatctttttatctaattgtctctcgacctctgttatgaacatctcaaagatgtcaatggcctgagacttttcatgcattagataaacataaccataacgagatagatcatctataaaggtgataaaatatttctctcctgtgaaacatggaacagagagtggtccacaaatatctgtatgaattatctcaaggagctcattacttcttgtggcacctttctttgtatgtttagtttgctttctctttatgcaatccacgcatacatgaaaatcagtgaagtcaagattttgtaaaattccttccttcactaatctttcaattctttccctagagatgtgccctagtcttctgtgccacaagattgaagaattttcattaattaagccacgttttgaaccaacatttgaatgcagggttatcaaagcttgtgcaaattcatgattcaaggaaattttatataaaccatcacataaaatacaagaaccaactgtaacagaattcaacatcaaacttaattgtccagaactgaataaaacagaatatccagtagcatctaatttagacaaggaaactaaattcctagagatagaaggtacataaaaagtgtttaaaagatccatccgatgacccgtctctaatagtaagcgataggtaccaacagctaccacttcaaccttgagacggtttcccatatagaggaacttttcactttcctttggtttcctggttgtaaggaatccctgcattaaattagtcacatgagttgtggctccagaatcaatccaccaagtatttgaaggaacttcagcaagattagattcataacatacaaaagaaagatttatacctctcttttcgaaccaagccttgcgcttgatatagtccttcttcacatgccctttcttgccacaaaagtagcaacttacagtgaattttccatcatgactctggctactttccccaggtccgcttttcttaggtggaaagttctttccctttttgaattttcctttcttcttcgtgactccatgagttacagcaaaagcaagattatgtccttcttgtcttaatcttacttcctcttgtatacatttactggtgagctcattcaagttccactgatcactgttagtattatagtggattttgaatggagcaaactgtgatggaagtgagttaaggacaaactgtaccaagaaggactcatccatacccatacctagtgccttaagctttgcagccttttcagtcatgtttaaaatatgttgctgaatgcctttctgaccatcatatttcatggtggtcaattcagccatcaatgtgcatgcaagggacttatcagcgcgtttgaagcgctcctcaacagatttcagaaattccgaggcaaactcggtttgagggagagaggtcttgatattattggcaatagtcattctcataaacatcagactgagtctgtttgattttgactaggcttttgattgttccacctgctccggagtactgtcatccgtagcttcaggaggtttatcagatattaaagccaagtcaagatccaatacacctagtgagaattgaaccctttcataccattcagaaaaatttgacccatcaaaaatagtcattccagatgcaagagagtgtaatgaagtgggaactgtacaaaatagaacaatgctcacaataagcttcaagtataaaataaaaacaatgaactattgatatcattaaaattctcctttgggtaaattttaacatatctagtgttcacttgaagggagcttaaaacactttactattttgtgtcatttatatgttacctttggatatccattttacttttctaagcaacacaaaataaaacattaattaataattagcagaaattgactctcctttgggttagtctcattctcctaattataaagaaaaatattaagaattttacaagtctccctttattctttcatacaattcaataaatacaaggctcactaatttaggttactttggcaactatccaaattagttaaccatatatttataaattgtctttagataaaatattcacaagatgaaattaattcttttatttgagttaaaaaaacaaggaaatagtatctataacagattcaataatcaatcataatatagtatctttaataatcaacagattcattaatcaatcataataaaattaaagaaatctgcattcattgattatactaaagctaatacttgcattcctcatatataataatgataattaagatctttgaattagtgcacataaaaaaaaataaaaaaaaatattccactgcagagaccttttaaagcctttgattacgtggtcaagacccggtactacgggtatgagatgtgccagaaaatagtaagctcccttacgaatattgaaagtgtcagatctaatctgcaatcagctagaaaacagcgcctattatggcgcctgagaaacggagcctataagtggtgcctgaagcgcacctcaaacagcactgcaaacggcaacagcgcctgcaaatagcgccctcaatggcatcggcaatggtgcctgcaaccagcgccttcaatggcaccagaaaacggccagcaatggcgcctgaaagtggtgcctgaaaatggccagcaaaggcgcctgaaatggtgcctgaaaatggccagcaaaggcgcctgaaatggtgccggaaaatggccagcaaaggcacctaaaaacggtgcgtgagaatggccagcaaaggcacctaaaatggtcaacaatggctgaagtcaaaccagcacccctcaccggcaccagtcagcgttgaagcaggtctttaattttattattattttattttattttagtaatttagtgagacgaattaatggaagataaatctcaaaaaatctaatcttttataaaacaatgatctgaatatttaaatttaaaaccttgctctgataccaattgttggaatttaacacggaaactaacatacaattatccagatcattatgattcaagctcgtctctgataataaaataataataaaaactttaattaataaataaatcacataccgtttgaagaagacgcagccatgagagatttccccttcagcttatagatcttaaatccttgattcttcttctccttatcaaaccttaatacacagagttatttttctgtaattgatggaaaaaagcacacacgaaggggtttctgtatatgtcttttattgataggaggagagggccaagaatacacgttcaaaaccgttctgaacgtgtcaatcgaaataactgttaattatctcaaataataatattaagattattgtaatttacccagtccatcaatggtaaatatctataacagtttaaagatagtggatttattttaattggctaaataataggttagtgggccacccacttaatttaatgtggaaataacaaagtgaatttgaagaataatataaaaataatttattaactttagttctactttttattttcttccaatttttctctctattttcttttctttacattttccctcgaatttttttggaaaccaaatatagccttaagatttagggattagggttacgactgttttatataaattaaacaagtcctaatagttaaatttaggaattagggttcaaataggctaactatatttttcaaagtaaaacaagtaccatgaccctcctttttgaatcattaaaatttttaattctgagtaaaaaagaaaaactaaaatagaatgtcaagtttagctcttaacttaatatcttattttgatatattatagtgtattaagcaattctaagattaattattagttaagatttatggtgtgtgtgacacaatatatttacataatgaatgtctataaacatcttatgcattttaaaccaagcttttattaagatttttttttaaaaaaaaaaaaagtatattaattcttacataaaatgcagagaatattatataaaagataacgatggtaaaaaaaatttgacatagtaaattttttttgataccttgtttttcaaatggtcttcaaaaaccattatttttagggtgtaaatttctacattttgtacaaaatttcctattaccttttgtctttaaaaataaaataagaagtatacctaaagaccaaaatatcaaaaaatgcaaaaatattaatgattatattttacaaaaatattgataaatatcataaatattggatgagaatccagaaaaagaaaagaaaaaaaaaaacttcataaaattataaaactaacaataatacatgtattgaaattttctttttaaaatatatatatatatatatatatatatatatatatatatatatataataaaatttgtaacattcgatgatcatatgcaataatatttaataataaaatgatgatttatctttaataataaaatgataatttatccgtttgaatgtatttgagaatatatatatatatatatatatatatatatatatatatatatatataattatttattatttattattttttaatttaaatatttataaatttatttccaagattatgtttttatatttaattattatataaaagatataaaatgattaatttatagttttttattttgaataatcaatttattagaatttgaatataaaataattaaaattaatttattttacaagttttaaaattttaataattcattttctgtattaatacaagacacaaaaaataaaattagtatatatatttatatatgatagcacattatcaaccacattgacttaatggcaataagccacccatttcttgtccaaggctagggttgaaagctcgtacctcttcttgagctctaaaatttctaaaatattttatttaacatctaatgcaagtgaaggaagaagaaaaaagattcaatcacgacaatgtctcaaaatgtcaaaaaaatattggaagaatcgaaaaaaatataagaaaaatatcaaaaagcgaaatccctcaacattttattccttgagtgtatcttaatacttcctaaatttttccaatttattaaagaaagttgttgcataaatattcttccaacttctacttgattttctattatactaaaaaggaatttggctttgtagttgacccgattagttggaatatttttctttttgttttatttgatgttaacatttgatttgtttattaacttccaagaaagtaaagatttattcggtaactatttttgaaaataattttaaaaaataatttttgacaatagtttttaaaaattgttatttgatttttgtaaaacaaaaatatatcaaaataactattagaaagcaaataaaaacaataaaaaatatcatgtattttatttttaaaataacataaatactaaataggttttctatatttttgttttaagaatagaaaattgttttaaacaagtcctaagaatctaaatttgaattaaaaaaagttgataaaagttataataaaattaagcattttccttcctaatttttatgaaaggaaacaatctagaaattacgatgaaacttcggagacaaagaaaaatattagagcataagaactcttttatgtatacatctaaaagttcttatatattttaaaatttggatagtcccaaattgaattattagtcatgatcaagtcaaaaaaaaagtggtcaatacaattccataagtatcgataaggttgacggcttacggaagaacgagccggggaatttattcataatttttaccaaaaataattttcaaggaaaatgctaattttgccaaaattttaatcattaattttgctgacatcaaacgggattctccactcttaaattttaatttttctttttaaatatctctgaaaaataccaaaaataattgatgaaggcatgctttttcccttttgatgacgaacacgatgttgggaaagtctgtcgtacgttttgacggctggtatactcgccccgggaagctacgatgaagcttctgacgtggtgggagcttctgtaaaaccagtgtctgcttctatggcttctcttttgttttcttctcttctgagtctttgcatgttctttataatgaagtttccagcgcaacaagttctccaaacttcacatatatgaatttcattcttgtttagtgtcctgaagcagtatactgaatcaggccaa

SEQ ID NO: 10327 - DNA, 6242 bp, Vitis vinifera
  Intron number 2 from transcript GSVIVT01018384001 (locus G SVIVG01018384001) derived from phytozome v7.0 (chr-ID chr1 5; pos 9986347 to 9992588)
ggtccaaagaaattatcggaaatcactgcagataggtacattactatttttttcttaatatgtataaatactctgttttgcaattgccatatctaatcataaataactactgtgaaatacatgcatttggctgctaaaacttatccctgaggtatatatatatgttgtatcctggatggcaagagttagctgaatcatttttacatgaggttatatatattcgaagactaatcatctttgattgaatggccttggttgatgagttttggactatgcataaggcatggaaaatattttaacctttcacataaactccacatagtcaaaattggcaaaaagatatgacaagaatattttaaatttctttagctttcccaactacttatcaaaatgaacaaaattttctctaccaaacatttttaattgactttgaattagaatttcctttttcttagtaagagttatgggatcaaaatacaacttgaaagaaaaaagaagacaagtttacagaaaattcaaaacatttgagaacacctctagtagtagtgcatggaaaagttttggtcgaacaggaatggggttatatttaatgtttcttgtatcatagatttgtgctatacaaacaaaatagtttgtatgtacaacctacaaattgccttaatcagagcattccaaataatcactataattccattaatttttcatggtagtttggaatttgttgtgcgtgcaagctatttctacaaaccaaaacttttatgttattttatgttggttatagtatgttgtgatttgtgttttttaaggctaatgttccaaaaatgtcaattgtttttggcatgtgtgtctgtgtctatgtgtaaaaatggaaatctattaaaaaatttggagaaatatgaatgtattaaatcaaaattcatgaaatatggaataaatattacaacagcaaaaaaggcttataattgtaaaggaaagttgtggataacttgttgtctagcttagatgcaaagatactcattgacctacttatatataatatgttcactagttaaacacaattgatatattaattatgaggtcaactataaacatgatttataatggtgaagtacagagtcaggttctagataattggaaagtcaaagcatagtgttggtccttggccattaggagactctatagtaatgaaaatttgcaagtaagataccaactaagttcctaacctctaattggtgcatcctatgtaaggagaatagtaataccattaatcatttttttatcattgccctgttgcttatctttgtggcaaaggttattttatataggaaatgagatgggttgcatcagcatatccaatggacgtgatggagatttttcataggatcagtgaggtgggaatgaggtaggatgctttgggacttctctattctttgcactttttggactctgtgtttggaatacaatactaaaatcttttaaggaaagaattatgatgtcggaattttttgggataggggtccctttctctttttcatatgggtttcagttatttgaaagtttgagcagttcctttgttcctcataatgttggattaggtgtagataagggataattcttgtccttgtgggagcaccttttgagggaaaagcaaacctcttctttgatggctcttatcttgtttactcagtcggcattgcagatgttttgaagatgcccaccattgtactttcctggcttatccttggctaaatggcaacaacttatgcttgcagatcaagaaattggcaagtttgggggttaaaaaagcttcctcaaaggggattacgaattcacatgtagaggagatgcctccttggcccttaaaagcttggctcaagaggcagggagttgttatggggatttgggaggttccaggctccattcccaatgtgaaaaaaaatagttacctctgaacaaaaaggaaaaaagaaaagaaaagaaaaaacaagcaaacaaacaaacaaaccaaagaactaaaatacaaaaacaaaaataaaagtaaaaaggaaggtgatttctccttgtcactaattggataaaaaggtggagcatagtctcctaggaatacagttaagagtaaggacattatacttccttggatttagagattaggtggctgtggaggatgcaaaaaggagaccgactactggctaaaaaaaataagtgctttagaagcttttttgggttcactatttctcttccttttgggatgtttgtattttgggagtgattggttcctccttatttatgctggatgtttcttctggttcccttccttctgaaggacatctcattccacttgaatttgatttctcattctaataaaattttaattagtcttttcttcttaaaataaatcctgtagaaaactttgctgcttcttgatcaatactgtagaaaaaatttctcttgattttattttaaatgagggaaaaattgttttctattctatcaataagtttttttttttaatgagtaaagcaagcatgtattatcaataaaaaagcaccaaaacagtgttctaaagtacataggaagtatataatgacccgcttaaaagcgcaaacaagaggagagggaccaacaaaaaactacacccccctaaaaaagaacccacccaatccacaagatctacaatcgaagaaggaccataacttaaaaacaacctaggccaatcccataggttacaaaggaaagtgtattttagtccttgaacggattgttcctcaatcttgaaagctcttttgttttttattttccttatagtccaaaataagcaaagaggagctgccctccacacctttttctgccttttacccacaaaagaaccacgtcatctgaagagcatgtctctaactaaagaaggaagaacctaaagcacactaaacagggagaacaaaagattccatgacactcttgttttgacacaatggataagattgtggttaatgatcttttcctcttcaagccaaaggaaacgtctattttctaaagaccaccctctcctctttaaatagtccaacgtgcccaagaagcctcctaaacgaaaaagcctaccttcggcggaacccacaatttaaaaatcacaatagcaggaaatggcattgtactttctatctccaaagtcaagtatagggctttaatagagaactttccattcttcgatcctatccaaatcactttatcttcctcttccccacacacactcctcccttgcaaactttaaaaaaactgctccaccaaatctacctcacaatcatttaaagccctagaaaaacgaggggcctaacatcccccttcaactattgggtgccaaacatacgccacccagtcctctctgatcaaaaaaaaaaatcctccttaaaattagcaatagcataaacaataaggaaagaagtacatagtgccacatcaccacaccaattgtccttccaaaatttcactctccgcccattacctacaaagaagtaaccctatttgctaagagttcccaatcctttctaatggctttccataaccctaccccataactttctctcaccaccttggagcaccaccctccctcttctatcccgttcttaccacttataacttgcttccataaagctcccctatcctctacaaaccgccaattccatttacctaaaaggactttgtttagctttgcaagattccttatcccccaatccacccttgcttttgtctgtacaaacaatagaccaccttactaagtgtggcttctgctcaagagctcctcctcttcaaagaaaatctctttgaatttattccaacctcatcctaactgtccttggaatattgaacaaagacctgaaatagatgagcatgctagatagagtactccggattagggtaatcctcccacccttggataagtattgccttttccacatggctaactttctgtgagaccttttctccaccccatcccataccgccacggacttgaaaggagcacctagggggagacccaagtaagacaacgaaagcttgaaaagtaataacaagcatatgtaatgtttaaatttacaaagagtttaatctaagctgttcccagtttaaactcagaaagtttcagagaagtgattaataacaagcatatgcaaacccttatcatttgtcagaacattaacccataaattccatatcaaatctttgacaaatcatttgttttcctttaaatttccagaattaggttttgaaattatgaatttcctgagcttaataggtcgactctttgcattttgagcaaattccttgccttcttcttcccctcagtagtttctccttacagctcccaagtagctgcattccttctcctggagaaactgcactgaaacaacccaaacaaaactcaaatacctgatttcatcgttttagatggtactgccagttcactcccctgaccgaactttaggtatttatctttgatcccacaattctctaatttttcatctgacccaaactgatgtgcaattttatttcacaacagatccaatttcaaactagccccgttctttacataactccattgcctaatgattaataatctcaaaggatgtcctaaggcccctttaaattcacttattcaactattaactttgtgaatattataaacatccttctaaaaaaacaaaacatatacagagaaaaagtaatgtacaaagcattgaccataagtctcaaaacactcaagaaagatagaactacctctctaaagacctggcaacccttttagacaaaacatcagccacctgattgatgatctatatctccatgtaaaagattactaaatgcttccattaagagcattaatcctcctcatcaagtgagagattctttgtagctctctgccacctaaaagggcccatgacgtagaaatagtggaatccccttcaacaggatgtttccttgcacccaggctagcatatatttgaaccttcccaaagacctaaaagctcaatatcaatggcaatacttatagttataccaactgctttggtattattgcttgccacctcccctttataatctctgataaccccatttttccctgttgatctagaaccccaaagtgcacccatcaaaattaaatttgggaggaccttgagatggaggaaatctagggccaattactttccttttctttgcttactcattgaagcaactttctagttcaaagagatgaggctcaagaaattgtgaagtagctcattgaggattgataccgagatgtggggaatagatttttttagcaaataaatcttcagtgaaaccaaacctattgttcaaattttttgcactctgctctagccatattcccaaatcacatcagggttgacgctcctatgattgtattcctttacccatacaaaaccattgtatgagattatcaatttgtcacaaatattcttggggaaattccaaagttcatcacttgatgataaaaacctttgccactgcttctaagcatgacagtaatggagaaatatttaattagaactttccaattttttactaggtatgaaaaagaggagtgaacttttgcaggtttcaccaagcattcacaattcttagcattaggtttgaatataagatactagtggaaaatgtaatcatgaatttttaagtatatgaactaaaccatctacatagagatggttgtgatactcgtttatgagtttatttgttttctactttaattaatgatttattgcttcttatggccttttctcatgcaaatttagaaatcttaaagtggagaccattaattgattaggggcaatataatcttggcttttgatgtgtcaaggttttgtggtgttctccataatcaaaatatccatgtgcatatgttctgcattatatatgattgttgttatccatgccattcagatctgttactttcaattgctggggatgagatgatcttttctgtcatgagattcaccgagtcttgatctatagaatctcctaggctgtttcactctctacaatattttcaatccctcaagatgaagagtttcaatcaattgtggtgttaacagttaggttatgtatagtttttggtaatttaactagaataagtacattctttcatgaagtctgcttgtatttaacttatattttgtcatttttatgctaatgcagcttatctatctttcgaattgtgcgtcctataccag

SEQ ID NO: 10328 - DNA, 1950 bp, Vitis vinifera
  Intron number 1 from transcript GSVIVT01014304001 (locus G SVIVG01014304001) derived from phytozome v7.0 (chr-ID chr1 9; pos 2504315 to 2506264)
tccaacgtttcgtctccaaaggacagctctctcaggttctgtatagacagctcgccctctgtcgctatgtttggttgatgagaaaacatagaaaattttctttttgaattcttatttttctgctttattgttaattgggaatgaaaaaattgggcgaaccaaggcgagttgttgtactaccctctgcttggttgctgggaaaacatagaaagaaaattttttattttgatttttatgcttcgttgttaattggaaatgaaaaggtcaagtgaacctaggtgagttgttgtactaccctctgtttggttgccgataaaatggacggaaaatttgaaggattttgcattagggtctgatgaacaaaaataaataaattctattattccttttggaattccaatatctctgtaaacgtgggagacttgcccgtttgaagagtactatttctagcttgccaacttatttgtcggcctttgtaattccttgtttgtcgaggagcagattggaaaggatgcggaagggttcctttgatggagaggccacgaggacaaaaagattcattcaattaggtggtcgactgtatgttctaataagtaggatgaggggttcgggcattaggagacttgaacctctcaactaagccttaatggctttggagatgtgcttaggagctttttggagagaagtaattgtggggaaagagggtatagaagttttttagttcaagcttgtggaagacaatcaggaaggtagggatgatattttattgaggattcaaataccagtggataatgctcagtgtggatcaagttttggcacgactcttggagtggtgggttctgctaaaagattggtttcttgggctattcaatgacgtggtacatatagaggcttgggtgtttgattattgtgatggggtttgctggaagccaaggattggaaggaagtttatggactgagagctggctcttgtagactttttcgcagatattgtggtttggacagtagtggagccaggattttagttcggggcaacttctaaaacaaatgtaaagtttgccaattacagaagatgtgggatttagcccaatggccagccatgacacttttcagggtgtgtgtggggagggggttgtccctaacactaggtctgggattcgattccccttgtgagaagtggaattttttttttttttttttttaacattttcagggggggctccctgtcagaccctgttattaattctttgaatatgaagatgttgtcaccttcccatctaggttgatttggaatttctaagacaccttctaaggttgttctttttttcttttttttgtgtgtggaaacaggcttgggagaaatttttcccactgattatatcatgagaaggtgatggaagttggtcaatcggtgttttctctgtaaacttaattctctgtctgcctatgatatccccatccattgtgaatgggtttctgagttatgggctttggtgttctctctaataggtgtgtcttatgaacttcttgcagatggctgtttttagcttccaattgtctaagcttagtttttgtttttattgaaaaatgatttagtagattattaagtgaatatatcttaagaatttgagttatgttcattaacaagaatttgtgccatcctttgacatgtgatgtctaacggtagatttgtttttgggaaaccaaaataaataatgggaaaacaagattagaaggtctacttgatgacaaaaggggttaaatccatctcttctcaagccctgctgtgattttttatttcaaacttgcgaaaaacaaattcttttcaaacaatcaaatctttatttctagtgggctcatgcaagtttctatttcaactatttaaattttactggtttttgacatctcctcttaacaggaagtagctactggtgctctgcaacgtctacg

SEQ ID NO: 10329 - DNA, 17141 bp, Vitis vinifera
  Intron number 1 from transcript GSVIVT01007835001 (locus G SVIVG01007835001) derived from phytozome v7.0 (chr-ID chr1 7; pos 8565917 to 8583057 reverse strand)
aatactttaaatataaatatttaataaataaatttgttgcacaaaattagtaaaaatataaatattagttataattaatgagagtaaatatgttaatttgatgatttataataaatattaaattaattttactaaaaaatcttaatatttaaaataaaaaataagttttaagttaacaacttaacaacagtttaatttatcatcaacttaaattattaggtaataaatattaagtgtttgttaaacacccaccaatctcttttggtcacttccctcttatttatattaattgatacttatcttataaatatatacattataagatcaagacataattatcgtttccaaatgcccttaatctttattatcatccaaatgtggttatagacaaggatgaagagttcttctacatggaggagttttaacaatataaattttccttaaaggcaagtgtagggaaatccaaatatctttgttccctctctcagcctcaagttaggtgcatgaaaacttcctaagacttttagattttatacaattgaagcaaaaatacactttttaacaattaaagaatctagatttgtgcattaaaaacattacctttgatttaaatgttcccaaatcaaatccaatcgaagaagatcaaatttgaaattgttggaagcctcataaacttacaatatttcacccaatgactcaaccttgaaccttggcactccaaacaatgggtgttgggcaaggtggaaactaaagttctctcaactctttgaaatggaaaaagactatgaaaatcctaacccttaaagaggtattaatagggttccccactaagcttaagtgacttaagctcattgaagtattaggtcaattaatctagcctaaaaagggtcctaattgattaatcaacccaacatagttgtccaattaattaattagtctaattaagagatattgttcacccacccttgtgtaacattgcgtaattatcaaaatgtctttatgcatataaataaacctaaaatttattcaaccctcacaaatcatgtcatcgatgagctaaaatggggaccaataggtcctgttgaggtctcgcgtccctgatgatccacgtaattgccaaatggatggacgcacgatctcaaccaatataggttcttgattcagtcgttctacctgcaaaagacgtccggacggggtgtccggacgcaccctccgatggttttgtcagccatggttagagagagagataaatcagttggccttttactaggtatagcaagcttaccttcctctttgtgtgaaggttgatatatatagtatcagaagcttttgttcttctttaatggtggggagatattttgtgttgtcatgatgacactaggtggtggcagggccatcatcaccctacgggcagtttgatagagatcgtggtaggtgatgcggctgtcagatatcgtggtaggtgatcatgtgaaatgatcgtgagaagtgacttgttgtcacttcatcttgtcctttcactctacaggtggcgaaacgtgggtcatgacaggctgttgtgataacgtgtaagacttgcttactttagtcaatgacccggacaattatattcggatggtttatgctggtcatccgaatgtatttgtggaagccgtccggatgttctatgcttacaagtgtcgtttgaacttccttgaggcggttcagatatgaggtgggagtcgtccggatgtcttatgtttataagtgtcgtttgaacttccttgaggcggtccagatatgagaggcgcgtcacgtgtatccggatggggatgatccggatggtaatgcgtgccacgtgtcaccatgaggtgtgtggcacgtgttctcaggaggaggggtccctacaatgcccccctttttaacttgcccattttgcccgtgcaaaatgggtgggttaaaaataattgattttttgaaactgaggctacttttttgcgctcattgggccacgtggtgaacgagggtgaagagagagatgatcatttatgatgagccgtcgtttctgtgtattcctaggcagcatgtcgtttcaatgatagcgtagctgatcgtttggtataccgagggactgtttccctataaatagcatactgtgcattctgctgcccttttcctactgcgtttttcctgagagtactgcttcttcttccttctgtgtttttgctttgttttcctgagtgaagccctagaattttcctgccggtgatttctgtatcgcacttgttgactgtgtttgcggtgttcaaccttttcttccagatttacccttggtatgtgcatcgttcttggctttttcttgctttgtgtttgcctttgttggtttgtttttggtttgttttgggcaacttgtttgtgattgtgtgtgtaaatgttgatgtgttttttttggtttctagggttttgttgagggtgttctaactgttggcacctttttatgtagtcttacgaaacgagaagatgtctgctaaccaggaagtgacttcacctgtcccgtgtggtgctgctcatgccaaaaaatcggttgacaaattgagtgtgaaggagttccgtgaacggttctgtattcccaacggtgtatcagttgaattatctgagggagaggtcgtgtctactagaaatgctgaagacaatgctatttgttttagcaaggagcagttcaacgctgggctgcgattcccccttccgtccttgttcaaggaatttctgcatttcacccagattcccccggcgtatatgcatccgaatatggtccgggtgttgatggggtgcagcgtcctgagcatgttgttcaatttggacattactctactggaggtgctgtttatctactcgatcaagaagctgaagactgatattttcagttttgtcgcttgcctgccgtccatgcatttggtgaccagcctgtcggactcaaccaagggaggtgccaagggccatgtgctggtgaggggcatatgggcgggtttagggacgcacccggacaggcccttcgccctcaaccgatcgctgaaggtccctggtatggttagactatcttttgtttttccatgtcttgcgagtttaggtcaatatagttgggttgttgacatacttttgctttcttgggtacaggtcagaataaaagggggaaattggtagaatgggtggagaaggcctcgttcgatcgcttgaacaggctcttcgagattgcgccggccgagcggagttgcgaaaagctgctttctacgcagaatctccgttcggtcatgaaggagccgcatccgtatgtgatgaacatactccctaggcggctgcctgaagaagttgtagccggggagcattttgtccttcaagatttgcctttctacgcggcgatgcaggaggtagatgcccaaacacgcaaagcccgccttactgatcgggaggataaaagaaaagaagggctcttgcggaaggcaccgggtggtaaaaggtccgcaccttctccggttggcgctccagcgaagaagaaggggaaggtgaccaagaagggaaaggttactgagaaggggaaggcaatgaaaatccccattccgccaaaggagtttgtaatccctcctattacctatgaggcggaggtaataataaaggagcccaaaaatcctcttcctccctctatctcaagtggccccagacacgtcgcgggtctgaatcattcagggccctccttgtcagcggctacccgtttggctattttggccgaggaagctgcatcaataaatacacccggctctccccatccgaatgccggcgcggtcgaggctgtttgcgcggatgtgtcgcctctcatggcgacacctatggaggagacgggggcagaaaaccagagtctgccatcagtcgggccaagccttcctgcccttcctccgatgaaaaggccaacttcaaggaggatgagttcagcgcggaacctaaagtccggcctcatcgggcgactgtaagatcgcttccaagaaaccctcgaagtctgctgctcctccgtccaggatgaccatccggatgggagcgagacggagacggcaactgagaccccagccatcccgatggtggccccggatgagggtatgcccggtgagacccatccggctgcaaatgagggggctccggatccggaggaggatttactctctaacacctcatcagggggggatcctgttgatgatgcggcttgcatctccgctggctcttttagctatgcggagttggaagagaagctgaaacagattccacccggctcaaccactgccatgccttcagcaaagatgttcgaagtggtggaaacggtatagtatatttcttgattgtcttttgtcatattgatgtgtttgtggtatgacttctaatttcgcttttcttgcttgtgtgctttgtttgtagctggtgagtggtcttcgcggcatggctcaacaacacgatctatttactgacctgctgcggaccaccgattatatgaaggccttcacgtctcagcgaaaaaatagtgaagatcagctgcgcttgagactagtggaggccgaaaccagtttatccaccactcggggggagaatggggccctccggatggatttaactgaggcaaagaactgggaggaatcgatggaggcccgcttgcatgaggcggaggatgaggtggctcttttgagggggaaggtgaggcacctccgaacggaagtttcaattgaaaagaagcaaagaaaatatctgcagctacgcttatcagcgcaaaatgaagagctggaaggcgagtttgctacagagagggaggaacttgaagcggagtatcaaaagcaagtggacgatatgttcttcttcggctatcgctgttgtatgaaaaaaaaacggcattaaacgtgatgtcccttcaattcttccgagtgaaaagaaaaagctgctcgacaagcctactccctgacagtttttctttttgtaatctttgctgctatcttctttctgtaacttttgtagtccgaagacctccttgtatatacttcacaaatatcaataaaacatacattttttgacatttgtacttgtctttttcttttattgataatactgctttaaattcgacccattccatggtctgagtaatggagttccgtctagcttttgtagatgataagctccattttcacttgacttaaatactatataaggtccttcctaattggcttggaattttcctgcccttgtttcagctgtattttcaaaaacttttctaagtaccagcgtaccatttttgaagcttttttgtcatactttgcgattgtaatgggcggatgccctttgctgataatcggtcatccgtatggctgcgctttctcttacttcatctgcccaatccaagtttcttcctaacaccgtgctggcatcatcctgtttcactgcctcagtccggatagtgggtaaccctatttcagtaggaatgactgcgttcattccgtatgcgagggcgaagggagtgtttcctgttggccgtccgggtgtggttcgataggcccacaggacgccgggtaactcttccacccactttcctttggcttgttcgagccttttttttaaggcagtgattaacgtcttgtttgtggcttccgcttgcccgttactttgaggataacgcggtgtagagtatgaattccggatgttcagttccgaacagaaattccggaatgcaatgctatcaaactgtggaccattgtcggctataatggtgtgtggaattccaaaacggcagacgatatttttccatacgaacttggtgacatccttgtctttgatgcttgcatatgcttcagcttccacccatttattgaagtaatctgtggtgacgagcataaatttcttttgggcaggtgcagttgggaagggtcccactatgtccatgccccactgcgcgaagggccatgggcttgatattggtttcaatgtttctgatgccatatgtggaatgagagcatatctttgacatttatcacattttttgacatatgctgccgcatccttcttcatcgtgggccaataatatccttgtgaatgggctctatgtgccagagatcgtcctcctgaatgattttcgcatattccctcatgcaactcagctaagacgtactgggcctctgattgacttaggcaccgaaggtagggtcctgtgaaggatcgcttatacaagtgtcccccgattatggtgaaacgggcagcttgtatccggaccttgtgtgcctctctgggatctctaggcgaagtgcctgtccgaaggtattctgcaatgttgttcgtccattcttggttgtctgcttgccttgcctcaatggtgttgcaagtggaggtttctgcgacagaagagttggtttgtacatgtataggcaacaatatggcttctttgatggggagggaggcagcaatgcctgccaaggcgtcggcacgtctattttcagttcttttgattttttcaattgtccactcggtgaatcgttgtaaggtgtcctttacttttgtcaaatatcgtgccatgcgcgcatctttggcctcgtattccttctcgacgtgtcttacaacaagttgcgaatcgctatagacccggagcttagtgacggacaaggccagagcgaggtctaatccggataagatggcctcatattctgcttcattgttggaggcagggaatcccagccggatggcttgctccaggtgttccccaattggggactgtagcagaagcccgactccggaccctgatgatcgtgaggctccatccactcgcaaagtccaccattctttttcatttgattcctggtgttggttaggcgttcgggcatattctagcacgaagtcagccattacttggcctttcatggacaatttgggttggaattcgattccaaactcgcttaattcgatagcccattgcagcattcttccggttaagtctggcttgtgcaaaatattgcgaaggggttgatcggtcagaaggaccaccgggtgggcttggaaataagggcggagcttttggacagcgctacgaagggctaaggctgtcaactccatttttgaatacctggtttctacatccgccaatgctttgctgatgtagtagataggtttctgctccttaagtgagtgacagcggaatagaacagcactgattgcccactctgatacagccagatacatgtataatttttctttcgggatggggctgctcaggatgggtggctgcatgagacagtgtttaatcttttcaaaagcgttttgacagttgtccgtccatccactcgttccagcttttcttattgccaagaagaagggtcgcaattcatcagtgaagcgggctatgaaacgccctagtgcgacgagtttgcccgtgaggcgctgtaattccttcttgctcctggggggaggtgtttccataactgccttaacttgatccgagcaaacctctatccctctttagctgaccataaaacctagaaatttgccaacacttacgccaaaggcgcatttggaaggattcagcttcatgtcatacttcctcagaaggtaaaaaacttattgtagatgaagaacatgttcctctcgggttttgcttttaaccacgatatcatcaacatatacctctactgtgtggcctatcagaggtttgaagatctttgtcatcagtctctgataagtggcgccagcgtttttgagtccgaatggcatgactttgtagcaatagaggtcgtatggcgttatgaatgttgttttttcctcgtcagtcggggacatgggaatctggtgatatccggagaaggcatccaagaaagagagcatcccttgcccgacagtggaatccacaatttgatctattcgtggcaaaggaaaactatcttttgggcatgcattattgaggttggtgtaatctacgcaaacccgccattttccttcttttttgggtaccaccactacgttggccaaccaatccagataatcaacttctctgatgaaaatccggcttctagcaatttgtcaatctcgttccgaatgactttttgtctatccgggtgaaagcgcttgatcttctgccggacgggtctggcagttggaaagacgttaagcctgtgagatgtaatagagggatgaattcccttcatatcaacatgtgtccatgcgaagatgtcatggtttcgtctgaggacgttttgcatgctctgggtctcctctggtgtcatgagggagctgatgtttgtgaggtgaatactttcctccgaaatttggattgtttgcaagggatctgctgccggtggatctttgtctgccggacccagtaattgctattggtcacatgtgtggctgggcttagggaggggtgcaccctcctggttggttcctgcttctcgtgctatttagtagcattggcgagcggctaactagctgccgtataggtcaatttgtccttcgttggtgagaaaactcaccatttgatgatacgtagaagggatgactttcatgtagtgtagccaagtgcgccctaagatgacattgaagggtgacaactcctgaaccactgagaattgtacgttgagagtgactgggccagcttggatcggcagtataatgtctcctaatgatgtagttgacgatccgttgaatccggacaggattcgtcctgggttttcaaggcctgtgagactgtgtcccatgcggctaacgaccaatgcttgtacaagatcggccgagctgccgaggtcaaccaaaatgcgtcttacatcgaagtctcctatctctagggacaggatgagggcgtcgcgatgtggctgtagcgtccgggtgggatctaatggtgggaaaatgattgtcccatctatggggcgagggccccctccagttagcccaggccggatggaattgatgtgttcatgtattaatgcggcccgcaacaacttctacctttttcgcctagagtcgtactcctcgtcggatgggcctccgttaatatagtttataacggccttgggggtggccggggccctgggggctccaaggtggtgatgttgggaagtggattttcctccatcatctgagcgaaggtattgctttagatgtccagccttgatgagcctctcgattagatactggaggcttctgcatgtttctgtcatgtgaccatgttccttatggaaggcacaccttttgctatgatcccttgtggatgggtccgttccttggggtctgggccacctgaagtcggacaaactttggatcatggggagaagtttttcatatgatatggaaataggcgtgaggggcggcctatccgggagactcggtccctcctgccttcgatcggatggctttggccggtccagaggtttagcatttctttccgcgtcacctctagatgtccgtccggcaaccaaaacttgctgggtggctgcacgcacgtcatcttcgagcattgaatacttgttggcacgtctaaacaagtcgtccatcgttgtaagaggctttttggctagcgattcgaaaaatggagtgcctggacagatgtttcgcttgaagatctgtaggatagcgtccatgctgcaagcctctacctggagtatggcctgaccaaatcgcttcacaaactcccttaaggattcattatcttgcatttttatgttttgcagagtgctgatgttctgcttgtgtctagcggagcacaagtattgcccgacgaaagcttcggacaggtccctgaaattgccaacagagttgggaggcaggcgatgaaaccatgatagggcctgcccttgtaggctggcggggaacactttgcatagtagtgcatcgttgccaatatcgagcgtcatgagctgtcgataatacatgatatgatcgaagggatcgttagtcccatcgtatgttgaaaattttggtacgaggaatccccttgggggcttgtaatgaatgatattggaacagaagggcgtggagagcatgtcgtccagccttttgctgatggagccaatgggtggctcgtttgggaggtttctcccagcttgttgtaccgctaggtgcgggtgaacgttccgtaccatgggggtgaccatggggtcacggtgcgggagcacgttctgcaccacggggttgatcataggatcggggcgcgttgccccggttgtggctactggtggccttggtctcctaggctcttgtgggcctagtcttacgcacattgaatttgacaactgagatcttctatcgcgttgtctttttgctgaaaagtgagtagagtccgagttttcctcatggagagctcgaggcatgggagtgtgtggctcatgtggcctcacgttgcatgcttctgggataagtcctattgtcccaggatatattgattctggttctggccttgaattcgctacttggcctctcgaacgctgacgacgaggaggccctaaagttgaagcctggatgcgtagtaccgcgttttcttctcttaatctttttgtttcctggaggagaactttcagttgttgttcgcttaccaactgtcttctttcgatggcttggcgccattcagaattatcttcctctcgcctaccggatgaacggcttcgagaaggtgtggccatctttgctagcgactgaatcaaaaataaaaaagattcccacagacggcgccaatgttgaggtctcgcgtctctggtgatccacgtagttgccaaatggatggacgcacgatcttaaccaatataggttcttgattcagtcgttctacctgcaaaagacgtccggacggggtgtccggacgcaccctccgatggttttgtcagccatggttagagagagggataaatcagttggccttttactaggtatagcaagcttaccttcctctttgtgtgaaggttgatatatatagtatcagaagcttttgttcttctttaatggtggggagatattttgtattgtcatgatgacactaggtggtggcagggccatcatcaccctacgggcagtttgatagagatcgtggtaggtgatgcagctgttagagatcgtggtaggtgatcatgtgaaatgatcgtgggaagtgacttgttgtcacttcatcttgtcccttcactctgcaggtggcggaacgtgggtcatggcaggctattgtgataacgtgtaagacttgcttacttcagtcaatgactcggacaattatattcggatggtttatgctggtcatccggatgtatttgtggaagccgtccggatgttctatgcttacaagtgtcgtttgaactttcttgaggcggtccggatatgaggtgggagtcgtccggatgtcttatgtttataagtgtcgtttgaacttccttgaggcggtccggatatgagaggcgcgtcacgtgtatccggataggggtgatccggatggtaatgcgtgtcacgtgtcaccatgaggtgcgtggcacgtgttctcaggaggaggggtccttacaggtcccattggatagtattggctcccttaaaattttgaaattgattcaacattccactacaaagaatcgactatactctagtactctacatatataataacgaaacaaaactcgaatttgtgacatattatccattacatacaaactccccataaattggtgttcataatctaacaaggtaatgttattacctatcaagattacctctccaatctttaagttacagatccttcttattatataaccaattaacatgatctagtcttaaggagcatatatcaaatttcactaagtgaaatgctatgatcatagtcttttagatcatatgtcctttggataacccaaagggacatactatcttgataccatgagatatcatggtacctttattgataatatttgtcgctacaagtctccatcaaaagtaacccaatccataaaaatatataaccactttagggtctcactcataaatcaaagcctcctattgattttgacacaaacttaatattctctaaaggttgagagaccatgtaatatagtagtttaatgaatcatgacaacttataatcttacgtcatgatttaccgtaggtcatgtctagtgtgtatcacataaactagtgtacttaccatggaaaaattatctcaataaccaagaaaagtcatccttccaattaggaggtaaatgcattacagtctcaaatggattgtcaaaatccatgaaccaactatacttatcactctacaaggaatccatgacttggatcttctacgcaacttatgatatacccaagttatgcacgatgtaaatgatgtaaacatgtatactcaactaaccaattaatgcatacaggataacaaatgggaagccaagaaacatagataaataaatttataaataaatcttaatatgttatatcatgttatgttttttagggctcgatctcaatagcgaggtggtaagggaaaatgtgagttagaatgtcaagattgtatctcatagttcacacctaactcaaaatactatgatgggagcaatgtcacttaataatagtacttaactcgagatgctctactcaagcaccttaattgacacatggcgacacccttccatttacctttatcatttccacttttattttactttaatgaaaacatgaatgaaaaaaatatgacattttcatgaaaggtgtgttcgatggcaaaattgccaattttggtggctattgagaataatgtgctatcattgcatcgtctcaatattggaaagtaacatataaaaaaatgagctttgtttattcttgttacattaggcacttacaatgcttgttggacctttaattctcaagcttaaaagtttcattttccttagttgtaagggatttttactttcttgcattagtatttctttgactttatctattgaagtgtttgataaattttctaggtttttgtaatttcattatatgaatggtcatttgtttaaacttatgtgactaaggtgttttggttaaggatcaatagttcctaaggtttcttccatggtcaattgtttatggtattctatctcttgtcataaattctgagttcctgtttacattctatgaagagtgctaagattccttcttcacctatggacagagatttttcttggcttataggggccatggtggaaaggcatagtctaggctttgaaactactctctcaacctttgaattggctctggatggtcaatatgatgagttggcagaaagacagttaaagcatcctatcaagggtttgttccttgactaagatgatgatgatgatgttacccaccttacatttccccaattggaaaaatccccttatacaaactctttgagtccaaatgaagtattcgttgcacatgcaaatttttaagcaagtctctagttgactattttttgctcttgtctaagagttacattttataggcgtgcatttatttttgtcacatcctaacatgtataagatattaatgagttgtgtggtattagataagtgatacaagatctcccttgtagtctagaaagtccactttttttattcatttaagttaccttctctcaaatatctttactcagcaaatggatgcatatctttttggaatagtcattgggtgactaagtgataaccttaattgtcagaaaagtcatagtgtaattaccaattaatgaatactcgtgcaaagagtccaaacaatgccctttcattcctcgacaccaagcttgactaaataagaggtctcataggtgagtttttcactttgtggtccttgtttgcctgaatgatcgtatcaagttatttgatatcctctggaacaataggattataccaaggtgttaactatagagagcttgcaaatgatgcttgataactcttatccctacattgatcctaaaattcctaattgtaagacatcaagggatgattatgaaattcttttgattgagcttaaggtattctaaatctaaacaatctaaagaacaagagaaaaaaatgatcgagaacctatacttgtggaagagactttaaggaagtctttgagcaagagaaaataaggtgctactaaggataataaaagtaaaagcactaatggaaagctagaagctagtgaaaaaaataaagtttttaacattagctcatttattgattttatggtgaaactcgagcttcttgttgttgctattaaacttgttatatcctccgaccctatctagagtagccacggctcacctaataatgaagttggtcacctctacattatttacaaatatgaaaaagataattaatgttgaggtgcaattccatttataagacagatatgaagaaaatgaatagtgtcaaggtgtaattccattgaaataagatttctattctctttgctttttatttttcacttttctattcttatttgtacttgacttttataatgttcattgatagtggaacattccttcttaaaccaggcaaaaggcataagatagtcgaggaaacaacaaccgagtttactaacctaagaagatgagttagggagcttaaataccaagtcaagggaatatagaaggaggaggagaaaaaaatagagggaagctttaaagtgctaattagaggaatctctttgagcccttgagaagttgtgcatggttgaatgtcaagttactattctaaaagaaagggtagtaaagatggataaaatactgaggaatgaaaataatcaagcagagcgactaaaggagggctctttttgaattatgggcacagttctaagtagaaaagaagtggtagtgtatttagcttttaagaagataaaataaaaagatattataatggatacaatgaggccctcaaaaagtataatattagtagcaaggaggagattcttactacaacctcatttaagtctaccctaattttaatggatacaatattttaatgttctcttagtacttgataatttaggtgaaaattttcatacatgattttttattgctttgttttgattaatattcttattttacctttcaatttttgaaaaaatgaaaaatgagtgtgatcttttgtgaggctgaaatagagtaattgattgacccatatggatcaggatagtgctcctctagtgctttacttgataggacttaaaattatgctctatgaagcatcacattatgaggctctctcctatggagctttgccctaggagagtagttgtatcctatttttaggattttttttttagtcaccctcccatcagcattacatcggaatttgatagaaataaaataggctttagattgtctatccacccatatcattatgaaccataaagaggttaaggtgaatgctcatccacattgtgatagcaaacccaaccattttgtcaaaaaaaaaaaattggaaataaaggatttcgtgccaaaattaacaaattgattcatagagttagcaatttgatagttagtttgtctgattcaatagtgattcaatagcttgttcagtccaaatgatgacttggatcggattaagctttgatcaaacccaaatgacgatccaaattagattaggtttcaattgaacttagtccaattgacgatttgattggttgaaccaatcaattcgatccaaattttaaaatattgatattaccaatagaataaagaattcaaattattcaatatgtatgatgcgatttaggttgcggaacaaagatacaaacaaatttaagaatatgcgaatacgcatattgtaacaataagattggtggtgccaaaaaactaagatacggtagtgtaaacccgaccaattaccataaacttataaagaaattttggtctggacatgtcattagctacaaaccaggcaagatctgggtgcacacccactgacccactagcaaataattaaaaaaggaaaaaaatgatgagacccaatgaatttggcgaggaacaatggcataattataaagaagagtgaaatgtgagatggtaagagaatgatagtggaatggtgaggggacccacaaatctgaaaatctcaatcaccccgaaatgaaacaacaatacaatcttcctcccactttccccaccaaagctttccaaatatcattccgtccaatccaatccaatccgatcccatctgatggctcaccttgctcatattttcatcacatctttcagatacgatttccttgctaaagcgaagcaaccaaaatttacaattttaccataataccacctccacctccgttccatggcccccacctggatgcctccctccacactccccactggcccactctctctctctctctcccattttcccatttctcctcaaattttcttttaagaaataatttctttttttcttgaatataaataagtttttttatattaattaaaattgcaggggaggtgggcccaggtgcgacccgtaaacgtagatattgccgtaccaaaatatatttttgggagttgacaccactcacctgcagtcactcctcagggcggctttcctcttttgacgccgccgctctcagatgtgtctgccgcccccatgtctgctgctctcctcttgacccctggtcaacaccctcaacagtttacacagaacccctgatcgaccccatggctttcatccttcataaataaagctttacattgcatgtccgaccattagaaaataaatgtaccaccgaatcatatgataagacaaggttgtactccgaaattatattagacatttgagataagaatctaggaaaaatcgtacccatccaaatcatgggtgaacattaaaattatgaaaaaataattattaaatttttgtgggggaaaatagaaattaataattattatattatcagtaaatacaaagaaaagaagtcattttcaaaccgcaaaaccatgcaggggcatatagaaaggcagtgtggcattgaatatgcagaggaaagagacaagtgggataatgcgaggagattttccaagatctcagaatctcagctttacctctttagcttagaaaagctagatttctgatttctttcttctgatttcgtaccctccaggtccttttcatcttcttacaccacactatttcagt

SEQ ID NO: 10330 - DNA, 8703 bp, Vitis vinifera
  Intron number 4 from transcript GSVIVT01000132001 (locus G SVIVG01000132001) derived from phytozome v7.0 (chr-ID chr7 ; pos 15542520 to 15551222 reverse strand)
ttcgggttgcttcaaggttctttccccctcttctttaatggaagcttaattattttgcatagtatatttacattttttttctccttgttttttggtagaactaccatttcctttctttctgtttgcaccataactctgctatgtgaacatggtcctgtttaacttttttacttgagaggcaaaggaaatttaattgactacataaaatgagaacaactgaacaacaaataaattttttgtacctaagatacttggatggctggtggagtattttggcatattttttaagcttcttcaacagaataaggaagagttctgttttgacttgagtaattcatggttaaattgagcattcttaggagggattgaagaatctctggggcaaaaatgtcacattgcacctccttggaaaaaatcatagggaccagaaactaacttaaaagggctgaagttcaaaaagggtttggatcttagttgtaattgtagttgcataaaatctaaggaaaccatacacatgtggtcatgggatacttcatgatcccctaccctaggatgaggacaaggaggcatatacctaagtatcattatggctagaaatcatccttaaaatttgatacaagaagacaaaatattgccgcacaaacctgctgcaccacatattatttgccacaaattgtcgtgtactgatctcaaatcatcatccatgtggaatgtgaggatgataaatagatataattacaaatggtcaaactcaatagagaaaacaccgcttcaatttgtgctgattgtagaaaatattagattctcactagaaattgataagaagaagaagctaagattggtagggatagaagaaccgccattctaggcagatactgaatcaatgtttctaactgtacaaaatcagatggtggagataaaagaccaggttgaataatggtagaaactcaacaacaacatattgaggctatggtcttaaggtcggccacattactagaacagatagacaaacatgcaataaacttgaccccaactaggttgatctgaaaagccactactttgcattactatgaagttaatgaggttgatagctcttgaattagattctatatgcaaactcaaacaggtcaggtatcttccagaaagaaggaagggaaagaccacctaatgggataaggaattgctggaaaaaagatatgaagaacttgttgttgatgtccaaagaatgaagctatagacaattgagattgaagagtagggaaaaaaggggaaggaaagagggagagagggggttggcttgaaatattctcttcttgcaagtctagatcaaggtaactaaattccctttggtcttaaccttgctccaataggaactaccaaagtgcatctcaatcctgaaattcagtgtatgtgatacaaaaggaggccttgttgagaatttgcaccattataatgtcactggaaagggacttggatggaatgctctattgcctcctcactaagccttcaaggagttgcatcaatgtggttccactaattgccctctcaatctactcaaacttccaccaattatgaaatctttttgttagctaatacttgtggtctcaattgtgttaaggaatcaacaactggttcaatattaaatagagacagggagaaaatattttgtactatgtgcattgattttaaaatgaaatggattaactaccaaaagcaaaattttggactgttaatactctactaaaaacgcaaaattccttgatcctcaccaaaattatgccaataggatttcatggtgtatgtccttaaacaagcaaacctattatggatggaatagttgaaattatgatacaattcccagttaaaaagctgatttctccatacagtgctactctcggttgaatggatccatgtgctaagagcaacaacctctacctaccataaaataataaagattggggtggtggagattattgggcaacagacaacctctcaaaaacaccatgcaatcatattcctagccttggcaaataacaaaaaggacttggcaaataacgattaatgtaggacacctccctttacaagaggtcttaggagattatcctaccacaaaggaagacaccaatgttgtttgcattggtgaagagtaagggaaggctgcccattaggaatcatcatcccctaggagctatctaaaaagcaattctaatgtgtttacttggggtatcaagaaatgcgccaatgatcatgtgttatcacctgaaggttgaccttaacttcccactagttaaatggaagtagctaaggttcaacccctttaggaatgtaggtcatcgatagactattaaaagcaaggttcagagaagaagtgtcacagagtgttaacttcattcacctcaacaatgtctaccctaaatatagtttcctactcttattcatggactgacttatagattcaattgtaggacacaaagccttcattatccaaaatgtgtatgtaggatataactaaaccccaatgcaccttgacaattaggaaaaagactcttgcattacctacacctagcaagggttgtcctactataaggttaggctttttaggtgcctcgctacctttcaagttggatgaccataatgttcaaagaacaaattaggaatacatggaggtttttgtggataacattcttgtcaaaagcaaaaacataaaaaaccatggcatggatctggaggaagcattcaaaatccatagaaattttagggtaaaacttaacctagtgaaatataactttattgctacattggggaaattattagggcgcctcgtcacatgaaggaggatcttggtaatttgtatctagattcaatcaattcaaaacatgatggcattgagaacccacaaggaagtgtaagagttgactagaacaaccacaacaccatcaaagttcttgtacctatgcattgacagatgcaaaacaatctatgatctccttaaagaagaagtttttgggtgagatggtgaatgtgataaagtattcctctagcttaaagagcacttatccaaacctttgatgctatcaacttcttttttcttttttgataaactattggctcctaaaataagagagagcctgtacatctccttggtaattttgttagtagcaataagtattgtcttgtttcaaactaagagaaaggaaaagtgatcaatatactactttagcaaggggttagtctgcctcgaactttggtataattaacaagtgttagggttagccagactaatagttgccaaaaatctctaatcttacttttgggtgcatggagcaatggtttggacgacatatccacccaaaaacatccttcgtatctttccgaaaggatatgcaattggtctatcaaacttattgagtatcatatcacctataaaccttggactattttgaaagagtaagtgctcactgatttcattgttgaattcaatagtggagttgaatgatcgaggaaccgcccaaacaattatgaagatgaatccaggtggatattgcacactaacaagccctttagttagagtggagttggattcggaatccgacaagaaataccacatggaatcataaaaatggaaatcaccctaggatgcattacttcaaacaatgaagtagaatacagagtcctaaaatacaaaatactaatagccaagtctctttgggcttcatgacttcctgtcttctacgacttacaagtagtagtatatcaagtcatgattggaggattctttgaattccaaatcgggcaaataccatgagaagaaatataccataagaagaaaatgtcttggtggatctatacaccaatcttgcaccaatctccaatgggggtgaagagcaaaccatcaccatggactatttgagggaccagtaattgaaacagacaaatttatagtagtcaatgaaggcagtttcaaccctagaaaggagtactaggagcacctaatcatcatgtatccagaataggaagaatgttgaatccctatgagtaaagaaattggcgcacacaattttgaagagcttgacacagtaaaaaaaaaacagatagaacaactctatcaaaggtttgtaggtggacaatacctcaagtaaacatagtgaggcacaatttgtccttgcagaattgcgttaagggcaatgtagaaaccacgatggaagaaattctatggcacattgagcaattaggataggctattgttggtcataaatgcaaaaagacatgattagatatgtataaagatgtgagtaatgccaaaggtttgctagcaaaatcctataaccctctagtctctactaatctccaaacctctataaacatgtggccatttgcatagtggggactttacttagtcgggcctttggcaacctaggtatttgcttatggccaccaatgatttcagaaaatggatcgaagtcgaatcctatgtgcaaatcaaaggaaaaaaaaatgcgataattcatctgaacacatataatctcttgtttcaaaatcatacacactttgattattgaaaacaaaaaacaatttgaaaacaaggagattgccaacctttgtgatgaaccaaaaattgtccaccacctcttttctccatttttttttttgatagataaataagcttaatatattaaaggagcttgaaggcatgaaaagagaagagaaagattcaaacccaccttcccgccaacacccaactcccacaagggttgggaaccctttagcaaaaaccaaaacagaggaaaaacctttctcggaacaaacaaagaacccctagtagaacaaaattcccaccagtggcctgtagagaccactacctctaagtccccacccccctccccaatctttttactcttttctccattatgcatcttcaagggaatgggagtgtgccttcaataacctcactttcaactgaaaaggttcaacattcaactcttgcaaaagcttcctttctttctcacaacttgctcaaagttgatttatttctgctatcaactcactatcagctgaaacgatattgcagatttgagactataagcccaaatggttctttttcaacacaacataccaataatacaaacccattatatgttcagtagccttcaaaagtaaaagatgggataaaaggaaaagtagggaaaataattagcacaataattaagaaggaatggccaccaaatttgcgagccaaaaaaatatttagtttgctatgggaatgccaacattgcattgaagaactgctcatggtcatagttgatatatcccactttatagttgggaatgagagaagggttaagttttggaaagacttgtggtgcgaagaccaaactttgaaagaagctttccctaacttatttctattggcagtaaataaagacggttgggtgtcagaagcttgggaggagggtggggatttgggtagctggagcccttgcttttcaagacatcttaatgattgggagatgggagaagtggagattttgttttgcaaactataacccttggttgttagaagagaagtgaaggacattctgagctgaagaaaaagctggaacaaaaaattttcagttagatttctttattgctcctacactaaggcttctagagatcctttttcgtgtagtattctttggaggtcaggggctccagtgagggttagtttttgtgcctaggaagcgtcttggagcatattttttactctctacccattgaaaagggggatggaatattccgaataggtgttacttgtgcaaagaagagaaggaaaccactggtcacctactattgttttgtggtaaggttagaatgttgtggaacttgatttggtgtgtggtgggttatgcattcctcacttaggaggaatctgttaggttgacacaaatctgttgtgggtaaaaaatgggagaaagcgtggagggttgcacccttatgcttaatgtggtctatttagaaagaaaggaatggaagagctttcaaatgatgtcatgtggttcgaccaaacaattaaatcttttttcatgtgtacttttgtgaattgggctagggtatatatcgaggatcacacttagtctatgattggttttgtacattggttatttgttaggtaaggggaagaccttttttgtctccttactacttagcttttttgggtgttgtttgtatacttcatgtgtgcctgtttcatcgcttttaggtgtttctaatgcaaacccttttattacctctctctctcaaaaaaaaaattggttctttcgcatgatggggtagcgcgacttggatttggaagaaatgggaaagagaagtagatgtatgccaaaatcatgtatccatggcctatggctcggtccattaagacaacatcgaggaatttggccaagatagcgttcttcccttactaagtgattcaccaaccaacacaacatgcacaacctctttcaacaagctacacagcagaaaccccccacttggcacttgctctatatagcacaagaaaagaactggtgagggagtaaatgattagacatgctgataagggttccttgttgactagatgggcgaggtgggtcatgaactcgaaggatgacccttagctacccttttgaagaaatattcactaaagaatgagggaaatatgggtgattggcctttaaagaagtagaaaagtgtcaccctaccatgagctttggctttagcctttgccaatcaggtcatcatagctgtacccagggaatcagaagtgctgatgtacccttatactggattcaatattctttgaggagaatccttgacgtggccatcaaactccatctttcacttaaagcactccaccaatgaatcaggaggatgtaggaaaccaacttctctgacattcaggattacctttcatggaaaacttaccaacaataggattaatcaaaccttaagttacagaaattgaatataactgtgccagtttcaaaagtaagtgttaatgtctcaactctatagccaacccaaaccacatcttgatctctaacctttgctcctcatccagaagtggcttacaatctcatagggtgcaacaaaaggaatatgcgcatcaaaagacggtaattaaagaaaggagaaaaaaaaaaaaaaccattaagggagtgccatggcaatgggggacaactgaaccctcttgcacttcagacttgccatactcctagtccactgtgacagtaaacaagccccggtccatgtctttattagtaggagcaccaagtatttggaatgtaggatgtatacaaaaagaacatcctgggtagtttgttcatcaaaatggtgtaatttctctagcttttctgatttggcctcttatttttcctaggaagaagaagaaaaagaaggaaaaaaaaaccttcaaaaaatccccaccgcctcttgcatgtggccaagtacacgtaaagggatcaaagttcttaagacttggtcaaaattggaagggggtcagacccagataacacatcgtttcctcagcaaagaaggcaaagggagtctcaatctatccttgaaaagtccattgatgcaagaacaactcattgggtcaaagggacaccataccccactctgaattcctctttaatccagtcggtttttggcttatgaggccctcatttagccatcctaaagcaaaatacccaggaaagtgagaaactgactaagaaagctagaaaagctatcctttttgatgaatgggtcttcaaacaacacaaaaaaactttgcctgaagtgaatggcctcttcaagaattaaccccagcaagaaggccattgagaagttgcaactgaaagcatcacatggcaaggatccaacagggagacgtgtgggtgatgacggctaccatatgattgagcccccacatttaatgcataagttgaattttggcctccctcagcatgataacccaatcatcaaatcaagaaaccgtttggacttcacaaaattgctcatgagcaacaaaggctagggctattatataagtgcataaaagataagggcatcttgaccaaacacatgttggcatgggatactttgagatcccctaactccagaacaagggcaacaagtcacatacctaagcatcattatggccataaagcattattaaaacttgccacaagaaggcaaaatgctactacatgtgtaatgaagcacatattatctaccacaactcactttgccaatattaatcactacccacatggagtgcaaatgggaggacatttccatgaagcaaggattgcctgttgactaatcggattccacctactttgtgttatgagaatttgtactatgaagggatgcaatgactgttgatcaaactcaggagcgctataggacgaactcattagaaaaacacgtcttcaataatgcaattcatgttagattatattatctcatttatttggttgtacattgtaactactagagtttttttttttttttttttttgttgataaattgtaactactagaatttaaaacccacaagcctacagttgtttggataaaaagttctgatttttcttttgtatgtattgactctgaactgatgtgcaaatgttactctcttctcttctttctctacttcctgtttgcagatattttaaaggtcccgaacttcttgttgatttgc

SEQ ID NO: 10331 - DNA, 11308 bp, Vitis vinifera
  Intron number 3 from transcript GSVIVT01030858001 (locus G SVIVG01030858001) derived from phytozome v7.0 (chr-ID chr1 4; pos 17770428 to 17781735)
atagtggagagaaggtattttcattatatttctccttccgttgcaaggttggataaaattcacatgcttctttgtttaagcaggagaggatagtctgtaatcaattatttagcttttgaaggatctgtttagttttagcattattattattttatttttttgcaattatgaatagttgagcaaaaacaaaattttaatatgttacttaacaagggaggtaattattatctattaattaaattaaataaaaaaggattgggtaaatttcctttcttaaaaagattttaaattgccaaggcagtgacataaatcttttctttctccaattgtcctatgttttatattgtcgctgaagattttttatgcccagcatctatcaatggactttgaagcatacaatattaaagaaagaaaaaacccagcaatgttatcgcttttaacatgtctggggtgtaaaatacaatgccataaaagtccttttcttccttagtctttggttagttgttgctgtttgaacatctttttcaatttaaatgtgccactatctgctgaatagtcaagtaccagtggttcaaaatcttcaattcatatccaatgattcagatggatgcaaggatggaatttctcggttaatacttcccttttagatccctcaaaccctgaccaccaagtgcctagatttggggcaccaccatgcccttggatgaacaccatgctggctgaagagcagcgccatcagctatgcatgcactttggctccaagcacgtgcctttacctctatcatactcatgcacctatgcccgtctctagcatatttacttatataaatttttggccttttttaaggaaagaaaaaacctagagccaattggccttaattctggaaaaggaaaaaaaaaaaaaaacattgattctcaaccttttgaaggcacttgccaaatccagacaagctcttctgctgtttacctatgtttaggtggttgtggttcccacgtctccaagctccatgcccctcatgatttcacaactccatagtgtttttttactttgatgggcaaacaaaaaaaagtattaatagaacctaaaaaatgggtgcattaaagtacccatgacgtgtacaaaagataccacaaggcaaacgacaaagaagagagaaatagaaaacaactcccttcctctacttagagctcaaataatcaataaagtctgccatagacattgagatatcatctatgtaaaatctagcccactccaaagaattacatataaaagaggttatgattgcttgattttttcattcaatattttcaaattatctcccatttctttccttctatatagtctaaaataagtacaaaggggcaacccttggagttttttttctgcttctttccaataacggacgatcctaactcaagagagatactcttactaaagaatgcaccatccaaactattccgagtagggggtaaactagctgctacaggattcttgttttaaaacagtgaaggacgatattgtcaattgactcttcttcacttttacatgtaacatctgttcaacatatatttataaaaaagaaaaatctgttctccaacattcatcacctactttaagctagtctagtctcaaaatcctcctcaaggttgcttcctagacaaacgataaccattccaactgaacccatggattttaaattacacccacagggaagggctctaaccttcctagtgacaaaaaggaatagaagaatttgactaggaattactcatacttcaagtccatctaaactaatcgatcctcctcatcccttcatattgctttctcttttagtctccaaaaaatgcctttgtcctttcaagttcctggttatggagttgtcttaaaaaaagggactccaatactaagctcccttttcttcttgtacaatcaagtaattaaccaattcactaaatgaggctttattatttttatttttaaagtgctcccccaaagaagttacattgaatcttcttgagcctaatcttacctttcttagaacaaaaggtgcttttaattagagtaagcctccccccacatagcaagcctttttaaaaatctctccttcaccataagtccatagtgtaatactttgatttctttgtgagatgatatttctgtcttttgtttttaaaaatcaagttactactaaaattagaagtaaatctttctttctttctttttttttttagtatataaaaattattttaacattttttttgtatttcaccaactttgtactttgttcagtagtgtttgcatgctgaattctatataattgccttgtttttttttttttttttttgtagaatacttattttgaatgtttggtatcctcatttttatttttttataatttggttgaaaatttgaaacatatactatccaaatttgtaatattttataaaattgcacatgcgcctcactttactgaagtccgcccttgggttgcaccttgtgctttggccttgggagacctttgtgccttcagcatgccttgagccttttagaattatgatataatattttttgaaaggttctatagaaaatgccatcttcttgggatttcttctaatgtgatgatttattgggagtgttacgtatttttagacatttcagcactatttttatttaatttatttttatgttgtgtttgggtacgatgcttatgcatttatttacaaaatacacctataatatgcatatctacatagtttgaaaaaagcttatgctgtctgctttattgctttatttacttataattcaccactactgcacacatgtgccagcaatactatacattgtacattattcatcaaaaaaatattatacattgtacatttgttttatgtctcccctactactctagcaaaggatggaccattgactgaacctgaattttgagtctatgttttcatctcatctctactaaagtgaaccatttcatgagcatgttcacatcccttctctctttgagatcatgtcaaaagagcttggatggagctttaaagcctttattttcctagtcccctcagcgaccatcattgtcaaatagtgcatatgatcccaaaaatttattagaagctttgtttcctattaagagaaaagaaaattctattaggagaagatttgttacaaatgggtgcctaaatcaatactttctgttttcaagcaaagttaagattgtagctaaatatgctaaaaagttttattgcattgtaaatagaggttttaaatatggatggcacaggaggtcttgaggcctgactcaaatggtaaaggttgtgctagtataagtgtcacgtataacacaagggggcattgatagttacattttaagtggtagtgacaattacagtgaacgtagtgacaattacaatgaccattatagcattcctaggagtttcaagcttatcttttctttccaacccatccaattacagtggtttactctgctcttgattaaatcataagaaggaatcctaccttccttttcttatgtactttttcctaggttcaagttccaatgaggaccaaaataaaagaaaaaaaaaaaaagaaaagaaaagggaaagaaaaaaaattacctatcaaaagaacacgagatattttacgactctattatgaatgggatagtttataagatatgtggcatcctatatcttgtattgccaaaaaaaatgagctttttgacatactaagaaatatgttcagatttgatgaaactttgaaggtatctttttttttttttttttttttttttttttgtgaaggtaactcttttttggtacatggacttgaacttggaacctcctcatccccactcttaacccttgcaacatcatctaggcctcaactttattaattgttttttttttaatttttttttgataagtaaaaaagaaatgcattaaagaagaggcaaaaagccacaaagcatacaggggtatacaaggcggctaaggcctctaacaacaacaaaaccagaaaagactcacctccccttaagtggatgctacccactccaaaaagcctataagggagagagactcctcacctaaacacaatttgacccagctccataaattacaaataaaaaaattctttagtttctggatattcaacacacccccgctaaaagctaatctattcctctccttccaaaccgtccaaaaagaacacaacgagatggatttcgaaacctttttcattttcttccccacaaaggggcccctccaactagttatgacctcctttacagtttctggaaagacccattttacatctactaacccaaaaacaatatcccacaaggctctaaccattatacagtgtatgagaatatgatttacattttcttcttcacaaccacacaaaaaacagtagttaggaagttgcaaccctcttatctggagcctatctagagtaagcaccttcccccacgtcgcctcccaagcgaagaaagcgactttagttggcaccttatccacccaaatacacctcgaaggaaaaatggtgtcattaggattgaccagcaaactataagcttccttgaccctgaactggccatttcttcctcccctccaaagaactgagtcttcctccaaagaaggcctatgaccccttaaaacatggagcaaatccccaatcatatccaactcccaatcattaaagtccctcaaaaaatttagattccaacctccttgactagaattttgatcccacatttcctcaactgttgcattcctatgaacaaccatgacaaagaggtgagggaagcagtgggacagcgctataccagtacatcaaatatctgtccaaaatttgattttggtgcccttctcagttagaaacaccatgttatcccagcaccaaacagattctttcaagatctccgtccaaacccctactccaaccgccccattagccttctttaacctccatccaaggccctcttgcccatactttgtcgtgatcacttgtttccaaagattatctttgttgcaagcatacctccatatccacttaccaagtaaggctttgttcaacagggctagcttccttaggcctagcccacccttgttcttgtctgtacaaaccacctcccatttaactagatgagttttcccctccaagtttcccacccccccacaagaagtccctttgcactttctctagccttctagcaacaatcttgggcatttggaaaatagacatttgatagattggcatgctagccaaagtgctttttatgagggtgattctcccccctttggaaatatattgcggtttccaaagtgcaagtctcctccttactctctcttccaccccatcccacatagaaggagccctattaggagcccctagtggaagacccaaatactgagagggcaaggatcccaccctacagcctaactctactaccaactcttcaatctcatccacctcaccaactgggataatttcacttttgtctaagttaatccttagacttgaagcagcttcaaaccagaggagaatccaacttaagtgagttaggtgctctttgcttgcctcacagaacacaattgtgtcatcagcaaagaataaatgggagatgttcaaagtggatctactaccaccccgaatgctacaccttgataagaatcccccctccacagctctcctaatgagaacatctagcacttccattcccataacaaagaggtagggagataggggatcttcttgtctaagccccttagtgcttgggaaaaagctagctggaaccccattaacaagaactgagaatttggctgaagacaaacaactccacatccaccccaaccacttagacccaaagcccattttttgcaagaccttcaacaaaaacttccagttgatgctgttataagctttctcaatgtccaatttgcagataagccccttctcttttcttttctgccacaagtctatcacctcatttgcaattaaggatgcatcaagaatttatcttcccgtcacaaaggcattctgggtagtggaaaccacctttcctaccactttcttaatcctgttagctatcactttagccaacaatttataaagcccccccaaaaggctaataggtctaaagcctccaagatcctcaaccccacttttcttaggaatcaataccagaaaagtattattaaggctcttaagaaaagagctatgctcgtggaactccttaaacatttccaaaatctccactttagcaaagtcccaacagctttgccaaaaggctacagtaatgccatccggaccaggggctttgtccccattcatctccatcagagccgaatgtacctcagtctctaaaaaaggaatctctagctccgcatcttgctgactgatttgatcaagctgaagcctcctaatatctgccttccatcccatatcttctgaaagcagttgctggaaagcgttagcaattccttccctcactttctgttcctctgaaaaccactccccattaattttaactttgtccagggagttgtttctacgatgggcacttgccatatgatggaaaaagcccgtatttctgtccctctcccttagccagatctcccttgaaagttgtctccaatgaattcctccagaagcacccactttttataactttcttttgcttctttttttgactctgtttcctccacagtcaagcttctctcgcattccacccaatcccagaaatccacttgctgtagcgttgaagatttgttacagtccaacctcccaaacacctctctattccgtactttcaacttctgtttgatttccttcatcttagcaaccaatctaaagctagcactgcccctgacctcaatcccccaccaccagcttcgaataaggtctttgaatccctcaaccttaagccacatgttttcgaacctaaaaggagcagagcctcttcttatcccaccccccactagaaggactgggaagtgatcagaaaccggctgaggcaatctgctttggaaaactccactaaattggtctaaccagctaggggacacaaaaaatctgtctagtctagcccatgactagttattgagacccccattccaggtgaactctccctctgtaaaggaagatccaccagcccaagttcatcaacaacctcagcaaatctcctcatcgttgaatttattctcctttgactgctcctttcactttggaggagggtgatgttaaaatcctcccctaggcaccaggggtcttcccaaaggcctctaatcgccccaaattcttcccacagaccatccctttccactttggtgaacggaccataaactccagtgaacacccagacaaccccattatctacattcctaaatctgcaggatagggtgaaatggccctcctcccaatccagaatgtccagagacctcttgtcccagcaaatcagaatacctcccgcagccccctccgcatccagagctctccaatctaaaaatctcccacagcctaaacttctcacaacaccctccgacataggttgaatttttgtctcctggatacatagtaaatccaccctttggttccttataaaaggcttaataattttccttttggagctatcgtttgctcccctcacattccaactcaggacttttagcttcattgggcaactacgatttgactccctttgccctgtgatgggcctttctgcttattccccccttcatagtttacagaacactccaacctctttaactccctttcgaattttgtcttctccagaagctctttgctatgtatcttctcctgtctctttctgattttaaacaaaaagctcaggatttccttttccaatccctttgccgggaatcccgaaaagtggttgaattttgccagactactttcctcccatttttcctcattctcatttctcacagcttgggtcttaggcgtgccagaatccccctccgtacccctgactttatcactgattctattagcttctcccaagtcccagtagccattgtcattctcattggacccctcatccactgttaaccacgttgtgttctcaacccggaattcctcctctataaccccagaacgatcgtaaaactcccccttcggagcccgatcaaaataaaaagaattaaggtgagaagcccccaaagccctttttcccctagagtagaaaactgacccatacctcaaagcttcctcttcaagagcccggtctgtcgttgagtagctaacattcatttgctgcttcctgaaatcctctgtttcccaggcaacaaagggcttcgtctctaagaggttcactcttctggaaatattgcaattcagaaggcaggcctgctcctgagggcctttgcttaaggcttgggttattagcatgactgggctggccctttccataccttcaagcccaattagcttttggcaatccatttctacagcccacctcctagacgatgggcctgcttttgatccatcatcaccagtcgccacttcttttaactttgagcccaaagatctattaagcaagacaagcccaccagccctcctcgcatctttagggcccacgattgggcctgacgtagtcgacccagacaccagcacatcggtggaggcccagtcccggatcgtcggaccttgggcccggtttacaaacatctctcggcccgacccactttcctgcgcacccctcacttcagctgacaggtttattatcttaagccttgcgcttaccgactcttcctccacgcgtagccccgggcgtgaaacgacatcacccctaacctcatcactctctcgtccagacgcttcactacaaaccatttgttttttcctcactaccggtctgaactcccaccagagtgacaggaaatagacgtcctcctccacttcgatttccaacacactcaacataaaatctcctctcgttttaaacaagattcgagcccactgaatctcccccaacgtctttgcctgatcattgactgcaacaaaacccccacactcttcccccactcttctcaaaatcgttgggctccatagtgagattggaagcctaacgattttgacccagacttcatttcttacctcctcccctacccagcagccaatcctagggttccattgctccagccccaactggagccctcccaacgattgattccctgaggatacgacacgtcttgcttcttctagatcttcaaactccagcaaaaccctatccttctccaatctagtcggccctaattttccttttaggccccaagagtttgcttataatcttcccagtctctccaagtcctcttctactactgttctggatttctagctcgcaacaaggcaatgttccaatttctgcaaatttcctagtgtttcctcccttttaaccttcactctgattgagtttgtaattctccaacttggtctcttcactacttccgcatacgatctctccaaggcagatttccccatgacccttacttcctgcttatttgcttttctgccaatagctccttccatttgatgtagtttctctgccatagtcacccatccccctttgtcccctttgcctctcggaatgaagatactgaagctcttcctttttgaaacgacaatccctagccggagaaaccaccccgctctgtctatccctctcgtcagggagtacgatctccctttgtccttccactcccttccccattttccttctttctcgtccttaatgcaatggattaggccctccatgaagaaccctagactctccggtcccaatcggacccatgacgaaacccctttcttcttctccacgatgagtacttggggttttccttttctttcttctaatacgatctcaaacaccttggactccactgcaaagctgctctccttccttcttcttcgaatcgctgcactatcttctccctcctcaccatcgcactctctctcactctctcccatctcactctctctcagtttaccaataactttattaattgttataaccagcattttttgtttagaaataacttaacgtcacatgatttaaagaacaaggaaaatacttttcttgcttaaagattgttaatggagttggtggcacaagagttttgcagagaagaaaagaagtgaagtatggagaatgatccttctatttttgttttggactatttggcaagtgttgagctatatgacctttgacatggagtgttcagttcaatctatgaaagatgtttttattagttcccttttgttcttgtctagaggttatttgattgttgattgttcctttttgtttaatataattgtttgtatatggtccatattattttttcttatttcttataagccttttggcaccctttgtatattccttgtgtaattgggacgtatccccctttttctaattagcttgtgtcaatatatttctatttgtctatttgatgacatcgtgtataattcatgttgcatgggttcaggtatgagtgtcggatacgggtatgtgtgtaggtgttggatccttcacaactcaaattgtaggatacaaggactaggctaaaaaagatctaaaatatggacatgggtactgggatatgacataataaaagaaaaatccattaaaagtaaattggaagtgaaaatatcctttttaaaagcttcaatcttttccctctaatccctttttttcctcttgtccctaaatattcttataaaaaatcacttttcagctaattctttctttcttttttactttaatgtaattattaccaagaaagttgaaaaaataaaaggatatcaacgaaaaaaataaaacaaccacacctaaagtaaaataggagtgtttgacagggatctacttataaaaaaaaggagtgtttgataagaattccatacccacatcctcacccatgtcatttcatgttgacacaggtacatttgatgaaattgaaggatctaggtatcatagtgtataatggtggaacatgttattagcagtgaatttgtaatttttattgattggtttattacatttactgcataaagtgctgagaattcaatttatggcatgcacttgtacgtttgttatgctagcttcctatcattggtgtttaaattttattgtctttaatcctattaattgggggcattatgctatttcttggttgcaatatattggaacatgatttggtgttttttggtctaattttcctctttttgaattttaaatgtacaggtgtctattttggctgggactcttgctcgtttgga

SEQ ID NO: 10332 - DNA, 8246 bp, Vitis vinifera
  Intron number 13 from transcript GSVIVT01022623001 (locus GSVIVG01022623001) derived from phytozome v7.0 (chr-ID chr 2; pos 13646852 to 13655097)
ttaaatagtgttgctggtaaatttttttctactttctttttctctcaaacttctaattttacacttgttagaatttggagggcaatgttgcagatttgtattaatttgagaatctgaagacctttgtgcttcgaaaccactcttttgcctaaatttctttgaacaagataatttgataagggtattattggaacaatataagtatacaaagaagtgcttttggcttcatataatagtatatatacttttagcaggatattttacagaaagaattcttcatgcttaggttaaaataactcaaaatatttgaacaacttcaaatggtaatgttatgtcctttttctttatccaataaaatttggaaaggttattattagaagatacatgagcatatctagaggttctcttggctctatataacaaatatatatttccatgaagagctagagaacaaatggagatccatgggggttatttaggatttggttcacttttcctccctctatttttattattgattgttttccgggtactctttagaaccttttactgctggattggaaatatatttggtactctaaaatatcacatgtaaggacaatacttaattggtcacatcctccagtaggtttgataaagttaaattttgatgggtattccttgggtaatcttggtatattaggtataggaggtgtgataagagatcatttgggtaccgtactttggacttactctaaacctattgggatggattcagctattgaggcaaagatattagcattattagagggctggttgcaagttaaagcttgtgggtttatctaacctaaatgtgcagggagattcttctgttgaggctcttggaagtttgaaacttagcccatgaaatttaaatatttctagtgatgtggcatacttgttcttttaggttcttcgttgagctattcaaaccatactctagttaggtaagcagggagtaaaacatttagtttcgtgttagagacattttttctccttgagtatatagagcattttgtagagtgtacattacttttcatgtctgtaatttgtgtttttttgctcagctagtttttctactttctgttcagcaattgtacatcttggaggggattatcatccttctttgtatatatcgttcaatgtaacgagtgttttttgtttgtttctctgtgtgtgtgtgtgtgtgtgcacattacatcttgaatggatccttctgtgcatttatcattcaatgcaatgaatattgcttttgtgtgtggaaggacactcctaatgttttccaactatacttggttggctgcggagaatgtcatcttatcattttatgtctaaggggtgtgacaccaaattccttactctttcgccttttccatgccttaatatctttcaacatgcgattttaacgtcttggtgagaaatgctaaaaaaatagcctctgctaagaaaaatggaaaggacgttgaaggtctctgtggagaggaagaccgtcttggttaggtgggaaggcgagcacggaggaaattggtgctcgattacagagcacagtagaggctatgtttatgccttaggattcgaaaaagaagaagttgggtggttgatcgaacttttgacgaaagccattgaattgaagagtcacttggggttcaatagaaagtataggggaaaatcctgtgtccatttgatggaagtatacttcaacaatcacgaaaggttcataaggatttcagagttcgctaccaacagaaaaccaacttttctggttattcctgaggatgagaagggcagaggttaggagaatctaaaaagcgctctgtcttctttgttggtggtccccccattgaatgcatatgaaaaaggaagacaatacagagtggaaaggtttaaccacattcacgtgggtcctctatataggtcttttgcgaacgtggttagagatgaaggaccaaggagaggtggacttgttccgattggaaggtaggcgcgagccatggtgtgtgaatgcagtgcagattgtggtaaatgggctgagattggccgagctgtagcgagaagcttagggaagaagggagtggctacgattgtgcccttctcaggcagaaaaggtgttttttttgttgaaacgaaagaggaagctctctttctccacgatttaaggtttattaagattgagggagggaattcacttcagttgagaaggtggtcaccaaaggaaaattcgatagttgaggggaagttcagaggaggtgggattgagctacagggtgtgccatttcatctctggtctgaggtacatttgaagaaattagtggaacaatgggggacggtgattgaaattgattggtgaacgttgaaattgtttgatcttagcaaggcgagggtaagaatcgtaataaaggagcggacaattcttctagctttgatttaggtgattgacggggattgggtgtttactatttctgtcgcagtggtcggaggtgaagagatcaggagaggcagagtaatgggtgagtcgactcgggagggatttgaatctcactcggggacaggtggtggaaggcgggaggagaaagacagatctacggctggaggtagttttcgtgttggggaagttggcagaaagaagaaggaagaagaaaggtgttcggctgaagttcttcctgcggggacacgtggtaagaatggtcaatgcatggggaacaattggctcagtttgaattcaaaaaaactgaactatgggcctgttgggacagagatggcgggcgaagcttcggccggtggggacgagaccttctcaggcgagaatggtcgggcctttgagagagaggcctagtctctctccaatttcagctcaatagcaaaaacgggctgtttattaaaaggctcgatgaggatggacctaggaactgaagaaaagaagcccgttggaaagttgggatcgttacgaaatgaaggtggttctgcaaggggaaaggggaaaggagttgcagctgagtctgatgttcagacgagaggatctacgaagaaggaagtgaagttcggttcaaagaagctgtggaataccctatttcccctaagttccgctcgtcgacatggttctcgaagtcgcagtgagcctcttctgctcgggaagccttcgtcgagtagcgtagagcttcctatggaggtggctttcggggcgggagctcagtgggaacgaggactcagcgcgagccctctcttcatgtgtcgatcgtttagaaagtggtgctcgtggggaggggcatcgtcatctaaaggcagagacgctgcgcgcaaaccatttcatgaagaagaaagggaaggatttttgggctaagtggggtttgatctttgtggtgcttcagtcatgtttttgccttctaatcctgaaatcagaggtaaagggctcaacttttgggggaatcgtggaattttggtagcggaaaacttggaggtaatctcatcctcaccttctcagtctcccgtgtcttcttttccctcttcttttgggttggcacttccatttccgagcccttctgctcccgtttttcctagttcagtcattcagcccccagttcacatggaaaatcgaggaattttcgattgtttttccaaaaatgacgatggtggtactttctgtcagaatggtgttggcattccaaacctggttatggtggagtcccagtctgcttattcaaaccagttgcccgagagtctgaacctcattaagtctaaacccaatgtgcctagtgaggtttccaacctggttatggttagccagggtaatgctgcggtctccccatcgggcgagttctaaattgaaggcctatctcccaggaaaatggctaaagtgcgtgagattttaagctctctagatattaaggtttattccaggaggaagagcagatgctctacaggattgtgagacctggtggtaccggattgggggtttagggtctatgttgtttttccatgaaaataataagttggaataccagaggtttgggatcaaggaaaaaacgaagggtggtcaaagattttctgaggttagggaatccggatgtagtgatgatacaggaaacaaaaaagatggagtgtgatagaaggtttgtgggtagtatttggacggtaaaaaataaggattaggctgttttgccggtgtgcggggcttcaggtgggattttgataatttgggattctaataaactgcgcagtgaggaggtggtaataggatccttttcggtctcgatcaaggttgctttggatggatgcagacctctttggttgtccgtagtttatggcccaaatagtcccttacttaggaaggatttttgggtggagttgtaagacatttttggtctatcttttccattatggtgcatgggcagtgattttaatgtcttaaggagaagttctgaaaaattgggagaatctagtctaacttcaagcatgaaggactttgatgattttataagagaatgtgaattgcttgatccacctttacggaatgcaccattcacttggtcaaacatgcaagagactcctgtgtgtaaaagattggaccgttttctttactcaaatgagtgggagcaatcctttcctcaaagccttcaagaagttcttcctagaaggacttcggatcattggccgattgttttggaaaccaacccgttcaagtggggcccaataccttttaagcttgagaatatgtggttgcaacatcctaatttcaaagagtgctttaaaagttggtggagaggttttcaaggaactgggtgggaaggtcacaggttcatgaggaaattacaatttgtgaaggccaatttgaaagagtggaataaggtttcttttggagtgctagatgaaaggaagaaaaacatcctgaatgaaatagctaaccttgatgccattgagcaaggagggggtctcacttctgaacttttagttcaaagagctttaagaaaaggggaattaggggaatcaattttgagggaagaaattcattggagataaaaagatagggtgaaatgggtaaaggaaggggattgtaactcaaggttttttcataaagtggctaatggtaggcaaaataggaaatttatcaaggtgttggagaatgaaagaggattagtgttgaataattcaaagagcatcatagaggagattttactttactttgaaaagctctactcgggtcctactggagagtcttggagagttgaaggcttagattgatcccctatatctgtagagagtgcatctaggttggactccctttttactgaagaagagatttataaggctatttttcagttggatagggataaggcgccgtgtcctgatggctttactattgtagtgtttcaagattgttgggatgtgatcaaggaggatttagtgagagtgtttgcagagttccacagtagcggatttatcaatcaaagcactaatgcttccttcatagttctgttgcccaaaaaaagcatgacaaagaaaatatcagactataaacctattagcttgatcactagtctttacaagataatagctaaagtgttatcaaggcgtctaagaagggtactacacgaaactattcattctactcaaggcgcttttgttcaggggagacaaatattggatgcagttctcatagccaataagatggtggatgagaaaagacgatcaagggaggaaggagtcgtattcaaaatcgactttgaaaaggcttacgaccatgtgtgttgggattttttggatcatgtgttggagaagaaggggtttagtcctagatggaggaaatggatgagaggttgtttgtccacggtatcttttgcagtcttagtgaatggaaacgctaaagggtgggtcaaggcatccaaaggcttaagacaaggcgaccctttatccctctttttgtttactttagtcgcaaatgtactgagcaggatgttattgagagcagaagaaagaaatttgttggtgggtttcagggtgggtaggaatagaacaagggtgtcccatttggaatttgtagatgataccattttcttctttaacactagggaggaagatttgcattctctcaagagtttattgctagtgtttgggcaaatttttgggcttaaggttaacctcgacaagagtaatatttatggcatcaatcttaaacaaaatcatctttctaggttggccaaattgcttgattgcaaggtttctgggtggcctataccctacttgggtctccctttgggaggaaatcccaagacttgtggcttttgggatcctgtgattgagaggatctcgagaagattagatgggtggcaaaaggcctttttatcttttggaggtaggataactcttatccaatcttgcctcacccacatgccttgctactacttcctttccttgtttaagatacccgcttcagtggctgcaaaaattgagagattgcaaagagattttttatggtcaggggttggggaaggtaaaagagatcatcttgttagttgggatgtagtgtgtaagccgaaggcaaaaggaggtatgggatttgggaagatagttctaaggaatgtcgcactctcagggaaatggttgtggaggtaccctagggaaggttcagctctatggcataaggctattctaagcatttacggatcacactccaatggatgggatgccaacacaatagtcagatggttacatcgttgtccttggaaggctattgctcaagtctttcaggagttttccaagtttactcgatttgtggtaagagatggggaaagaatttggttatgggaagacttgtggtggggggatcaacctttgggttctcaatatccaagactatttagagtagtcacggataaaaatagtcttatttcttcaattctcggatctactcatcctttttcatggaactttaactttcgacgcaacctatccgatcctgagatagatgatttagaaggcctcatgcggtcacttgattgtctacatgtgtcattttcggttccagatgcgagatcctgatccttatcttcttcagggctttttacagtcaaatatttccttcttgccttatcccaatgttctagttctccaccagttttccctactaagtgtgtttggaaatctcaagtctctttcaaagtcaagtcctttgtctggttggtggcacacaggaaggtaaatactaatgacttgctgcatctgagaagaccctacaaagctcttagtcctgatatttgtaagttgtgcatgaggcatggagaatcagctgatcatcttttcttacattgttctttgacgatggggttatggcacagattatttcagttagccaagatggattgggttcccccaaggagcatttctgacatgctgtccatcaattacaatggctttggtttatcgaagagagggatagttttgtggcaagatgcttgtatagctataatttgggttgtgtggagggaaagaaatgcgaggattttttaggataaagcaaggaattcagagaatctttgggatttcatttccttgcttctctttgggctttttgttccaaggtttttaaggggactccccttactgtgttacaacttgattggctagcggcgtgtaattcctttgggtttgtctagtctagagagtttgttcgttttttactttgtattttcttgttttcgtattcttgttgtttagttttctttggtggaaggatttctcatccttctcttgtacttcttttttcttttaatatattcctttgtcgcttcctatcaaaaaaaaatattgcttttgtgtgtgtgtttgtgtgttttcatgaagatattctactacaaagggaaaagagtgcttgtgcttggtgcaaagatgctaaaatcttgcaaacaactttggaaggcaatatctgtatccatttttctgtcatgttatttgatattttctgttgaaattttataatttttttctaggatttttttatccagtctgctttatagatttagacactgataatacagaatttatgtcaatagagttaacagcaggagaaagaaatataagagcttgtaactttcttctttattttcataaagaatttcattcctgctttattttttgttttattctgaaggaacttttttaatttgtctacttaattgaatccttgtttatattttatgataggactgcgtgagtggttttctcagacggataaaagg

SEQ ID NO: 10333 - DNA, 5559 bp, Vitis vinifera
  Intron number 1 from transcript GSVIVT01010380001 (locus G SVIVG01010380001) derived from phytozome v7.0 (chr-ID chr1 ; pos 20007956 to 20013514)
gagagggagggtgaagagagaaagatggaggagctgagagaggcttttgggatgtacgagatggaagggagtgggtgtattactgcaaagagcttgaagaggatgctgagcagattgggggagtcgagaagtgtggaagagtgctgtgttatgatcaggcagtttgatgtaaattgcgatggggttcttagctttgatgaattcaagctcatgatgctatgatgcttacaattcctgagtctgaaagtgaagatgatattctttataagttgaacaaaagagtctttctataaatagatatgatacccatttatttatttttgcgaagttaacgagtctgtatgcttgctagggaggctctctatgaagggtgattggagaagcttgccccattctggattttcttatttgaaggaacatatgaatagtttaggctctcttttcttatgaggcaacatgcaataatgatagtaaacaatattatatttgtaatgataaaagttggggtggagaatgaaaccgatcatcaaataatcaaatgtaaaggacccaacttgactccctggtctcccccaatatgagaaatcaaatcccgcccccaggaggagctggaaatcccacttttaacatgatatccggttggtttccaatgccttcactccattccaattttcggtcaattttataatttattgttgaagtactttaatcaatgttttcagaaccggaccggtgatcaaaccgaaaaagttatcagttcacggttatcaaattaaatcatattaatatttttaattttattaaatgaaatatataaaatatttaaatgtgaatatattaaaaatgaaaatttaaactaattttataatttttaaaaatattatattatttttttaatattacaaaaaaatttaaaatccaatatatattattttgtttggcatatttgataacgaaaattgtgtagttgagtggtgttctaggatgactatagaatctggggtcatggttcaaatcttcttgggtgagacttgctattttttttttcattgattaggttggttagcaatcccacatcgattgtaagagaaatgatgatgcaaaggatgcctataaaagctatgagggccaatgctttacctcatctggtgggctcaagacttagcccataatatggttgagtggggtatgggctttgtcattatgagacaaggcctaggggcttttgctgaagctttttatacaaggatcctttaaaatggtggtccaattggaactgtttggtttgattagaactgttcggttccattgggtcattggttcgaccgttggtttaggctgtttgtgatcggtgcaattcttaaatggtccaatagagcaaatcggattggaattgcaaacggttggatcggtcagtccagtccgatttttaaaatattgattttaaccctttcatcaatagcctttcacatcatcttctttaatatgtttgcatcaaagcttccgtcacaacactaatatttaaaaattaaagatcagctaatcttttataaccatattaagaaattgagacatgacttataccgtatactttctctagaagtcaagcccaaacttatttactaaaattaaattatttaatgtacgttattacacctctaaccttttataaccatctctagaagttgagaaatgatttgtattctaaagtgtttctagatgtagacaatgaaattctataataaagttttctcatgtcattacatgatgacttgctaataaactttctttagaagttgagcaataacttatagtaaagttttttattattattctatgtgccttcttccaacattttatattagaaggataaatataaaaaaaattaaagttaaaggatagtaattgtttaaaatatgattaattagaaaaatatgaaaaataattaaaaataaaaggatgatataaatttaaaatagaagataaattaaaaaatgaggataaagaaaaaaaaaggcaaaattttccatattttgtctattgtcaaatttttttgacgatttttatggcatcgtttcggcgacctcggatgtcctatgtttcctcgaaatatctgtgaaatttcccaatttttcaaaccatgtttccaatggacgtgtgcacgtagaggaaaagggcaaaggacaaaaagactatgaatggcggcttttgaatcttttgaccgttgaagactgcaattccaccttaaaactggcaacttctctccttcttcctttccttaacaaaacctgcaaaacacgcactccatgacaaacccaacactctcttctctttattctcccagagcttcctagtagagtcttcccagcagctcaagtcctttcacgcgtccccacaaaactatatgtacacacaaagtgctatcacatcttctcatcttctcatcttattatcaagtgttatccaattccacatttgcggtactaacattcttgtgtggcccggtcatgattaattgcaatgtgtatgaacgtcttgtcaagcgttttgatgaagatggtgatgggaaactctctccttgggagcttcaacgctgcgtggggtcgataggggaggagctgctaatggaggaggcccgagaagtggtggagtcaattgactaagacggagatgggttggtggggttggaggaatttgtggggtggatggagggagaggatgaaggagtttagagaggccattgggatgtacgagatggatgggggtgggtgtattactccaaagagcttgaagaggatgctgagcagattgggggagtcaagaagtgtggaggagttttgatgtaaacggggatggggttcttagctttgatgagttcaagctcatgatgctctgatgcttccagagttgaacaagagtaacttgtaaaccaagattctttctgtataaaatagaggaatatattcatttattttttgcaaagttagtgagtctaatgcgccaacattgccataatgataatcaacaacattatcttttccttatgaatggcattaattttaaaagggacaattgtgttttgggccggccaaaaaattaaggtttggtccatgtaattaaagtttggtccatataacttatataattgatggaaaggatataagatatcaaaaaaccaaaatactcgttgacattttacataaattttattggtctttattgcactgttcatgcaaccataataattctattttaatcatttggatttttcattgttttaaaaaaaaattataaataattgaaaatcaacattattttctattttaaattataaataaaaaaaattactttcaaaaactattttaaaaaatactttctaaaaaaatggtaatatgatttatattttttaaattttctttttgaaaaaacatttaattaaaaaatgaaaactatttttaaaaataaaaattgaaaaccttgtttaatactattttttatatgaaaataataataaattttaaatttcattcattgattctccattaaattttatatgaaatttttttatccttatttataatatgctatacgaatctttggtcaatttttgggtccaacttgaccaaaacataattctcctttggccaatttttgggtccaacttgaccaaaacacaattctcccattttaaaaactagctgagagaggaactaatcatcaaacggatcaacgtacgatgaaggacccaacttgacttttaatatattataaggtttggattcctattaaccggcttataacttttctacatgcctttacgtatcgtgttctatggggtttatgtctagtcaaatatatatttctagaaaagcatgggtctcataccatcccgggacctgtgggtacgtctggtgctaatcatgaccgaggagccaattagctaggtggcctgaaaccaactcagaagtagaggatccttctatctatacatcacatgtggagctatatatccacgagattatggaacggaaaggttgatcatatgattattctagaatccatcagaatattacaaatgatgcaatatatcatagaaaacgaaggaaaatcttgtaagatacaaacataaatgattttttttaacccaacatcaagtgcatcctctctcaattgatccaaaaagaaaacatataggaacgaaaaaaaagaagcgagaatgtaaatcttatcaaaatgaaacttagacttgattctatagaattgaaactattcaaattgtagtgaatttatgtttagggttatagttttaagacaaagtaagatgttaataggtgattatgaggagacaaagaagtgtttttgatgaaggaaatgataaatgcaaagtttcaaaaaagagtgatggttgttgggagaagaagaacaaatggtggatttgagagagagagagagagagagagagagcaatcgtttttcttctctcctcgtctaatttttgtttttaaatttcaagggtttaaatcctatttatttgagagtatttttgtttgaggtagacatctttcatattttagaaggaggaaggttatttgtacaagcatggatatcaatgaaaaccttttaaccgataaaagtataaatttattttatatctttaaaaattattataaacaatttgaaaatttaacttagtaacaaattttttattcctaattttttaaaataatttttattttttctctttattttatgtaggtgcatattttcttcacattttctcaggaaagaaacatggcctaggatgctgctgataccaaaaatcttgttagactgtgcctgccaattaggctagcttgcttgattatgaagctactgagaagtagtatctcatttgaattcttgcggggaacccctattaggccaacgctcactttgaaaattttctattaatattaatgatgaattgaaggttattaattatcattattttccaacattgaactacaggtcctgtacatggaataagggaagaggagtaaaaaaaaaaagggcaaaatgaactacagtctttttgaccgtgaccgtgatagattaatgcatttccatctcagaacctcgcaacttctgactttcttcctccataaacctgtcaaacactccatcacaccaaacacgccattcttctcatactcgaggctccagtccatttacgcgtcccataaaaagctgtatatatactatcactcacagattgttgttcacatgttctcatcttattgcaaagtgttatcaatcccattcccactgtccttctgattcttgtgtcgcgcagctatgattaactgcaacatatatgaacgcatattcaagcgttttgatgaagacggtgacggcaaactctctccttcagagcttcgacgctgcgtggggacgataggggaggagctgctcatggaggaggcgcaggaggtggtggagtcggtggactcgaacggagatgggctgctgggattggaggaatttgtggggtggatggagagggagggtgaagagagaaag

SEQ ID NO: 10334 - DNA, 6862 bp, Vitis vinifera
  Intron number 2 from transcript GSVIVT01013146001 (locus G SVIVG01013146001) derived from phytozome v7.0 (chr-ID chr2 ; pos 7590817 to 7597678)
aagctcaggcagttgtcgagaaatttgactcttatgtaagtttgtgggaattttggttttctgaatcttttatgtttggtgcttgtaaatttgatggaaaatttaaggaaaagaaaataaagatgaataatgaaaggatagaaaattgatggaaaaaaaattaaagttgatgaattttcatatgcaatttttaaacctatttcacttaagattaaataatttgaaaataatttttagccaattttaataatatttaatcttttttcttgttttccatggtgaaaaatgtttgtttgggaatttggaatgatcttaacctattttctatgttgtctaatatttttgaaaaataacttttatttgtagtaaatgcaaacaacttaaaataattaaaataggttcccaaaaaataacacatttagagaacaagttctcaaaaattatttttttttttgtcaaaattaccaatgtttttttgagtccacaaaacaattttttatttttttttaattttttgatgagtaaagcaagagaatattataaacaatgagggccaaaacagtgctccaaagtgcaccggaagtatacaaagaatgcttaaaagtgcttacaaaaaaattaggaccaacaaaaaactatgccccctctaaaggaacccaactagtccacaattactacaaaagaaggactagaatctaaaaacaagctaaactaaacacatagattataaaggaaagagtgttttagtccttgaatggattgttcctcattctgaaaagatcttctatttctttccttccaaatggtctaaaataagcatagtggagcaacttgccatgacttttccatttttttcccacaaaagaactatgctatcctaaaagagtctctttgatcgaagacaaaagcacccaaagcgcactaaacaggaagaacaaaagattccataaaacccttgtcttgacacagtggatgagaatgtgaaacaatggactcttcctccgtaagagaaaggaaacatttatttgtgaaagaccaccctctcctcttaaaatgatccaaagttaacacctttgctcaagtagccttctaagtgaaaaaacccacatttttcgaaacttaagaattccaaatcgcactagcaggaaataacactgtactttcctactctaaagtcaagtacaaagctttaacaaagaacttcgcatttttcaaccctattcaaatcactttatctttctcttcccaacacgcactcttcccttgcaaactcaaaagaaagcttcacctcccaatcattcaggagcctagaaaaatgaggggtctagtagcccccctcaattgtcgagtgccaaacatttgtcaccaaatcctccttacaatcaacaataacataaagagaagggaaggtaatacatagtgcttcatcatcacaccacttgtcctttcaaaatttcaccctcattattgattgagaaagcaactccactagctacaagatcccaatcctttctaatggttttccataaccccatcccataactttctctcacctccttggagcttcactctctatcttctaccttgtactcaccacttataacttgcttccataaagcccttttattctcagcaaaccgccaactccatttacctagaagggctttattaagctttgcaagattccttactcctagtccacccttactcttatctaagcaaactatggcctacctttctaagtggggcttttgctcaagggctcctcccccccaagggaaatctctttgattctactctagcctcatcttgattgtccttaaaatgcagaacaaagacatgaaatagataggcatgctaggtaacgtgctttggattagggtagtcctctcacccttggataagtattgtcttttccacatgactagctttttgcaaaacttctcctctaccctgttccatactgccacgaacctgaaaactattttaaaaacaattctcaaataggcttgaagtttctatttccttcaagttgtaaatggagaagtttatccccttgtaatagtgacatggacaaggtagtttatcttttggtattttcaaagttatggttaggggatttctatcatcctatatggagagcaaatatcttagagttgaagagtcatggaaggaggatgcttgatccgcttgactagagtgcaggtggtgttgggttttgcaattgaatgaagaactttaagagttctattcctagtcaccaatcctatggaaaaacacaacttaataaatataaatgattttcttgttgttagattggattcactttgaacttatagacaaaaatcataggaacgaattctttgagaatttctccttcatgcctttcctagaaagatgcattcttcttgctttaagagaagtacaaagtctcttctaggaaaggcacaaagaacaaattctcaaggggacttcctttgggggtgaggggcttaggagaaaaagacacatttaataaaattgattgtttgttgggagaaaagaaagggaggcttaggaattaaatgcctttcaacacttaatagcttccttgggaaaatggtgttagagatatgttttagaaggagaagctttttggaaaaaaggttattaagggaaagtgtggagaggaggggaatggtgtttgtgcaaagtgagggaaagatatgaggtgggggtttggaaaagcattaggaagcgatgggacctagatagtagtggtgtagcctttgaggtgaaaaataggttgggaggtgaagttttggaaaaataggtgatgtagggatgaacctttttgtatgactttcccttcttttttgctttagcttccttaaaggaggcgtgggtggtggatgttaaggatgatccgggtggaaggggccattggaatccttgttttgatagatatttgaatgattgagagctagatgatgtaaaagctttttttttctcaagattactagggaggctactgaggagggaagagaatgataagagttgtatggatggattctaggaatggggtcttctccatcaattctttgtattcgattatggagcggggcatgcaattcctttcccaaaggtccttatttggaattcatgggtcctattaaaagctagcttttttgcttaggaagctagttgaggcaaagtgttgactagggattagcttcaaaaggtaggatggttgttggcaaatagatgtgttctttgtaaaagcgagaggaatcaatagatcacattctcctccactacgccaaagttagggttctatgacaacttctattatcttagtttggcatggcatgggtcctttgttctatggtcaaagagactcttctaagttggaatgattcttttgtaggaagaaaatggaagaaggtttgaaaagttgcttctatatgcattttttagacaatttggaaggaaaggaatcaaagggtatttaagaagcaaataattcaagtgctacaacttagttttcttagcaatctcaggtcgtgagttagtttgtacatataagaaggctctatgccttttattgattttgtagattaggtggactctaagtacgagagggagttgtgtctttttgttctctctctgttatggcaatgccttttggcacccattgtagtgtacctttgcatatggcttccttctctactatttataatattttcttgcttgtttatcaaaaacaatttctcttctcttaaatagtcaaaatgaggcaaaggggtgtcattcccacatattcatgtttgaattgccacaagtggaggcatggctttttccttggcatctgtatcccattatggtgcaccttatctcatgggcataatatttggctgtttctctacatataaatatgacagttgtagctatattaactggttccaaatcatcaatggaaggaaaggattctttgagatggatttcacttcttacaaagtagaactctctaactaaaaacaaaatgtagccacgagcatggctgaaaaactatcagtgtgatcccatcataggatgggttgctatggacattccctgtgaagcttggtggaattttatgaacattttaggaatatgaatatttccatgtggagtttggtgtaattttatgaactatttagaaatgtattctttgatcggtagtgaaccctttggaaatctgaacttttaagatctaacttttgacttaattttattggaaatgggaagcttacctttaaaagctttggttcaatgttatgattagcatcataagtgcaggagagatctaattgagctgtgaagcagttcactaagatggttactccatcctgcagcaaccataccgagtgactcaaacctgtgaccaaggcttgaatacaacttgttggtctcatatctcaccatcttacctaaaaccacttggtttcaagaagagcaagaataatctagttgagttatggtggtcagtctactagggcagttaaattctacagttactaaggtagctttgatgaaattcccccatgccagtgctggattctggttacaaatccttggacccttcaaatatcaactaagcttgtcacctcaatgatttccttttttctttttctttttcttttttttttaaaataaaaatcaatctttcttttctatatgaaacaaataattatcattgttacgtaaggcacctataacgaagagtaccttcatgctaacaacaaacatccaaaccttgattacacccaaggaaaaggcaaaaatagaagtattttttctatttgactagtaactttcctattttaccaataatcatataactaaatgcttttgagtggtctaaggctcaattgggatttgattctaggcctttcagaattacttttcctataattttttctcactaatatgttggtaaagttaaaggaaagaaattctcaaagaattgcacccactttggtaactattttgagaaggtcgaaggtagcttttctaataatcaggatatcttctttcataatattttaaattttctaatgtgtcctcatataatttgtgaaataccaactttagactcaagatgaatattataactaattaatgatttattcttggttctttattcataataatattgtttaatattacacataattttgaaaaataaaatattaagaattgatttttaaatggtacaggcatttatttaattaaagattatttatatatgtacagtaataaatgaaactggttaaatttttaacattcctttagtcattatacatattcacaataatttaacagtttaatttaccaaatagttaaatgttacttttgaaacatagcactttttgaaccataatttctcaactgttttacatcacaaccgttttgtccttcagcatagttaaaaagtgatctttcttaaaaggtgcaacaataccaaattggccctaagattcagctagtaaggtaagacttgtcaagaatttttgtggagtttgggtcctatctaagtggcaatattataaagtagttattatttacattttattctaattttttggttgttttcctataaaaattctttcagggttgctatttttgaaggattaggatacttgtagtaatcatctttcgcctttctttgctttcattgttttttctttcatttgtttatttattttttggttttttgttttgttgaaccaaaggtattccttatagaatttttaataggtgtacgaggcatgaggaaacctttattaccaggtgcttttttcttgctggtgaaagttcttagtaggataacttgcaggggcaggggggatatgggctttgatgtggtggtgtgcaagggggaagttcttggttcagtgtgttggggacgatttggtgaatattggttagagtaacaaatcaattgagtgccatctaccatgtggaagaggtgctagagctagacacaaatttggggcatgaagttggttggttcttgaccacgttttcggaggagattgtcaaactggaaaaggatgtgttctatcaaaagggtatacagactgatcattttgggaggaacttgataggatgaaaaaaaaatcctatatattattattgaaaatcccattttttggtggttgtggaaagagatggttttctgaattagaattcaaggttcttccctttttaaaccttgtttcttagttattcttttgcattttttttcctacttgtccatgctgctgacattggagggggagcaatcgttaagaatggaatgaattaagtataatttttctagctgcctttgcatatttatgggaacatgtttacaaatctaatgtttttctgtcaatgatgatcatattggaggtggagggataattaagtgcttgtttgggattctggtttaagagctttaatctgtggcgcttccattaaaaacatattaagaggaatcatttgatgtttggatattaaagaaaatgtgttttaatattgtttttcataatatattataaacaaaaaataaaaggatttttgaaagaatcatctttcaaaagatattttaggaatcgcattaagtaattatttagatttttaaaagtgattttcaaaagtttgtcaaacacctaatatttgtaagtgttttgaagcattaggaagcgcttctagctctctcaaaatcacttccaaataagctctaaatttaagatgaaaattttctagtttcttttgcatatttatggaaatatgcttcttaatctaatatctatgtggtgcaggaattatcagggaggataattagggtagagtttgc

SEQ ID NO: 10335 - DNA, 13583 bp, Vitis vinifera
  Intron number 5 from transcript GSVIVT01037230001 (locus G SVIVG01037230001) derived from phytozome v7.0 (chr-ID chr6 ; pos 17172956 to 17186538 reverse strand)
aggtttctgactgttgtatgtatggtatttttatattgctgtttttccatccctgaattatcaattttacgacttgaaaaatggttttggaagtaggcaaagagttcattgtgaacataaaaactgtttaggatcagtgatttgtagtcaagaatagaaaaaaaaaaaaaaaggtagttctccttgttaactcctatttaagaggaaatgttggagagaaaagcaggagtggaaaagagaaactcctatactattttgatttttctccaaatttagagagatttttggagttgaaagaaataaaagagtttctaatttaccagcctagcttgtttttaataaaatctagggatcaaatcaacaaattgtcaatgcaagtacttactctataaatgtgtttgtggctttcattgatagtctaaaaccgtggatagttggttttggctttgcttttttttttttttttttgataaaaaacaaacaaatgtattaaattacggataaagaaatacaaaaggaagatgaggaatcctcccaaaatacaaccaactaatcaaaagtatgttcaaacatctaaagtacttagtaaacctatacaataggtaagtaccacatgagaatatatatatatataaaaaaaaactcctagctctattatttgaataatttccttccaagcaacctctccttgctaacccacacctttcgaactacacattgaaaactaatcatgcgggaccatattaaggggaatgctcataaatgctgtggtgcaagaagcccaaagaaggcaaagaaatgaatgatatcccaaagagcctttgaagtcttggccttgtcttaaaaaatcctagcttttctttctcgtcaaagaacccaaatcaaagtgagacaagcagttttgcaaagaaccttgcctctaatggagcttcctaatcgcttataggagatgatcatcatatcacaaatactcctaggaggaacccaatccaacttagctgatatgaaaagtttgtgtcataaccctatagtcattggacaatgtaagaaaatattatccaccattcctccactctccatacacaacaagtaaacattagtattaagggttttgtaggatcttctcaactctaacatgtcattagtgtttacctttttgtgtgccacaagtcaagtgaaggtcttgggcttagacgaaactttagattcctaaatcctccctagatttttgcaatgattgggaaatgagagaggtggaagtttttagaaggctgcaaggtcaggtgcttagaaggggggatgatgatatcatgacttggcgcgctttgaagaaaggcctctttacaattaaatccttctactcctctctagccttttttgcaatgctagggtgttcccttctggcataatttggaatccttgggtcccgaagagggttagtttttttgtttgggggagaattctaactttagagtagttaaaaaggaggggctggtttttaccaagcaggtgctatgtatgtaagggagaggaggaattaacaaatcatttgcttcttcactgtcctaaggcaaccataatttgacatcttatttttgctctttttggtgttcaagggccttcttcaatcaaggatgccatacttagctgacatggctccttttttgggaataaaagaaaaagagtttggaatgcaacttttttgtgcttactttggaccttatggaaggagagaaatagaagagcctttgaagattccaagttggcgaaccaaactattttacgatcctttttgtatatctttttagattagcatgtaggttttagctcatggtcttaattagatttcattgattggttgggttgtaagtaagttgatggtgttagtgttttccactttttgggcttgacgcattgcatacatcgtgtattcctttgggtgctcctttagacaatcttaatacaattgcttttactttaaaaaaaaaaagattcctaaataaaattagttggaaagaactaaaccagatcaaattgattggacaagactaaaaaaaatgactttactataaatactcttgatggagataatcactaggctatcgcatttggaatggatggagataaatacaaagaagtaagagaggacacgagtctttcaagattttccatctccaaattagaaaggttacgacgaaaattaaaagttctaagagaaagggtaagtgaagccaagaatagatgagatatgaaggtttttaattatgaaatttttgaattgacttgggaattgagaacacaaaggttaatcccctcatcacaaatcttctcaaaaacaaatttttgcctaatcatccactacaaaactagtgtacttgataaaatcctaaaggacttgtgcaatgacctttcaaggacaacgatgtgaccacatgactataatgttggcatcctacccattagaatgtgtcctatagatgcttagaataacttaataccaaagagtaaaactttccctaggaaacctacatagccatttccgtagtaaaatatgattccttagagaaatcttcccaaaccctaaatccttttcttccttagacttacacactaggtcctaactaatgagatggtgtctcttgtgctccctagtcctttgcaatgtctcgatctttaacgccactaacgaagacatcttaaaaaaggagagaaaatagctagggatatgagacaagcatgattggataagagttattctttcacctaatgatgaaaagacttttttccacccatctaatcttcgcgaaattctctcatcactggatcctaaaaaacacatgccgtgggttcccccgtagtgggagacccaaataagggagaagccaaccagaggccttacaaccaagcaacaaggccaacctagtgatttgatcctaacccatgttgatgccagggagagtagtcttatcaagatttttcttaagtctagatatgtgtccgaaactaacaaaattatcttaaaattttgcaaatattttgaataggctttagaaaaagatggcgccatctgcaaattgcaaatgagacacattagtcttactcttgcccacaatgaagccttctaataacctgctctccttagctctcaacaacatcctacttatcgcatcaactacaatggtaaagaggaaaagggacaatggatctccttgtcttagatctctagttgctttgacccaatctttagcatttccatccattaagattgcagaagttgccgaagagaaataacctttcatccaagtcctccatctagaaccaaaccccttcctttcaagtgcatggtttagaaaactttactccacatgatcacaaatcttttcaaaagcaattttgaaaactgtctcttcctctctagagcgtctttccttatccactatcccattggctattagcattgcaaataagatttggctttgcttttgtcgggtggttgtgtagttatatttatttatgttttggtgcctgttttatgccacttatttacatagggtgtgccctttttttttgtagatgcctatattaatatattttccttttacctattgaagagaaacacctttttttttgttagattccaattcaaaattaaaaaaagggtaaagaagaagaaggaagagattttcattgataaaatgtctatgcacttccatgtacttagtgcgatcatgttggatgggattgtgtgtgatgttaatgactgatttattatcacaatataacctcataggtccttcccatttgactttgagatcctttaaagcaatcttcaaccaaagaaatttgcaaatcctttacgccatggatattttgcctctacactcaatttgggtatcacaacttgtttcttacttctccatgtaactacattactgcctaagagtgtatagtaccctgatgtggatctttgatctatgactaagcttgcccaatctacaaactatgtatgtttccaaacctagttctctatttttcttgaagagaatacccttcctaggagtgaatttcaaatatcggagaattctatacaatgcttctagatggctctcttagtgaatgcacaaattgactaacaatggttacgacataggatatatctagtctagtttgagataagtatataagcttcctaattacttatcaaaaaaaaaaaaagtatttaagtttcctaattatcctttgatacattccccaatcaaccattgtctcctttttatcatcaccaagtttgtgatttgattcaattgatgtgttcattggtttacttcccgattttttttttttgaagatcaattacatacttttgttctgatataaagatacctttcttcgtatgaactaacttgatctcttagaaatacttgaatctttcaatatctttgatctcaaacttttcagctaggtgtctttttagttgttccatctctctagatcatcactagtaactattatgtcatctacataaacaataaaagaagtcagctttcttgaggttgagtgtttaataaacagggtatggtctccttaactctactgatatttcattttcaacatgactttagtaaatcgccaaaaccaagccttgggagattgcttgagtccatatagtcattattaggttggcatgcatggatgttagtgagatttccctcaaattctagtggagtttccatataaacctactcctccaaatcaccatgtaagaaagtgttattgacatcaagctgttgttatgacgaattcttggtaatcgaccccatatgtttgaacacatcccttagacaccaacacaactttaaatctttctaagttctgaagaatttctgaattcctttattgatttattcggtacacatcatacacatatatatatacacaaatgactgaataagaaaatatcaatctagcttgattctctcctaaaaattaggaaactgaatcctaaggaaatatcctaaacgatctctccttttttattcctaaaatactttcctaaattaaaaccctaactttgaatgccaaatttcaacactccccctcaagctggagaatatatatcatataattccagcttgcaagttaagtcttcgaagttaggcttaggtaaagctttgatgaggatgtctgcggtttggtgcttggtaggaacgtagttcaatttaaccgtctcactagtcaccttctctgtgatgaagtgtctgtcaatctcaacgtgtttggtcctgtcatgatgcacggggttctttgctatgcttatagctgcctgattatcacacatcatcagaatcggagatgaactcgtttgtcccagttcactaagaaccctttttatccaaatcccttcacagattccctgtgctagagctctatactcagcttctgcactacttctggctacaactgattgcttcttactcctccaggtaacaagatttcccagacaaaaaaacagtatccagaagtggaccgcctgtcaatgatgtttcctgcccaatccgcatctaagtatacttcagtgtcacgattctctgtctttctaaagaatagacctttccctggtgtcatttttaaatatctaagaatcctgtagactgcttccatgtgttcctcagtggggctgtgcatgaattgacttacaacacttactgcaaagccaatatctggtcgagtgtgtgagagataaatcaagcgcccgacgagtcgttgatatctccccttgtctaccggtgtattctctttctcgataccaagtttcttctgactattcataggagtatcaattggtttgcatccaagcataccggtctccttaagaagatcgagtatgtattttctttgagagactaaaattctctttcttgatctagccacttccataccaaggaaatatttcaaatttccaaggtctttaacttcaaactcttctgacaaatacttcttcaaattctgtaattcctcatatcattcccagatagaataatatcatcgacatagactatcaatatggccattttcccggcatgagacttcttgacaaatagagtatgatcagcctgaccttgtttgtagcccagcttcaatactgcctttgtgaatctatcaaaccaggctcggggagattgtttaaggccgtacaaggatttttggagtttgcaaacctgattctttgccatacttccttcgaaaccaggtggtatttccatgtagacttcctcttctaggtcaccatttagaaacgcattttttatgtccagttgttgcaagcaccaatcttgattgatagccaatgagagaagaatcctgatagtgttcagttttgcaacaggagcaaaagtctcttgatagtctatcccataggattgtgtaaaccctctagctaccaaacgagccttgaatctctcgactgatccatctgctttgtattttatggtgaaaatccacttgcaccccatgggcctcttcccaaccggcaaatctgtgatagtccatgtcccattcttctcaagtgcatcaatctcatcttgtactgccttcttccattctgaaattttgaatgcctcttgtattgtgttgggaacctgagtatcatcaagagaagtagcaaatgctctgtaagatggtgatagcccttcatacgtagcataattcccaattggatgatttgtacatctcctaacacccttcctcaatgcaatcggcagagtagaatcatcaatgctgggaattaacacctctccagccctatcctcacctatgttctcttcagggagacttgaaatggagtcaatatattggccacatgttggctgtgatccgtgctctaattcctgtcttttcctcctcctgatgtaaacttgtaagttctcattagcaagttgtggggctataggttgaatgggcatgggagactggatggtcacgggagaaggaacatttgtgggctgggctgattggactgatgacagcatgggtgtggacaactcagtgggcgcggattgggaaggatttggtgactctgagtgagaaaaaggtacagcctcaagaagagactcccaaacttgatgttcattcatgctctccccctgaacatgagatttgggatagaagaagacatgttcaaagaaagagacgtccatggtggtgcaaaatcttttgttggttggagaatagcatttttaccctttttgagttggagaataccctaggaaaatgcacttattggctcgaggagcaatttgctacgattgtgaggatacacatgaatgaatgccgtgcaaccaaatactttgagtggtaaatcagaagaggctgcacgggtgtgagggaatttttttaagagaagttgacgtggggattgaaaggtaagcactttggatggcatacggttaatcaaataggtagctgtgagaatggcttccccccagaaatagtttggaacattaaaggaaaacataaggcatcgggcaacctccaagagatgtctattcttgcgttcagccaccccattttgttgtggggtgtcaacgcaagaacttatgtggatattgccgtgattttgaagataagtactgagactactagtaaaatattcctttgcattatctgacttgaggacttgaattttgaaattgaattgattttgaaccataagattgaaggtttgaaaaatgtgcccgacctctgacttttctttcataaggaaaacccatgttacccgtgtatgatcatcaacgaatgtcacaaaccatcgagtgccagaaatattttttatctgtgagggtccccacacatcactatgtactaaagagaaaacagtcgaaggtttgtatgggatttgaggatatactgttcgagtatgctttgcaaactgacaaatttcacagtgataagatgctggatttttattgataaataatttgggaaacaattttgcaaggtaaacaaagctaggatgaccaaggcgatagtgtaacattataatctcactatctttattgaccttagatattgacacagaattgaaagactctaagatactctaagactgtacgcaacttgcttgagagacttggtttgagaattggccacatgggaggaggtagagcccggaacacagtttaacactgccaatcatcttccccgatttcaagtcctgaaaaacacacgagtttggataaaatttagtaacacattggagatcataggccaatttgctaatggacaaaagattacaatccaagtttggaacatggaggacagagtcaagatacaagtctttagtaagttttatagaacctatcccgacaatttttgactttgaaccatcagcaatatggacggatgaatgaccattacttggcttgtaattttgaagaatggcaacatctcctgtcatgtgatcagaagcacctgtgtctattatccacggcttcattcctcctcgattagcagtgaaggctatcccggtagtactgccactgccaacttggcttaatagtttctgtagcatctccatatgctctttgttgaatggactcgactggggaacagatgtgttctcagagttggcagccatgtgtgctctgccatctctgtcaaaccgtgactttggtttccaatcagccggtttgccatgaagctttcagcaagcctccttataatggcctagtttcttacaataatcacaccaaggcctatcccgtttctgacgatctccaccactactattaaatgaccaagcagcaagggcagaggcatccaatgttggggcaggttgctctttggatcccatcatcactttctttctactttcttcacgcctaacttctgaaaaagcctccctgagacttggtaggggtttaatgcccatgattcagcctctaacatcatccaattccctgtttagtcctaggaaaaacttgaacaatgtcttttgttccacaatttgcctgtatgttgctgcatcatccgaacatttccatgagtgagtctcgaataagtcaagttgctaccaataccttgtgagtgtgttgtaatactgactaactaactgctctccttggcggaagtcatgtagggctaattcaacctgaaaaagttctgaagtattttcagaacttgagtaagtttctttggctgcatcccatatgtcctttgcagtcccaaacagcaagaaattttcacctatgtcattgtttatggaattgataagccatgacatgatcatgctgttttcaatcttccacttcctgaaactcggttttgtagtttctggcatgactgcttctccagtgaggtactcatcctttcctttaccgcaaatgaacagcaacacagattgtgaccactgtaaatagttatggccatttaatttgtgtcctgtgatgagaataggagaggaatcactgccaccaaggtttggaattttagaactgccccctgattctgatgccgtgacgctggatatttgtgatgatgccattccgtattttgtcatggagatgaggaagaaagccgaatatggttgctggaaagtgggaagaggagaaaaccagagataccggcctaatggaaaagaaaaacaaccgtggcaccaccggaaaggtagaagaacacttcccaaggcacgtgcagggattggggttgagaaaaaatagccggaggacgccggaaaaactgttcggagggcccgtggaggcaaaagaaccccaaaagaggcacgtgcagggctaggatggcagaaacaagtatgaagggtggctagtcggcgttaggcgaggctggaggaggaagcgcgtcgccggaaagtggctcacgcgccctcacacgtcggccggaaaaaacgcgcgtggccggcgcgtgggtggttttctggctccggtgctttgggaaaaattggagatctcctccaggcgctccttgcggtgtgggaaaaagacgtcgccggaaaagtcgccggcggtgaatgttttctaacgacgatttcggtttttctcccttggctctgagaacagggactgatggccggaatgagagatggccagagagagagatggtcagattgagagatggccagagagacttggccgaaatgaatgatggcctgaataagaggcggccagaagggattagggtttcagaaaactggctctgatatcatgaagaatttctgaattcctttattgatttattcggtaaacaccatacacatatatatacacaaatgactgaataagaaaatatcaatctagcttgattctctcctaaaaattaggaaactgaatcctaaggaaatatcctaaatgatctctctttttttattcctaaaatactttcctaaattaaaaccctaactttgaatgccaaatttcaacaagttccatctgccttatatttcacagtgaacacccacttactccaaattcatctcttccccttagaaagctcaacagcctcccatgtttgatattttcaagtgctctcatttcctcatacattgctttcctccaattctcatttctaagtacttcttggaatatttttggaatatcaatgggatttaattcacataggaagactttatgagatggtgacaacctatcgaatgaaatgaagttggagatacgatgttgagtagtgcattttctgatccctttcctaatggcaatcaacaaatctaaatactcgcatacgatgatcatcatggggactctcctacactcttgcctttcccatatcccaagctacttcctttctttgtttaagattccagcttcagtggctgcaaaaatagagaggttacaaagggactttctatggtcaggggttggggaaggtaaaagagatcatcttgttaggtgggaagcagtatgcaagccgaggattataggaggtttggggattgggaaaattcctttaaggaatcgtgctcttctagggaaatggttgtggaggttctctagggagagtacatctctttggcatcaagtcattcttaacatatatgggacacactcaaatggttgggatgccaatactatagtcagatggtcacaccgctgtccttggaaggccatagcacaaggctttcaggatttttccaagtatactcggtttatcgtaggagatggggaaagaattcgcttttgggaagatttgtggtggggggaccaaattttaaaagaccaatatccaagactatttcgagtagtaatggataaaaatattccaatatcttcaatccttggttcgtctcgccctttctcatggaactttaatttccgtcgtaatctaaccgattctgagatagaagatctagagcgcctcatgcactctctagattgtatgaacttatccacttcagcttcagacgcgagatcatggtccttatgttcttcaggtttgttcacagtcagatctttctttacagccctgtcccaaatgcctgattcatctccatttttccccacttagtttgtttggaaatctcaagtccctttcaaagttaaggcctttatctggcttgtggcacataagaaggtgaataccaatgactcgttacaattgaggagaccccacaaagctattagccctgacatatgtaagttgtgtatggaacaaggagaatcagcagatcatctcttccttcattgctcagttatgttggggttgtggcacagactttttcagctagccaagatggattgggttcctccgaaaagcatttcagacatgatgttcatcaattacaaaggatttggcaagtccaagagaggggtaattctatggcaaaacgcgagtatagcgttaatctgggttgtgtggcgtgaaagaaacgctaggatatttgaggacaaggctaggaatgcagggaatctttgggattccattcatttccttgcgtccctttgggcgttttgttcagcgggttttaagggcaccccccttaacgtactacaacttgattggctatcagtgtgttgttcaaatagttctattgggacggtctagtgctttgttattttttcttgttgtctagttttcttttggagggaggatttctcatcctccttttgtacttcttttctatcaatatattctagtgtggtttcctatcaaaaaaaaaaaaaaaaaaatgatcatcatgggtactatcattttccagtatgttcttgaccttcaaagaaggcaaattagaagggaacaattcagtacttattatgggatccgagtcttggacttgctttgatttaggttgtggctgtttccttcttgaataaatgctttctttgtaaaggttaagaggaatcggttgattacattctccatcattgtgtcaaaacaaggttttcatggtggtttctcttctctttgtttggtgtagtttgggtgttaccctccatggtcaaagagactcttttaggttagcatgacttaatccttaatggaatccttgtttttctagacatttgaaatctcattaaaataccaaaatgtggaagaacatgtagaaaaaatgtttttattttaataggtaaagaccaattatactaacaacgcctaacaaaagcatacgtgatgtgcaaaaggcaccaaggcaccaaaactctcctaattttctctctctaaatagtccaaaataagcacaaaggagcagccttccaagccaatatgcagaaaaaggatgagaaattctttgagggaaacaaggataggaaatgaaagcctacaaaataagcttccaaatagacgaagagaagctgtccctttgtaaatgaggtgtccttactgcagtattggcatcccatacattgctatgcaattcattatgcactgatggcattacaccataaagacttgcgttccctgtggaactgttgcagcaactcaccttggagaaaaccgtccctattttatgcacctgactccatccaaccatgtcatctcgggtcccttccccctcactggaccacatgaagttcctcttgatttttctgaagtctacaggttacccagagagagagagagagagagacttctaggctggggttttgcatttgggagcagtgtttggttgctaattttgtgttcttgtgacatctcttttttcttgtgcctctggcttataaaggatcataatgttgttacatttcctattacatgcttacgtataaaaacttaggcagtgcacttaatattcttaagcaatgcctgtgcaagttatctctctaacagggatgttcccttggcaacacctagaaagtttgtattttggctgtcatctggaaagtgcatgggcagtaaagaaacacacacacacacacacatatatttacatttgtaaaatcttcatgtgcattccaatgcagtgcttgatagttgtcaggactttggggaaacaaattatcctctgcattccaattctcagctggttgcttatatgtagtttttttattttatatatatatatatatatatatatatattaaacgtggtaatttggtgtggtcttttattatctacag

SEQ ID NO: 10336 - DNA, 1749 bp, Vitis vinifera
  Intron number 3 from transcript GSVIVT01005380001 (locus G SVIVG01005380001) derived from phytozome v7.0 (chr-ID chrU n; pos 40003497 to 40005245)
cctttgattgacttggctattgaaattgacccaaggtagtttcttggttatcaattaaataataatttcactttattattgaagaagttgtgtatgtgtgtatattgtttcttgcataggggtatgtcctcttgttttgtttctctctgacattatcttttatctttccttcagttggtgaatgttattctatctaactgactgtggttaacctagtttttcaaatcatttggtggttaaattttaacacatgcttttagtttaattttctgaaattcttttgaattgatgcaaaatacagtagggttctggaggtgcacatggaaagtcttttttagactacaggtgctggcacatgaaatgcaattacacacagataaactgtaggacatcctagaacaaaatggagataagagtacattggatgtagggagagattttagaattatgcttgagaagtttaagttctgtgactgtttgtgatgacattaattgaataatggaggtgtgatttatagacaacaaatgtattaagaaaccccaaaaagagggggtccacctatatatatacaggcggtatatacaaaacatcccaaagcaagcatcaaataaatacagggttagcctacaaaatcaaagcaaagttaaccacaagaaagagcatcttgcgacagttatattagagaaccaaggggttgatttaagttggcctaggagcatggagggatgctgttaagtccatttcttcatctcttccaaaagctaagagctctctcctcatccccttgcaacaatggaaggcactacccatctttcttatttaactctctatatctctacctctctttttccaacccccctcctcttccccccctcttccgcgttttacagttttgttaaaaatttggtggttatggccgatccaatgggctgttccttggaaaaagaaagtgacagctcaatttcacccggcctatatttgaatatgttgggcagcctcaaggtttttacatgttttctgtcatgttttaattcagagaactgccccaaatctctgtaatcaaattattaatagtgcctatcaaaaaagtattagaggtggtgcaacatatgatttgtattgaacaaaatatatactatccttggtagtttttatacaatataagaagagggttgaatagcatttaaaatttactatcagattgcagagggagataaaaatatgatttaagtggactacaattaactatcaatgaaggtatttatttatgtgtctctaatttgtctcctaaattcttattaagtgtaatttataaagaactgcagacattctcaaagtaagcaaaaaagaattttattatttttgttagtataaatagcagtatgtaccctggatcatatttgtgtttgtttcttgaaacttgatgaagtattcactgacacctgtttgtgcttgaggaagctattatactataccacttggactataattgacttgttacaattttttgtagtgtcattttccaaaatattatgatgcgtgtgcagacacgtattctgtgctgaagttaacttgcatttcattttggagtggcattattagactctttgtttttttttttgggtgttatcttagagtttgctggtggaagatctatactatatatttttcattctaatgaaggctttacatatgcaaaaacctgtcctgcagcattcttgttagtgcttttgtgggaactgcagtgg

SEQ ID NO: 10337 - DNA, 3347 bp, Vitis vinifera
  Intron number 11 from transcript GSVIVT01037637001 (locus GSVIVG01037637001) derived from phytozome v7.0 (chr-ID chr 19; pos 6447169 to 6450515)
tgcatccagtttcatatgtaagaaaccctgcctgtagcatgacatatacatgtgattctattcatttgatgttgaaagtttctgatatttaactcatccaaaatagaggtagagggtcactgtagaaatttatgcagcaagcaggcaatacttagtctggggaataaaccacagaggaggaaattttgacaagatgatggtagatcatgacaaaaattccaacaagacagcagtagatctgtcatgtgtgtagggtatgtcagaacacatgaattcatgagccctagttaagagttctttagttttctgaccgcataacatttgacctccaaaataatagatcacttttcggtatggtttattaggatttcaaatgagcaaagccaagtgcactcttgcattactcaaacttggtctggttgaatttggtttgggctcaagtattgctgtgagctccacctgtccattcaagcttggtttatttatgttcatttgaatgtaaggttgcccatgagcctaattgttcctgtcaattaagctcaagttcaatttccttgtaggtcccaacaaaagcaagttttgtgtttgaaggggaatgcttaatttaaaaataatatattttgaatctttgatgcattgcaagaatacagcacaagaacttcattaggagcgtttaaacccaatgccttcacattacaatacaattatgcaagcaagcacattgggcctgttcataaatctaactggtcatgcttaagttgtctcggcttgtttattaaagaagctaaaatattaatcaacaagcacagcagctgaaaaccacagcaaagaagctatatgcatgaacagtttggtgcattcatttgcagtccttgtccaacaacagattcaaacttcatataaaagttacttgttattcatttattcttgttggaagctggttctcatacttcttttttctttctcttttgcctttttttttcattttctatcccaattacatttgatttgtactccatgattgatgcaatgtgatttaaagtagttgagatgcatattagtgatagaaagcatacctttgttgcttagtttattctagttgtgccttctgttggctggtggtgcgctttcttttgcccatgctcaattggaatgtgtaaggaaaaataattgatatggaagccatagttgaactctgtttaagcagagaactagaaattttattatctggcaatctattagcatgcattcaaatacattgagctaagttagtaaagagcacaaagtctttatcatatgtgctgatgatctagttaaagaggcgttattcagttggaggggtttttttgtggggaaaaaaaggaaaaagatttggaattccattccgttgtgtattttttggacggtatggaaggagaggaatagattagctattaggggaggttctttagatatacaaaaactcaaaaattcttttgtatgtaccttgtggagttgtgctagggtgtatattggagaggagtcctcttcgctcttaggctttttggagtggctagcggccacttaagggtgggtgagggtgctggttttttgtgttcttgttttaggctgatttgtatactccctgtatgctttatggcctttgccctttaatatatttgtgattatctatcaaaaaaaaaaaatgtgctgatgatccagtatcagatgtaactgaaatgatcaataatatgtgagagaaatgactcaaaactttttttgataagtaagagaatgtattaaaagtgcagttaatggacgagagtacgctagacgtatacaatgagcatcaagaggcaaaataaaaaattatttcctctctcaacaagaacccaaccaatctacaaaatcaattaaagacatagtgcttcatctatgtgcatatgaatccataaagatagattgttagggaaagagcttctgagtctttgaactaacgtctcctcatcttcaaacactcttcaatctctttccttctaaatagtccaaaacatacataaaggagtggctctccaagccatctttcaccttctaccgactaaggaaccatgtcaccctaggagagtgtcccttatcaaggcagaaataacccaagggataccaaataaagtgaacactagcagcaataaaatcctaaccttagcacaatgaaaaagaatgtgatcaatggactctatctcctctttgcacaaagcacacctattgactaacgaccaacctcttctttgaagctgctccaaagttaacaccttaccccaatgagcctcttaggtgaaaaagctcactttagaaggaatccatgagttccaaataatccctataggaaaagggatgacacaatctggttctgaaagagagtaaagggcttttacagaaaaccttccttcaccatctcccttccaaactactctatcgtcctcctcattcattgattgtccttggagtttaaacaagaaacactccacaatgtccaactcttagtcattttgattccttgcaaaatggaagttgcaatctcctccttcctccctttgctcccataaatttgcttccctagcctctatcgattcggttaaagcaaaaacaaggaagggaaaatcttacttaaatgctcctcattacaccattatctttccaaaatttcactctgctcccatcacccactgcataggaaactcccgtgttaaagaaatcccactccttatagctttccataatctgaccccataagagtctctcaccttatgtgaccgctacctccttcctccctttgctcccataaatttgcttccctagcctctatcgattcggttaaagcaaaaacaaggaggggaaaatcttacttaaatgctcctcattacaccattatctttccaaaatttcactctgctcccatcacccactgcataggaaactcccgtgttaaagaaatcccactccttatagccttccataatctgaccccataagagtctctcaccttatgtgaccgctacccccttctttctccccgtatttcccccttatgaccttctgccaaagtgtttccccttcactcgaataatgccaacaccatttgcaagaagagcattgctatgaacactgcagctaagaaaggaaggatacttgatgcgtcaacttttcttgctaggaactcagtctgacttattttattttattttggtctcatcccttttagtttcttttttattttttcatttttcttaacttttcctttgtttctgaatgcatattaccatgtgactctgattactttcattgcattacatattttttttttctgaagg

SEQ ID NO: 10338 - DNA, 1509 bp, Vitis vinifera
  Intron number 1 from transcript GSVIVT01024176001 (locus G SVIVG01024176001) derived from phytozome v7.0 (chr-ID chr3 ; pos 586307 to 587815 reverse strand)
ctcagtttcttgaccaggaagcaacctcgagactggtaaaaaaaatgctctttcggcttttcctaaatattcattgcttttttggggattagtgtatgatattattctttaatctaggtttctaaaaggctaaatcgttggatagtggtaataataagctcaaaaatctgtatttctgatttctactactgattttttttcaaagcagaagaaattgatgttgatttttactcggattttcctgagaaaatggaggtagatttgtagggctgtttggtagtggaaatgattttttttttttcattttatatatatatatatatatatattttttgcgttgttcatggggcatttcagttgattatgttagagggttttgtgattgaatttgatcagtttccaattctttgaattttatttttgattttagttttttactttctattgataaatccaatgctctcctgatatttatgttttcttgaagcctttttgtgtaactgtctcatagcaaagtttggtggctaagtagctgagtagtctttgtaaactattcttgaaaacaatttttggattgtttcttttcaaagttgtttttagaataaaacttaggtattttttagacgttttttttagaataatttgaaaagttttgtattatatgaaaatgcatactataagaataaattgataaaattgtttttcatatttgagttttcaaatagaatttaattataaatttttttaaaaattacaaactcttcacaaattctattgttgaaaacattattaaacagaaattatatgtgatatgtcacaacagataaggaaggaagaaagtttttgatgttatataagtatgaacttattttaaaggtgtaaagacttttgggttcagacaatatctatacagttgagtgtgagtcgttacaaatggaatcatagtcgatccccgaccctggtgtggggatttgtttggtctcgtaagaaatgttcgtctatttggccctacaatcctatgggatataacgaagacgttgtgtttgtaatataccacatcggatatgggaaaaagtttctaatataagtatgaactccgtttaatcatgtaaacacgttttaaaaccatgatagtttttttagatccaaatgggataatatctacacgattgagtgcaggtcattatagcttaagctgaaactggttaattttgcatcttcaatcctatataaggatttaaggtaaatgggaaaaccatgttgggtatggttgcttactttagttttttgctaggttgtttactatatcctgaaaattagttattcttgtttgtgttgagttattatataaagattaaataatttgaaaatatatgagctttaaaacataaaaatcatttttcttagttttttttccctatatcgaaacataggattaaagtcatctggttcttctcctggtaattgcatactctaggagggtgaagagacagaccctttgtctacaga

SEQ ID NO: 10339 - DNA, 4426 bp, Vitis vinifera
  Intron number 1 from transcript GSVIVT01031245001 (locus G SVIVG01031245001) derived from phytozome v7.0 (chr-ID chr1 4; pos 856432 to 860857)
gtattagactcaagtaattgttttaaaacttgttttaatttaagactaaattattattattattatataattattaaatatatttttattttaaatttataactataaaaaaatatttagtgtataaaaaacactttaaaacctttagatatatatatactaaaatactaaaatataagtgatctgcatcccaacctcattgtattattatccccaaaataaataaatgatttctcgtacttgtccagttgtccctacccacttatttttactttaattttttttaattatattaaaaataattataattttataattcttttttaagaaatgagtatttgttatgaaatatagggtttgttagaagaatctattagaaatttagaatagatgaacgtctattctctaatatttcttaacttttattgttaacactttctataaaaaagggttctagtaacatctatatttaaagactcctatgtgataagatagatggattgtcctaacttgactaattataaatcacatcatgaaaatgtatacgattgtgccataacacatacacttctttgagataaaaagtatttcttgaactttacatttccactacccaatgttaacacaatattaggttttgtaaacctaattcaacactttaaaaagaattattattattttatccggtggaaccacacttaatattgatgatgcattatattctgctaaatccaagagaaatttgcttaattttaaagatatttgttcaaatggatatcatattgagactataaataaagataacatcgagtgtctctgtattacttcaattgtttttggaaaaaaacatttattaaagaagttttttttcttgtggattgtattacacaaccattaaacctattgaataatatgttgtaataaaccaaaagttccataacccaaatacttttatgctttggcacgagcaacttggtcacccagggtaaaatctatgatgtgttgcatcatcaataacctcatgggtactctttaaagaattagaagattattgtgtctaatgaatataattgtattgtttgctcacgagataaattgattattaaaccatcttttgctaaaatcatctcagaatctctaacctttttagaaagaattcatagggatatatgtagcctcattcatcctttttatagactattttagttttgtttagttttgatagatgccttcactaagtgattatatgcttgctttctttttactcgtaatgtcgcttttataatatatttaagagaacaatttttagattaccctattaagaaaatttgttttgataatgtgggtgaattttcatctcatgcttgtattgacttctatatgtcaactgaaagatatcaaacatcatgttactcattttcatactcaaaatggtttggctaaatctcttattatgttatactccatgctgcaggtttaattcatttttttaccttttacttgtcatgagtatttatctttacaactagtacttggtcaacaacataatgttttttacttgagaattttttgttgtgctacccatatccctattgttccttctcaaaggattaagatgggtcatcaaaggcctcttaggatttaagttggttttgattctccatcatttaatatttggaaccccaaacaagtgatgtttttataatatattttgttgattgccattttgataaaacaattttcccattgttaaaggaggaagtcaattctagaagaacaacatgaaaataataaaattacttggaatgcattggttttgtctcaccttgactctcagacaaattaatgtaaactagaagttcaaaaggttattcactggtaaggaatcacaaattaattgccagatgcattcattgatgcaaagaaagtgacaaaatcatgtatattagttgcaaatactccaatacagatttatatccttataagacacttaactgatatcatgacaaatgaatctaagatatatctaaaacgtggtagacctattgactcaaatgatatagttcattagaaagtaaaaacacaaagaaaagcatatgagaatgttaacactcttataaaagctcaatccaaaaataggctattaaatttggtttattagtccaagttaataatcaaatagcccttgaaagatgctcaaagtatacaattagcccatgaaaaggcacaaatatcacaaaaataatgatatctctaatagttatctacatgcaagagaaaaatgagatcaaaatacacattgtaggcaatatattttatttccaaatgaatatggacatcataagaaatgacgagaatcttgaaccaaaaactgtaattgaatgttgacattgaaatgattggtctaaatggaaaaaaaatcatttaaatagaactaaactcattaacaaaatgagaagtatttaaaccaatagtccaaacgcttgaagacgtaaaacttgttgggtataaataagtttttatatgaaaacacaatgagaaaaatgaaaccattaagatataaagcatgattagtaacacaagatttctctcagagacatggtattaactatacggaaacatactctcctatcatagatgcaattacatttcgatttttaattggtttgaaagtttaagaaaaactaaatacgtgtctcatggatgtcattatgacatatttatatggatccatatataatgatatatacatgaaaattcatgaaggatttagattacttgaatcgattaatataaatccttgtagcatgtactcaatcaaattacaataatcatgatatggattaaagcaattcagatgcatgtgttacaatcaccttaacaaatatatattttttttaaataagggcatgtgaataaccctatgtgcaaatgcattttcattagaagattaaatataggatttgcaattattgcagtatatgttgataatttgaatctcatgggaacttctaaataactcacaaaactaccaattattcgaagagaaaatttgaaatgaaagatgtgaagaaaacaaaattttgtcttgacttgcagatcatatggttttcaaatggaatgttagttcatcaatcaatgtttatatatataagtcttgaagcactttcatatggatagattgcatccactaaattctctaatgctagttcgctcactataagttaaaaaaaaaaaaaaaaaaaatctttgtcaccttaaaaaaaatgatgaagaataacaaatatatatttagtcaagaagtatcttattttagtattattggtgcactcatgtaccttacaaattatacacgatcaaatataacattttctttcaacttacatgatatggttgcacaccaactcgaagacattgaaatgagatcaaacacatactacgatatctttatggaataactgacatatatttatcttattaaaaaatatctatttattagttgcttagttattcggttgttcgctatcttttggatcctcaaaaagctcgatcttatatagggtatgtatttacccatgtgtagacccccctccccccgaggagttgagagtttttttatgattatttttttgctgtttttctgactcctctgaagtgggctgctctcgggcgacagatgggacgggtggcaggaagcaagcagtgacttgttgaggaagactcaaaacagaaaaaaaaaaaaaaaaaaaaaaaaaaaaaaaacaagagatatctaggggggcttttgcattaggggggtcacggaggagggagcttgccggttccatttgatcttagaggagaacttactagagaaggagataataggaaaacgggcagctgcaggcgattttgaggtgagtctcttgcttactttgattcatattcatctcatctccttctcgtttcggtttgcttcgcattactcattagtttgggttggataatatattgaatctcgttgtttttctggattattctcttgttattgttgttgatctcgttgttatccttatggtttggcgtcccatgtgtacgtgattatcacgcatgcactcgagaccatcgttcacactcccattaccataccatacccacagttcaccatcaccgttcccacccgtgtcatccttgcccacgtatacccatttcccgtgccatgcatgccaccacatttcctctctctttttctctttctctttcccttcctctttctcctcctctccatgcatatcttctctagcgccgtcggcacagcaaggtcgacgccaatccgaagcggcatgcagtggttcctgctctcaccatctcaaccacctccgctctcatagtcttcgtcccctccggcgccttcatcggcggcgcgtggttcagtgaccaactccag

SEQ ID NO: 10340 - DNA, 8717 bp, Vitis vinifera
  Intron number 1 from transcript GSVIVT01015412001 (locus G SVIVG01015412001) derived from phytozome v7.0 (chr-ID chr1 1; pos 3385649 to 3394365 reverse strand)
ttaattcataatctcaatcattgtcacctaatccttatactttcctagaagcattgtccaaaacaagaggtcccggataaattccaagggccgctttgaaagtaaaaaagtaaacaaagaagtttaattttaagggtgaaagagatggaggagaatcaataaaagttttgaagaaacagggaagatattaagattttgatttaattaagaaagtgagatgaagaataattgaaagttgcatttaactataagttcaaatcaaaagcaatgaaaaaaaaaattcacgtttatcgaatcatgataatttcttactcttagctagctcgcttttattagattaattatataatttgatttaacatcactttatattttggtaccgaaccattataccacttctcaaaaattctaaaaaactcgatcaaattcatcacatttgaggagttattttaagggttttgagtgtgagcatatcaaactttataagatttggaaaaggacattgaagactatcctctccatgattccatgattaattcttaaattaaaaatgtaagcatagtttaatgttttggttagattgcctgcctagttaaagaaataggaagaatccaattgtggggcatgagaactttggcaagtccggatgcatgccacttagtttttacaagctccggataatttattatagcgagaaacttttgcaattaccaaagaaataggaggaacaaattcttcagctttttgggggtgacagaaccagacactagcctttttttgctaatctacacagaaatcatttcataaaaaatggctaacaccctagaacatgacgcgtcttcgccagattgggtaaaggatgatcctatgaacatggattgatttgattgatttatgacattttggaaaaagggtagaatcaattgaaaaaaggggtggaaataattgttatgttttatacccactactagaaagagaggatgatcatcatataacgtgaaggtattggcttttgcaatgtggcctttttctcccagccaaacaaaattagaagtgttcaaataagagtccgtttgtcttcactaactagctatcaaataagacctccctcagttggtcaagactcatggagggtggctaccaactacgtcataaaatttggtggtgtgtaacacatcaaaacgtgttctttgcaagtttgaaacgcaatcgcctgtgtggagtgaaattaattataggcaccttttctgattatttcagcagcctcaatcattacttgtttgtataaactagtggggaggaggcccaaagaatagaggaaaaggagaaaattttactgagtgcggaggatgtgctgcaggccattatcatccttagtttccaggagagttctcagaagacgcattcatttctgaagaaaaaccctgtaggaaaacgctttttgttcaaaattggaggatgatcaggcccctccactataagatcattggtaatggaaacaaaccagactcgaatcatttttcaatgaaaatcaaatccaggaaaaacagttctttattcccaatgggtcgttcgatttatattctttgatcaaaagtttgtttcctttctccacagggcggattctgtttatcttaacagtccctcagtactaatcaaagtcaacctctttctgagctgcgtgctattccacacaagccctcctgtagaggaaaaagaaaatgtaacaaaattattaatgggagtcaaattatggttacccaaatgagaaaaaaaaaaaaaaaaagtgttacgggacttccaagtgggaacctacttggcctccattaattaccaactagacatggatatatacttgacaatgaagaagtctagccaccacaccgaaaagcagtttgcatgcagattttgagttgagttcatacaaaggttatatgaccttacagagctgacctttggtacatgggagagtcgatgttcaaaatagtgggagtttctgcaggttccacgagaaatagaaaagaaggtagtactgtagattttttagatttttaggaagacccacgtcagattccatggtttttaattggaatttacatgtggttcaaatttttcgcgggcccttagttggagagatgatcatgcccaaagggttcatgatcacttcaccacctacaagtgaaagcgccactactacagtaattgatgagaaagtttgttggaccttcctagttgaacaccaattatggccttagattaagttcagtaacttcttttcgaagaggagtgtaactgggacaggtgatgcctgagggtaggaatgaaaaatgaaacagaagatcaacagtggtggcacttgagagtgctttttccctacaacgaaacacctttagggcatcaactctgccttcacttaagaacagaaaaggttccacttattgggtttttaagtctttaattattaatgcctccaccagcggtcagtgtcgattgtcttattttactcaccagcagtcattgttgatagtcttattttatatggaaaatggagatgagatgttcctgatgatagaagtggaaggaggtgtaacacccatagactaagggtccactccctaccatactaccatttatatatatatatatatatatatatatatatatatatatatttgtcatgtctcaagttgttaccgcagtccccttttctctccctgataaatctgatatcatttataatgatttacgtgtaatcgtataaatattatctattttaaattcaaaaaacttttacaatttttaaaataggtttacaagattatgaaaagtttatatatgtatagcgttataaacttttttttttccttttcaatgtgagacatatattacctatgttgtaatatgacaaacgtgaacaaaatgtactaatgaataagtctaatttggaaaaaaaaaaaatcagacaacgatcaaatttggtaatctatcatgaaaaatcattcatttatggataattcttttaccaatagttccaaatatcattaaggtccatccaatggatggatgtgtggattcaattacccgtattttcatatttttccaatatttttatcattaattgctaattcgacccatacaaaatcaagtacctttgagtgggcttgggtatggatcctccaaaccacattgtggggcctaaaaccaaaactgtcccaaggattttgacaaaaatacaataattttagaaattattttttgaaatatgaaagtttaagcgtctatcacatgaaaagataatgtcagttaaatttttgaactttttttttaaaaagataactttaatatttaaattaaagttgtttgtccaaaaaataactttttattggtgccttagaaaatgatggacttaaaaaataattttggaactatcatatttaaaaaataaaaataaaagaaatgtatatttttcaaaatcccaattgtctcccccttgaaatgtttcatatatcatccaattaatgaaaagagattctcaatccaaattttcatattttttctcctaattaagggtgaatttgtgttgcttaatctgccctaattccaatcaaacccaatttttggtgtggctttccaatcatgtttaatagttaaattcattttttacaacttaattttgcattagattcgagtcaaggttcaaataactaagttaactcgaactcaatataatgttttttataatgtttataatttatattaccttatgtcataatattcattttatatattttaaaatttttaaataaaaattccaaattataataatattatatattatttcatttttctagaaagttagatatatttttttattatctagaaatttgtctcatttgctatataaattttggtaaaagtacatagaaaaaaaaaattaaaatatcaaactattattggcaagttcaatcaaccatatgatttgagtgacttagtcaaaatctgaatttgagtttagcttgaccgatcttaacttatgtaactcaattaacctcacaagctcaagtttcacaaccaaaatttgatcaacataaacttaattaactcaagtctaatccaatcaatttgaacctaacctaactttgtgaaaactaattggatttaggtagaacatctctatctgatttaggtttaagttgagtattccacaattcaagttaggtttgactttattacagacttaatccaatcatttatgctgctaacttattcttaaacccataattgaagcttggacctaggcctaatatccactcagattatctagccatgagctcgaccttctcaagttataaacccacacccattataagtggcaaatcaggagtagatctcccatgactaaaagtcgaagtcgaagacaaacacacaactccaaaatatcaatcattatacataaaaaaaattctacaaatctcatatgatttatgataatattacataaattaccttacttttctggtttacttgacctttgtgaatgaaaaattgaaatgctgattataataaaagagaaccactttgatttgaatttttccatttttttttctttcttttctttctccttccttcctcatctttgctttatatactttaaagtaaaagctcaacccctcttgacaaataaacattaaattaatgaataacatgcaatcacatgtgtaaaaactaattaatttattttcaagaatcttgatttgatcatgtggagacatggtacttccatttttatactattgaattgaatgaaaaatcaaagattagccatcgaattcatagtccaattaattcaagttacttttcaaacatgacaatatttgtcaaacatgacaggttcattgtctactacttgtaagactcccctgggacaagttgcttcttagatatttgaccaagttacttcccatgtgatcacagtctcctgacatgatgtgttaacttccacagaaccagccgactagaccacagaaaaatacatcttggagttttccatttgttcacagaaggcctaaaagatatgattgcccacggttcagagtgaaacatgggctcaagaaaagcccatatgcattcatcttggccttgggctaggccaactcaagcaacaggcccaacaatggtttctcatccaatttgtaaaaggattttattcaaaattatttgggctcaaaatttccttataaatacctcatttccatcccacatccgaaatttacttgaaattctacttttgctttcatattgttccaaattgttgttgtattttctctcaaaattttataatttgttgaagttgcaaattaacaacaaatcattttttaatatttaagtcaaactcaattttttaaaaaattttataacttatattattttacataataatatttattttatatgacttttaattttgaataaaagtatcaaattttaattacattatatattattttattttctagatagtcagataatttatttttatcatctagaaatttatcacaattaccatataaatttcggcaaaagtatatagaaaaaaaaagtaaaataaaaactatttctcacaagtttaatccaaatatataatttaactcttataatttgatcaacttagtcaaaattgagtttccatctaatttgactaacaatattaatctatataacttaatcaactccgctaactcaagtttgacaatcaaaatataaccgacttaaacttgaccaacttgagtttaatccaaccaactcgaacctataagcttgtcaaaacaaagttgagttggattaggtttaaattaagtattcctcaagcaaagcccatttacattcatctgggccttggggtggaccaactcacgtaacaggcccaaggtttggtaagactcaatgacttaaatgaattaagttcacttttaacttaaattatacttaagttgtcgacgacttattacttaattctttttttaagtattaaggttgtttgataaaattaacttaaaatttattttaaatcatcaaattaatatatttatctttataaattataatttgggtaaaaaaaatcgagtaataatagaagtcattgagtaacataggagatcatgaaggtgattatgataaatgatgataaaaaagtaaaataaaaatatgaatttaagttagttaattattttatttattacttaaaattattttttatttaaattaaattattaagtcactttaagttattaagttggtttatcaaataattattaattataaatattttgttaaaaataattttcagaacaagtataaaatattatataaaatataaaaataaattaatatattttgagtagataggaatggagggagcagagtagggtgaatccaaatagttagcatgtgacatacgtgtgatgtcgatgtcttttgtaagcagaaattcacgggaggtaatcttggatatactattctataattttagagtaaggaatcaccagtctgttttattggctttctcccccctgccattactgtctttcctcttgtttgctccctacctaataattttcccatttcacactgctatttcccatctgccaaacacttcctctaagaaaattaattgggccaggacggaagtgcttgcgggtgttactcatccatttctaatttatacatataatattactttttattatttttaattttgagttaacatctcactttgtcatgatcaaatttataattaaatttaaggggtgttgggtaatattcaatacttattaattaataatttaaattgattttaagttaaaaaaattttaagttgtttatttaaaatttattatttaattattactttaagcattaaagttacttaataaaattattttaaattatctattatggaaataatgaggataaaaaatgataaaaatgtaaaatgaagatatgaatttaaaaataaattaattgttttcacttattacttgaaaatgttttttgactttaagtcatatcattaattttttttatcaaatacttaatttacttcctaacttaaattaagttattaaattactttaagtcattaagttacacccatttacatttcttatgagtaccgagaattttggtttaaataatgcaagttatgacaataaaaataagttactatattaaatattaattaaatgtgaatttatttttcattttctatttttataataaaaaataattattatttttatatatgatataagaattcttataaacttaaaaactggtaattttaaaaacaatttaaaatttaagatgtcaaaatacgtaaaacaaatttatattttttgtacaaaatattttacttttagggaaaagtaagttatgacttgataatttgaaaatatatatatatatatatatatatatatatatataaaactttaaattttataaatcaactttatcaatttttatgcactttttcatgagtcaataattatcttctaaaatgaccatttttatttactatgtcaataacaccaattaaagaatggataacttttttattaaaaaaaattcctttagaaaaacaaacatccttaggaatattgaatactaataaataagaaatttttaaaaattaaaactaaaatactttaaaattaaatacaattaaaataaaaaatttaaaaataaagtaaaatattgacttctaatgtatttctctttttcaatatctttaattctttatttttagctagtactttacgagcaaagtgaaagtcaatattttatttttatatttttaggctttaagtttttaaatttattttattttattattgatgtcaataaaaaaaattattcaattttattaaaaaagataagaagatgaagagatttatataatataaaatataaaatcattattaactaaataagtagaaaaaaaatcttatttatcacttgagaatatataataaaaatttataatatatttatttataaaatatatttattaacttaacttgttaaattggttttttgataaattttatttaatattatcacaggaaaatgattatcgaatttatgaaaaagtgtatgtattttaaaatatttttaatttgatgataataaaatcgatttataaaatttaagattgttttttctatatatttttaaattagtgggccaaacccactttctccttagttttatataaaagttttttatttttaaaaaataggaaatgtatctaaaatggacactaacaaattttatggattagcaattgtaattaacatttcaattttgttgatttttaatatgctcaatcttttcaagtagattattttagtttgttagaattaagtaaaaaaattatggaatgtgtaattcaaaatttctaagagagaagttggagcgtgctttccacgtgacatatgcagagcgtgaataactgtgcgaagtgcatgaaattctcttcccagccaaacaaatgctggtaactaacgctttccactatgccctccaaatacccctatatatatatatatatataggtttcaaaccaagtttcttgcttgtccaacgcttttgaaaggcggtagtttgcagaaatgggtgtagactcaaagagagtagaagcagattcttcagctgtt

SEQ ID NO: 10341 - DNA, 4216 bp, Vitis vinifera
  Intron number 1 from transcript GSVIVT01026052001 (locus G SVIVG01026052001) derived from phytozome v7.0 (chr-ID chr1 8; pos 25267984 to 25272199 reverse strand)
aagtaagtgattttcagagcaaacatattggcgataagatgcacttaaggaattcttgagctttggaggcagttgtggtggttctatttagcataaaacaatgtattgtcaagaataacatgagtatttacttggcttatgttttcaaaatctgaagatgtgaatggatctactattcttagagttctagttgctatgacgcattttgatcatttggcatcaaaattcttgaaaaacaaccagcaggtccatgacaatgtgcaatttgttgaagtctaaatgaaaatgaaggtgaatatgtggctaccaataaggaaaagccaccttcgatgcacagtatcaggcagtccattcctctatttcctacttctgcatggcttttattgccacttttttgtgtgccactttcaagcacctcttttcaaatgcagttccttggttttgtggaatggtgcctaagttggaaatgagtaccgagaatcaattcagacattgagaaagcttctttccatccatccccacatgcatgttacctgtcacactttaaattttgggcaacccaaaactcgactcgtgaccccaagtcaagggtttggccctaagggttactcctattcacgttggcaatcaatcaaaacacccttaattttttttttctttttcagtaaagcgtataatcctaaataaatttattaagctaaaatttactgtaacatattattttacttttccaaaaccaaccatcacactatctcctattcacatgtataataaatccaccagtcatcttcctacccaaaagttcaaatatttacaataatctctaagtcaaaaaaaatattttcaaaaatgttttacaaattaacaaaatataatttaacttacaaaagtccatagtacatgtcaaaaaggtaatatacatttaaaaataaccattattatggttcttttgctttccgaaacacttcttgatcttcctatggttcctcaaaaactatatctgcatctaaaaattttagaaaataaaggagtaagcatttccacgttgctcagtagggtgttttacacccaaatgagttagaaattatagattaataaaacacaaccatgtgccaaaatataatattatctttactttatacacactaaaagaaactccaaccatactaatttaaaccaatcaaaattatcattttccttattcaatcatatgtctagcatatcgacaattataaatttacaaaacaaacaagtcattttagtcttgaataatatattcaaatatacccttgataaataatacaaatcctttttccaaatgcaaccataatgcaaatgcttacacgcaatcatacaatgcactgttgttctcgggttttcatcaaagaatatgcatccgtagccaaatacactatccatttggagtcttcctagagtaaacttgtgggtctttcaccctatggatctcactccctccttaattcgccctctctagggttatttcatttcttatttttcttttattttcatttttgccctcttcggggtcttttcattctcatttccatttcacacaaccatttctttacttttttttctttttcttcacacaaccatgatgcatatgaagtgcaatcacatcatatttcaacatccatgattttctaagacataattctacttaccctcattatgtttcataatttccaataatccacacaatgatttttcttcactttaatcaccacaaacattgacgaaaattcacaattaattgtatagtatcaaaacatagttttaaaccttagccatataaattctatttattcctgacatacttaataatttctaacaactaatataacaattttttttcttcaattaaataaccacatatatccaagaaaattcccactaatacaaatatcaacaaaaacgtaatttatgtcataatttatttatctccaataatcttaatgaaattaacacccaatacaacaattttccacaattacgccaccacaacatttgagaaatattttcccaataattcaaatattaacaaaaactcaatttatatcatcaatttatttatttataataatatgaataattttaaacatatctcaatactcaaaattttcaacaattaatttccattattttcaacactaatatattactaataaatttatataatttctaacataacaacaatcataaaaatatattaaccaatattccaataaaaagaattttcataaccacaacaatccaataaatcctatcacgggaacaacaattaaataccaataattctaatatttttatcttacattaaactttcattcacttcccatttaacattttcaaagcaaaactaaatcattttacacgtctagggtttcgaaaaacaacctaaatgaaaactatatgacaatctactacaacccaacagctcaacaatttccatgtagttttttgaaagtaaataaaagcaaaacaagaagcccaaaaaaagtcaagagagaaatttagggaaaaaaaaattcacccctacttgtacagtaaaatccaaccatgggatcgaaaatctgactctttagaagtgttcaccacgttgaagactatcaccttctgaaatttcattatgattggaggtcatttcaccgtcggatcgacggaaacacacaacagagaatctcttctacatctcccctacgcatcatccacctttctttctttcttttcctctttttttgcctcccgcacccaacaatccacttttacatatgttagctcaagggttcttctaatcacgttttgatgataacaaatcatggttaagttactaattggtttgaattataaataatttcaggtgttaatttagaaattcatcaaagaacctaatagatacaagatcaagacctttggaagacctttaataataagaaacatatgtaaaatgaatgcattggtgcacttaggatttacatatcatttcatgcatatttgaaaaacttggtttattctttaaagttacagttccattaaaactcaagttttatcaaatgaaccttaggcaaatctcttcaaaaatgacatattaatttaacaaatatatatatatatatatatatatatatatatatatatatatatatatatatattaaacaaatttgaaaatgccacacacgtcctttcttttaatagtaaattaaactaccattatttatttcatatttcacaattataaattacactcaacttataattttccgtctcacgaaaaatactaccgcatttgtaattaaatttactacaagcctgctcttgaaaaaaatataatttaactttagttactcgaagcatttttaatctgaaattcacttaaaacatgatataattagctattaacaaaatttaatttcataaaatattataaatataaaataaaaaaaattcggtaaccagaagttgaaatttgtaataacccgttaattttactaatatttatttaccaacaaaaatttaagtaatattctaaaacttaattccataaattaattagtcattcaatttataaaaatcaaattctgaaccctttggtataacttttatttaatttacttcatttgtcaaattatttaatcgcatcaaaatttcaaaagttaaattcataaaattcacatataattaatttaccccttttgtatatcttttttaaattcacatatcataatttaatcttaatttaatttcaattcaacttcgtttaatgttttgtaattctgtaaagtttaattccaattataagaattaaattgattcattataaaattagattcaatttctttttaattatccattataaaaatttgatataatataaatttttatcaagttttttttactatgattttctgataattatccaataataattaaattaattctcgtaacatacttaatattcaaattttcaaaacctaatcttaattatttgatggttaattgtttctccaaatcaaaatttaatttctgaaattctcactccttacatttgatgtggcaaatttttcaaactattgacttttgaccaactttttccaaaatctctctctaccactcttttttaccatttgacctacaattttatgaaaaattttatactctgaaaatccgatgtgtccttaaaaacctaggtggtc

SEQ ID NO: 10342 - DNA, 7677 bp, Vitis vinifera
  Intron number 8 from transcript GSVIVT01012274001 (locus G SVIVG01012274001) derived from phytozome v7.0 (chr-ID chr3 ; pos 12910059 to 12917735 reverse strand)
gtttgtctcgattattgaagagaatattcacaagaagatcagaaggtgtaaaaggagtacttgtcggcaaggagcaagaagaaactgactcattacgctcccattttattatgtgttgcatgttacatgacttttacattcttatgtcaacaaataatctatattgtcattatacaagtgtaatattgtttataaagttaaaataatgtcttgtttcctttttattattattttttggttttgtgataatgcaatattcattcatttagtatttttccaatcaatatggtaacttaaaattcaaaaagcaattgtcatatcttagaaaccatacactaatgaataaatattaaagacttaagaggcatttggatacatttccatttttttataaaaacaagcggtaacattgtatgtatgactttagttgtccttgatcactttttaaatgacaattagtcttctcaccaatagggatccaaatgagtgagaccctaggatcaaccgacaaataacaaatcattcaattcttccaattgacatggttccaatcgatcaattttttgtttccaccttccaatccccatgtaaggcaaatgtaaggagtatcttttttatcacgctaacactcaaatgtgataatccatgtgaaagaaatgttgatctttcttgtatacctagtcatgaactcttctttctttttctttgatcgaatcccttgattccttcttttaaaaagagttgtcctatacccttctttaaacaactgtttagtatttgcatttcatcccattttatttaagaaccttaattaagaaaagaaaaataatttttttatattaaaatatgtttagaatagattattttcaattagtatttgtttttatcaacattttcagaaccaaaaaagttatcggtttactggtcggatcggcggccgaactggtaatgtcataaatatatattttatatattattaaaattataaaaaatttaaaaataaaagtaataaattctacctaatttttttttatcaaagtgtaaacaaaaataataattttaattaccattcatcaataaaaaaaaaaatgtcatcaaccatcatattagtttaaagaatcaagtcatcaacaattttaaaaattaaaaaaaaaaattaaagaatttgaaattaattttgaaataaaaaatttatttaaaatataaaaattagaaattttaaaattatttaaaaatgggaacacaatgtttgatttattgattgtttccaaaaatttattttaatttctaatgcttttaataattttattaattttttttaaactcaaatagatattttagaaatcaaaataaaattaaaataaactaataaagtaaacaaatatacaaaatctaaacaaaacgattcaattattcaaatggaatttcaatgaatattgagattcaaactcaatcagccaacacagaataaaattataaaatattaaatattaaaaaaaattgcaagattccaaatgggggaagagttagaaaagggtttatatactgatcaaaacaacgttgtttcaatcccagatgcatcaaaatgatgtcgttttaatgggaaaaaaaattgtgaattgatatgttcaactcttggctggttcaaatgatcgaatcaaaccgaaacgatgattgattgacgatcaaactgaccaattcggtctgatttttaaaaccatgatttttattaggcatgtatgggagccaatttgttcatggcccaattttgggctatagcaagatagaatcaatacgaccaaagggtcgaagctagcttaacttaaagtccatgagtaaaggcctaagctcaattggcatttctttggaaatcattttttcaaccccatccttaattcaaaggtgtttgttcattattgaaaaaaaaaacagaagattaattgggaccaattgtttcatggtttgcatttgatatcttttaatttgaaaagaaattgaatgtctaatgttagccccatattattagtgatgtatgccaaatatttaaatcaattttatacttgttatagatatttagagaacgaacataactaaattatatgatttaatatttttcaattaagttagattttaataaataaggatgtagatacactccatgcacaaaatcaatagataaaaaggagaagaggtaaactataaaaggtatttgagagctataattttaaatattttttttaaaataataataataacctagcttaatttgttaagaagatgggtttggatttaaatttttgaatatttggtcaaaataactcaagttgaaaatggatccatgattaatgattgaagaagataattaatttataatattataaaaaggattgaaaaacaagaaattaatttggtgcatggaatttgaaaaatcagttaatgaaaaggtttgtcattatattatgcaaaggaaattgcacccattttaattggtaaataactctatttttctaagctagaaaaatatttatgatatagtggtgaaataaaaaatattaaaatctttattattctcattaggaggtgtgggatgacaatttcaatcaagaaccttttaaatttaaaaaaaaaaaaatttatatgtcattacgaagtaatataagtatttcttgaaaatgaaaattaatgatttaaaaaattaaaattaaataccaaaactcattttaataaataaccattttgttttatcatgacgtctaattcttctttcaatatatgtgatatatatatatatatatatatatatgtatgtaaatatcaaattaaaataaaaggaaattatatttctattgtaatcttttaaaacaaatagtaaagttgggtatgaaagttaagggaaaataaacactgaaaaaggtgtagacccaactttatgacacttggtgtaattacaaaacaacttagttttaattttatttttttttgtaaaataaacttcaaatttatagaattcgtaatcttgttgtctttgcctaggaaacaaaataaaaaaaaattacatatattctttattctaaaaaatatcttagaagagtgtatttatactctatctctttttaatataaatttgttgttattttcttagcatttaatttcataaatcaaaatttgtgcatacaaattttattaatatttgtcaataaaataaataaatttatgattgataagtttgttgacattttttttgtttttgtttttttttcttctcttttatccttcacaaattaaaaaatgaaaattttgaaaagttatgaatctttaaataatttgaataattacattttaaagttcaaccaaataattgatattaaatttctttttgttcatttttaatctttttgtatgttctttgattcaaaggggtaatctttttttggggtaaaagatgctttaggaagaaaatatctttgctgtgttgcaaatttttaattagttttattgctttcttgattcgtagaggtcaaactcaagtgacatatctcatcaagttattttttgaaaactacactttacgtaatcagttggaaaagattagggcctgtttgtttagtgtttttaagaactgttttctgttcttgaaaacaaaaaacaccaaaaactcgtttggttgagagagtgatttttgtttttgttgtttcccgtgttctcaaaatgacactgtttagagaacaacaaaatcttgttttccccctttttttactgttcacagaacaaaattaaacaaaaaaaaacaatctgtttcccgtgttttttttttttttcttcccgttttcatctcttctccagcacagtggctcgcctcttcttgtttctcagttttgattcaaggttcgtgaaatttaaatccaatcgcacaatagcaaagagacccctaaaacggatccagaaaacgcagggagcaaaagaaaatccatttttttggttttccttggggtttttgcttggattttctcggaaatcaaacgaggatgaattttcccggaaatcgaatgggggatgggttttcttgggaatcaaacgggggttgcagggtttttgcttggattttctcggaaatcaaacgaggatgaattttcccggaaatcgaatgggggatggattttcttgggaatcaaacgggggttgcaaaaaaaaaaataataataataacatgattagattagtacctgtgaggattgagagtggcagaggaaaatagggccttttacggattctctcggctggagggcaacttagaaaagggcttcttgatgcccgatgagagaagtgggtggagaagtgggtggcattttgaattttagatttagtagagataaaaaaaaattaacatcatgagaacaattttatctcaacttaataaaatatgctataatttttaataaagttaaagattaaataaaaaaatattaataaaaataattttattatgtttgatttatttttaaaaaatataaaaaatatttttatttttaaattaataaaataaataatttttttaatttaaatgaactatatatctaaaaattatttataaatttataatataaaattacttgaagaaaatattttattaattagaaaagaaaaaaaaaatctttcaaacatgttttttgttttatttgttctaaattttctttttattaactcaaccaaacatgtttttttgtttttgagaacaaaaactgtttttcaaaattcagttcccaaacataatttttttttaaaaacaccaaaaactgttcttaaaaactattctcaaaaattgttttccagaacagttttcaaaaacagcaaccaaacaggcccttagtatcactttattctatttatacattggaggttgagaaatagggtatggtgggcataaaggtaataactctttgaaaggtgagatataaaatttaaaatatttttttataaaaggtttgtttttagttaaaacaaaagggaaccacatctttttggtttctgtgttatgagaaattttaacaagaaaagtcgcagcaaaaggacacaacaattaatgtgctggaaattgtaatgagaaaagtcttctttgggtttcttcgtttaagttcgaaattttcttgaagttttccaagatgaatcatttgcttataaattagagtgtgtgttgggtattttgataattgtggacctatatattaactttgtacattaaactattttattttagcctaattaaatgtgatcaattaaattaatgataggtctttaaagtatctcttatatacaatgtatgagttttacaatatatagagactaattttattttatttatttatgatggttcaataaataaaataaaataataaggggtataaaatgaggagaaaaatttgcatattattcgttacaatattcgtttcagatgtggaagacaagaccttagtacaacatttcaatggattcaggtatattttccaatattattatcctatagatttagcatgagattttgacatatttatcatctagattatttacttatggatgagatcaagttttattatttatccatgaaataaagttttgttatttatctagatgatgattagtttttataatcattctatatgatttattgttcttcaacaagtggcatcagagctactcttattaaatctatcaggattatattttttttttatttaaattaaaggtgtttcatggtgggtgaagtttttgaatccgttttccattcatgtatccacccttgttttttgtgtttggttgtaaggggaaaaaaaccccaaattccctagattttctattataaataaaatttcataaattattttttcctgtaaatatcaatattttatatcagaagatattttctctcaaattttttgcataatttttgagagaaaatataagtatcttgagaattttggggatacaaataaagtggttgggtgataatgacctatttttttgtcattatcttgttgcatattagtaagtcatttaatctgttgggtcatttatgtcatttaatatattgggtcatttgggttgttggacctaagtctattaaagttgggtcaagtgatgggtatgatacatttgactgacctatttgaccaacccagttgaaactttgattaacccaattgaacctttgaatgacccgattggatctttaactaacccatttgaccaacctggtttgacctttgacaaaaaccaaaaaaaaaaaaactttcttcgcatgtttaaaatccaatatttcaatataaattaaattgaaattatatgtcaccaaagtgacctctattatgtaaatttgtttatcttgaaatatgtggattttcttaaggaattgtatgaatagtatctaaatctatgcataaaataatcaacccaaatgaagtttttttttttttttttttggattttatatacttgtagtagtaaatatgtgatagtttggtaatgtccatgtgtagaccctccattttgtccctttagcacatgtttttaagttcacttccagtgttccatagtgtttcttagatgacccattactatttgtgtaacttaccttttctgagccactttggagattttggttgaggggtttatccggctccacattatgaccttggttgcccttcaagtttaaattaggcttcacttaggtgtacttaatggttagacttagttaggcccacctagtctcaccctagacccgtattaggtatacccggtccattagacaccctaggcccattaggcaccttaggcccacctaggtcacttaagcccatttagacacctaaggcccatctaggcccacttaggcccgcttaagcccacttggcctattagacattcttagcgtgacttgcatagttgcatggcttgtgtgactcaatttatttatttatatttttttttattatcaatcacttttatttgatcatttattatgtttttatttatttatttattttaatttattttcattattatcaatcatttttagttatttagttatttattattcttatttatttgtttattatcttgttatttattcatttatctattattatcattttatcattctccgatttatttatttagttatttatttattttattatttatttatttaatttaataatttgaaatttttatggaagaagtctaccattggagaaggttttgaaaacggtaagactctttagatgatatgcatggattgtaggtgatgtgcatggattggcattgtttgaaattaaaaaaaaaaaaaaggttttctggtgcataagataaaatttggagagaggaagactcctcacgtagaaggactgttatttgctataaaaatctctaacagatgggtttttgaaagaaaaagaaaaaataaagataagagattcggagattgttttgagatatatagaatcaaagaaaaaaaaaaagaaagataggagattcggagattggtttttttagaaagagagagagagagttttcattggtgaagggaaggaaaggaggagaagatggtggagaccagaagacgaagccaacagagagaggaagaagaaaggaaattcatcgacctgctttctttttggaggtaag

SEQ ID NO: 10343 - DNA, 4838 bp, Vitis vinifera
  Intron number 9 from transcript GSVIVT01013247001 (locus G SVIVG01013247001) derived from phytozome v7.0 (chr-ID chr2 ; pos 6304108 to 6308945 reverse strand)
cttctcaagtatgctacctttatcttataaatgaaggacatttatatgttatacttaattaaagtgcagctgttgtttcgcattacgtactagggttgtttcttttttttctttttgtggtggggggagaggattggttttgggttggggtgcataaatctggagtgagtgtgtgagtgctcacgtgtagatgtgattttcatattatttatttgtgtttgtatagtcatattgcctatgtatacccataataaaaaaacctcaaacaacatatttgccatggtaaattcaatgaaggatgagaaatactttcaagctttacatacaactaatcaaaatggaaaaacaagtctatacctattaaagagagcaaaacaaattgtacattttagataggaaaccaaaacaatgtagcattaataaactcaaaacatttaccctctaccttgcaaaggcatttgtggtataggtccacaaagaagtatagaaaaaatctagtcctaaaaagcatccatagattgccatccatcctaaaaaattcaggcctctcaaaagatcccaaaacctctgaaggaacaatcatcatccttgtcaccctttttttcttgtttttgttatgggggtggggttttggtttgcaatcaatcctatcatgttcgagcaacttaagtgtcaatgtgctaagctagtggatagtgtaaaagaagatcacataacacaataataaggacaaatagttttgtatcattagtattaactttcttattgaccacaagccacccaaaggccttaaccattcgaggagtttttcaatttcaaatgaggttagtgggaaggaaagggattcgactaaaagaaatagacaaagcttcgagaagaaaaaatatgaaaaaaaaaaaggatttttgggccatcaccacaaataaatgaataaaacaagtagaataaaaaaaaaatcggtgcaatagccttttaagggaatctatgtgaccacttggaaaccatgttggcatcctatccattggggtgtgacccatatttactcaaaataaccatagaccataaattccactgtctttggaatcttcggaacatcttctcaaacaaggctttattccacaaggaaatcctccttaaatcaaaatcctgtaatgcctttggtgtgcacacctattcccgatctataaggtggtttcttccccctttccaactcctaaccacataagatcacttagcaatatctcaatcctagaagccatattgcttagctgttttcaatgtcaagtcattattgttctctaaggatggagaataatgtagtttttcttggcaaggagatttggggatctcgtgctcctctaaaaacttgttttttttttgctttggaagctgtttgggggaagatcttaactgtagatactttaatgaagtggggatgacaaatggtcaatagatataatctttataaagatagtgaagaatcaatcaatcacattttgattcattgtgctaagacaagaaagctatggacctttttggattggcttgggtatttctagcctcaatgagaaatctcatcctttagtggaatgttaagggttcaaaagaagaaaaaggcagtttggtatttggctcccatttgctttagtgtatttggaaagagcacaattgaaggaccttcgaggatgatgaactttccgaccaaagaataaaggatctcttcattcgtgcactttttttttgataagtaaagcaaaatgtattaatgaagagacggaaagttgcaaagtatacatgggggtatacaaagcaactaccccctctcaaagcaaaaagaagaccaacaaatctcaccaccccttagttgggcgctaaccattccaagaaccctataagggacatacgctcctctccaatatacaatctagcccagctccacaaactacaaacaaaagaattcttaagcttttgaatatttaacactccccccctaaaagctaatctattcctttccttccaaaccgtccaaaaaatacacaacggtatggatttccatatctttttccttttctttcccacaaaagggcccctttagctagttaagacctcctttacagtttctggaaagacccactgcacacctgataacccaaggacaatatcgtacagaactctgaccactatacagtgaataagtatatgatgtacagtttctttttcacaaccacacataaagcaacaattaggaagttgtcatcctcttttctggagcctatcaagagtgagcaccctcccccatgtagcctcccaagcatagaatgcaaccttggttggggctgaatccacccaaatgcatcttggcggaaaaacaatatcattggatctggtcaccaatctatacgcttctttgaccctaaactttccattctttcctcccgtccagtagactggatcttcctcgatagaaggcttgtaacccctcagagcatggagcaagtcccctatcatatccatctcccaatcgttaaagtccctcaaaaatcttagattccaacccccttgaccgaaattttgatcccacatctcctccaccgtagcattcctatgggaagccatagcgaataggtgagggaaattttgggacagccttgtaccattacaccaaacatcagtccaaaaattgattttgcttccctgcccagctatgaaccccatgttatcccaacaccattcagtttccttcaagatttccttccacacccctacttcgaacgccccataagccctctttgctctccaaccatgaccttcttgcccatatttcgccgttatcacttgcttccatagattatctttatcataagcaaatctccagatccatttaccaagcaaggctttgttcaagagcactagcttccttaagcctaaccctcccttgctcttatcctcacaaatcacctcccacttgattagatgagctttcctttccacgcttcctcctccccaaaggaagtctctttgaactttttctagtctcctagccactgacttaggcattcggaacaaggacatatgatagattggcatgctagccaaggtgctttttatgagagtgattctcccccctttggagatatattgtcgtttccaccgtgctagtcttctcctcactttctcttccaccccatcccaaactgaaggggttttgttaggagcccctaatggcaagcccaagtattgagaaggcaacgagcccaccctacaccctaattccagtgccatctcctctatattgaatttcattcgtgcactttttgagtggtctaaggattctttggagttggagttcccctctatattgaatttcctacatactctttattgtttgtgctttgccttgttagtgtggagcatctttgtttgtgctttgcctttatactgcttgtatacagaccccctcctttttggcacttttaatacatgattttgttgtctatcaaaaaaaatattgcttgaaagatgcgcattgattgattttttttttataggtaaataaagatagtattaaataaaagtgccctttttgggtgcacccaagtacataagacgtatgcaatagttgccaaaagatgtcaaaaaaattgaaaaagggataacaaaacactactccctccctcaatgagaatccaaccaatcaatgaagttaagtaaggacattggcctttaattatatatgacttggtctaagacatcaagttacaaaaaaataagcttttcagtctttggtcagaagactccttgttttcaaacgatcttctgtttccctccttccaaattatttaaaagaggcatggagaaggtgcttctgacatttttctgtttccttctgacaaaggagccacaacatcctaacagagtctctcttatggaggaaggtaacacccaagaaacatcaaaaggagagaacaaaagttgctacagaaccctcgcctttccaaaatgcagcaagatgtggtcaattgactgctcttgaatatgacaaaggagacatctattagccaatgtccaaaccctcctatgaaaatctagtgttggagctgtgaagttaatctagtgttagagcttttcctcaagatgcacattgatagatttgttacatagcttctaaatgtttcaaggtagttcaatgaaagataggcttctaaagtgatgtagtgaggtttggagcagtttctaggaggtcctagacatgagaggttctcatcataggcaggccccagatccaagtgcttttcattcttgattattgcactgcctttgctgggcccatattccttattgatcttaaaatggataggttcacatttttaatgggtgccttgttgaggtggggttaccaaatgcatggccaaaatcctaagaatgcactacaggttttaaaaactgtattgggcactggggaaactatacccttactttggtctatttgaatgggccaggaaatcttcatacacttcatatttttggttcacatcttcctccgctaaatcaggtcatatctcaagggatttctctttctttttcctttttttccccttttttttccttcttgggtgggagggttgggaaatggtcaagatttgttattgtttggctgttacatgttcatgctatgttctttttacttaatttcctgtatgtgtgatgggtttgttgtaatagctgttcctttgtttgctagattcctaaattactgctgaagtaatgttgctttgagtgatccttacttttttactccactaggtttttgctgtaaagagtgtacttcaaaagccaat

SEQ ID NO: 10344 - DNA, 2039 bp, Vitis vinifera
  Intron number 14 from transcript GSVIVT01004706001 (locus GSVIVG01004706001) derived from phytozome v7.0 (chr-ID chr Un; pos 15397746 to 15399784)
gttcaggtcagggatctttcttctcctaatttaatgctgtcttttaagttggtgaaaatgctgcattttcccatttacaagttctatgatgtgcctgcttttctccatttgtgtttagggtacatgaaacaaatctagggaactttcctacacatccccaccccatttcacctgaaccaccatatcatgcacattcattaagttgaaatatggtagttttattttatgctttgtaactggacagtttcaaaacctattataagtctcttacctctcaacaattctgcgcaatagtccaattcttgcacacatgaactgtatttggttatgattttagtgcatgaccataaaaagacttgcaagatattgcccctttcagaacctatcaaaagtctcttatctctaaacaagcctgctcaatagtccaattcttgcacacatggactatatttggtcatgattttagtgcatgaccatgaaaagacttgcaagatgttgccccttccctgcaaatgaaacaagagcaacttgttagaagataaaagaatgaaaaaggaacaagtacccacatgcctgtttcacatgttaacaaaaaaggaaaaagcaaaagggaaaaaggaaaagtttgacatgctatgtactaacatcgatgaaatagattccctggagtttgctacttccccatgagtttcatgggcatttttcttttgactgttgatgatgacagtgactcaatctatatttaagcagtacatgcaatgatgaaagcattaaaaaaagttgaaaatctttcctccatgaattttgattcacatggagtcacgatgtggttccttaaaagaaaccaagaaagggtggagggaaattctattggagctgagatcttggccctcctggaaagccatgggaaggcttcgctcttggctattgagccaaactttgtttgagggagattatttcatgattattaaatgggctccaagcccaccattggttgtggcagtaccctcatttcatagggctattctggatcttcctgtctcaatggggctggatataaacaggtgcctagatcagcaaatagggaagtagaatcctcatctaaaagaggagcttcttttgcagttcatgacggttaatttttaccctcatgggttttcgcttcgtttttccttatttccttagctttttttattccctttcattttttaagaaatcttgtccttccttgtagccctcctttttctcataaaaaagttaatgagtctatttggtaattttttcgtaattttttttaaaaaacagttctcaattttttttagaaataaaattttgtttgagaactcgaacatggaagaaagtcttctcaacttattcttcatgaaggtactgtttgtttataaataatgtaaaagttcctaaagtattcttcatattttcaattgtttcgtataacatctacaaaaaacattttgaaacacctcaaatttgtttttaaaatcaacctgtttagaacaaaattttaaaaacctgttttcaaaaaaaaaaaaaaatatcaaatgtggtttttaagttagaaaattgtttttcagaaacctttttcaaaaaagctcgaagtttttgcatggaataaatggaaacaagaaatttaattgaaggtgccctctaataattgattatgtgttgctgcaatgacctacagcatttaaaggaatttctgtgatgttctcctctatttacctactaaacccttccttatttttcagtctttcttttgaggcattgggtacaccacacgcatcctagaattttttatagtgctatgcaatgcccacatagaagtgggggtcaaaggaaatgagaactactactattctctctccccctctctttcacactttgtttttacatgctaaaataaatgtatacacttgtgaggtttttcattaactgctgtttagagttgttcttacttcttattgcagatattcactaaaatgcgaattttgattccttgtttgaatgtttgccagttcctc

SEQ ID NO: 10345 - DNA, 3451 bp, Vitis vinifera
  Intron number 1 from transcript GSVIVT01015511001 (locus G SVIVG01015511001) derived from phytozome v7.0 (chr-ID chr1 1; pos 4337899 to 4341349)
atcgcataagaaggtaaacaattcacttggaacttttttactgttatttggccatttgattttatcagtccttatttcttgtttctttttttcttttttttcaatttctaaataaactaagagtgcatttaatagtgattctactcgaagtgttttgaatgaaagtgttttttttttggagaatcacctattaagtatttctccataaaacactattaagtaattttttaaaagcactgtcaaacacactttaagtctaacctctatgtttggtgatgaatataactagaacaatgctgctaggtcatacgcacttttgatggctacaaagattatcagaatgttgttttttgacggttcatggtagtcttcaataatctgtaaaccttggtttcagtgtttcactttcaacctcctttgaaattaaatagcttcctaaatgttttcaaatgccatgaaagctgtgaaaaataaaacaataacttttaagatcgagagtgaacctaataaatgatggaatgaattagttggaggcttattcatccacacatgttgataaacattagtatggaacttgaatgaagaggctcaagacggctatggcgaatttgaggcttttctaaagaacaacatgtatgactagaataacatatataaatgctagcttaagtattaaagttaattttatatatagcaatagtgcatggcaatttgcaggtgtacacatggaactggctgaagtttataaatgaacaaacatcctcaacataaattacatgtagatatgccataatacaaaacttagcacaagaacatgctaatctgctactataccgcttaggttaccaagcaaatcatgctacccttttttgaaagccttggaatcatgtttgaatcccttcaaaatgtcttcatcaagacaagtaatcaaaaccactctctcatagaaatatggaatcttgaaattacattcaacttttctttttggttccttagaaacaaaaatattttgatagaaccatcaacagagtgatacttattatatgaagaaagttacagtgattttggacatgttggctattcagaaatgagatgacattattctcaatactcatatcatcttgaatgtatatgatgattgtcgtataaattagagccattacaaaaatcaccacaataataattttagataattgaaagtaatatctatgaaaattctagactggccttatctgaaatgtgtactgagaaaagcaaataagctccttgcaaatgctataacaagtaaaataggctctctttttactgatttaagataaaacaacatagaatgatttcatttttatgtgcttcagtgtctttgtagtttagtgaacagacgtggtatgctatttccatagtcattaaaaacttatgctgcacgattaaaagaactattatattaattgtttatatataatacactcacacacacacacacacacacatatatatatgagagaagggtaaaataatcgtataggaaaagctataatcttgttgtcaaagatcatattgaaagttaagtgaatttattcttataataaatattagagaattttcatttgaatggtttgaatgttgacattgaaaatgattagtcattggtcagtaaaaactttcgatgatgaacatgaaaagttagaacttatgacatgacacacaaacacatatatatcaacacatataattgcatttgcatagttagaatttgaaactaaatatcaaatttataaattttaaaagttttttttgtggattttgcgattaacctatacaataaactcatattttgctgaattgaactttttcaaaactgtggtattcaatattttcaaatgatataatatagtttaattctttaaatcctactatcttttgtgaaattggttatatagtacttacactcatgccttcaatgtatatgcacatttatgcatattttttctattgatatttcatgatatagaaaaacttgtgatacatgatacagaaaaatagaaaaatgatacacaatagcttttacgatttaacaactatggctatttctttattcataggaatactttgcagtttagctgcatatttttaaaattctgtattgtttctatcatgaactagaatattttgatcaagtttcatgttaatattaagtcttccacttgctgagtcaggttaagttgccttttaatataggagtgtggatactgagatgatgaaactaatgttacataataacatgggaacactacaggggttgtatgcattttgccatccagaaagtcagtcaagctgcttgatatggacagagcccttgactaaatctcactgtatccgtattctttttaaaagtcatttttccctactgatgagaaaatgtctgttaggcttgcaccttcaggctctttttgatgacaatgtcaagaaaaagcttgtagaatcattgagtttctgccttgaactttcaagttcgttcccttttcatctttttcaatactttgaatttcaattttgaggtactagtgaggtgtagaactctggtcttgagtcctgtatattatatctgaatcgccaattcataggatcccaaaaattttggttcttcagaatgaaatgaggcttagtaatcattatgctctttcttaaacaaccttactctcctatcttgtaaccatttaatttttattttgtaggtataaaacatttaatttttattttgtaaaagcatttaaaatttgtatgatgttttagatactccattacttattaaaagtacgttgagtagatattagaaggattggattgcattgcacttttgaacagcctattaagagaaacaaaaataaaaagaaaaaagaaatagatgttacaaggattgggaagatgagagtacaatctaacttttttaggttttaatgtttctgttattcaaactcatagcattaatggtctcactttggtgaatttggacaatttggcaaattttttgttactttatgaggaatgatttgagtactgcatcatagctcatagctctgccttaaccactaatacggtttcttcgtgatctttcaactgctttactactgtttcagctagtcgggaaccctcttctctttgttatagagccttgtctgtatctatatgatccagtcaaaaaatcctcattttgatgaaatttttgtttttgtttttccttttctttttttttcatctttgtattgctgggttgtgggaagacaatgattttggtttatagaggctaacttaatttgaataatgcatatgatgctcatggttacattggttaaagaaccctatatttgcatagaagagtagttttcctgtacatgaatgacaggtctcaactcatccttttcactcccttcacagattgcccttataccttggg

SEQ ID NO: 10346 - DNA, 7559 bp, Vitis vinifera
  Intron number 1 from transcript GSVIVT01010214001 (locus G SVIVG01010214001) derived from phytozome v7.0 (chr-ID chr1 ; pos 17697812 to 17705370 reverse strand)
tactttgtcctttacttttgagggtaattgtggaataaatttgaaatcactattggagtgcatgaataaataatatttttttcccattttacaccaaaattaaaaagaaaaaagtgaagttccaaattctcatatttttttgtaattggtgtatggttagatgattttcccttaaaaaaaagcttaggagcctccacctccatcaagcccaagtccataagcccacgtccattcattaaaagagctttgggctccatctccatcaagcccaagtccttttattaaaagagctctgggctccatctcaagcccataaaaaaaagagtgtcaaataaccttcagctttagcaaagcccaacctaggaggcccaaacaaacattacccatccggcccaaactaaaagaaaagggcttaaggcccacatgaacctacttaagcccacaagtcaatgccttgggagcccaccaacaagacccactgcccataatattagccatgaagatcaaagaaaggtttcacccttttttcttaaaaaaaaccctaggttgaggccaaacctatctgtgtcttccaagaagggcatgcatgcgtccaaacaatcatgcatatgggtcatatgttcaagggaaagggcaagaaagaggttcatggggagaggaactgtggaatgagtgggaaaagtggagtgagaaatgggtatgcatggagaatatgtggtgtaaagagagaaaaggtggtgagaaaaaaaatatgaaggcttagagagaggaatgggtttaagggggtgtatttgaatgaggatatgtataagaaggggtatgggatgaaatggattagttagaaaatggaatgcatgaaagaagtgtggtgtagagagagaaaaggtgatgatgggagaaatgggtgagtaggaaatggttatgcatgggagggtgatgatatacatgaaggcatgggatggtgtgggtactagtgagaaaggtgagcaaatatggtggagaggtgagctatcggcaatgggcatgaagagagggaagtgggtatgcatgacgggatgaataaagaaatgtcatgaggggagtatgcatgagctgtgtggatgtgagagggtggagaataggcaaatgggaagttaatggtgtagatgagtacatgaggtgatatgtttgcatgggaacttaggttggtgagcaatgaagggaaacaggtatataaaaaaaactagagagagagaaatggtggtaagaaaacgggtacatgcatgggagtatgtgtcacgacccaaattccgggcgacccaaaatttggcccgtgaccccaggtcaaaggtttgaccctaagggtttctcctattccacgttggcaatcaactaaaacactctgaatttttatttttattttcatataagtcccactagggttctcaccaactaacaatattttaaaccttacttaaacacatcaagatttaataaatatcattgcatcccaaaataaagtttcataaaaatccccttaatcaaactaaggtcttattacattatccataattcacttattataaggtctcaatgccacaaacacaataaaaataaaaaataaaacttttccactaaaccgctccaagggcatcctgaagtcctccctgtcccatctgtggatcctcaggagtgatatctgcatctaaaaagatataaaaatgaaagggtgagcattttcacattgctcagtagggtgcctaacacccaaggggttaatgggggattactatattttgagaacccaaacgcaacagtccaccaatataaatcaagtcacacaatttaacatataacattaaactcaattccacaacatccaatcattaaatgaatgcatataaacatatgacacacaatcatacaatgcactatcgttctcgggctttcaccgaaggatacgcgtccgcacccaaatatactcctcattcggagtcttcccggggtaaacttttgggtctttcaccctagggatctctctcccttcttagttcgcctcacacgggctttcacttttcatcactattttttttatttttccatttcatacacttttcacaattttttttttcatacaaccatgatgcaaatgaatgccacaaactccaaaattctttaataatttcaacaattccaacattttcaataacccaataaaataaaattttcacattaaaattcccgaaaatataccaatgaattttcggaaattcacacatcaatatacttgaatttatatcacaatttcagaatttttcaataattataataattcttaatatttgaaaataactaatttttagcaataaaattaccgcaaatattccaatcaattttcaaaaattcataaatcgctagatttgaaatcttgccctaattccaaaattttcctacatttctaacaatttttaacaacctaaaataattatttatcaattacaaagaattccggaaattacaaaaattcgaaaaaaattccaaataatccagaaaaattcatacaacacccatattttctacttaactcataatcacaatatttacaattttttttttcaaaggaaaaacacattaaatttaagttttaaggttagggtcccctaccacaaatttgagaatttggccattaaaaacgaaatcaacaatcgtagacttgttcctctagtcgaatagagtatttcctccgaatttgggccgaaacggagatcgtttgatcgtccaaacggccaatcaaagatccggcgagtgccctaatttatgcacagtagtctttctctctctctctcgcccgcgtgctgcagttttcccattctcccccttttcccttttttttttttttttttttttttaagaccaaggcttcctaccaccagcccatgtctaagcccaactccattaaaaaaaaaaaaaaaattcttttacaacccattaccttaacaacccatattcaaagcccattgaatatatttattttattttctttattttcttttgttttgtttattctaattattttatttgatttccaattcattttttttaacacacaaatttatttattaacaccaattaaaaactaattttctcaatattattattcatcaatttaatttaattttttcttaattaattctaattaattttttttttttaattttcctgaaaatttcaatttctaaaatcctaagaaattttctaccctaaggatgacatgacataaaatttcaactcgtttaattgaccaacacaataaaacgaaattcgccaatctgaaattgacacgtgttctccaaacacttttctttttgacttttcaaccatcacacaaaataagacttttcaaactaaaaatgctaacgtagcataaaatacccaatcattacagtatgagtcatgggtattaaagggggaggaatggagataacgtggttaatgcatggccatgcaaaagtgggaagcaatggaatgggtttattggtgttgaagggagttgtgggtatgagatcatgagcataaagggtgtgatggaatgggctagtagtgaagccaagagaaaccgtgggtatgattatggtgtagagagagagtggtaggctgggtgggggtgtgtgaaggagaatacatcccgtgaaaatgaagacaaaacaaaaccctcacatgatgcattagtaagctaaaacagggttgtattatcctcaaatcatcccaaaaaaaataaacaagatagcaacaatgaacccatagatcaaacagtaaactcaaaactaaacataaaatcatgcaatccacggaaactattgagaaaaataaaagaacaaggctttatgccaataaagtgaaacccaaaaatccacagtagtcatacctttctcttcttcttcctcaagctctctttctcattctctcctggattcctaccccaaaaaaaaaagacttccaagtgatccgtctgtctcccccttccagctcgcctctcctcctctccccgaagacccttctttttctttacttctttttttttagtagctcttctccctacccagatccggaaagttagcacctgctcccctgttccccgctcagcccgtctggagccccaaccactgccatggctctagtcatctgcttcgacacgcgtctccatgcagctgctgtttcaaggaactggtcccccactccaaacgccctcctccgggtgctccaaaagtggcgggaaaagctccaaatgactaaaacaaatataatatatgtagagagaaaaaacaagaccaaaagaagtggtctacacaaatgtaaagtccatgatcaatttatcaaatctattagaaattgagatttttgacccttaaccttatggagcactcatctttggcttgattcaatattcattggatactccaaattgggcatctttatagataattgagaaagactattaatctcaattaatttgattgttgtcctcaatggctccacaattaagaggttagggcttttgctatcaaagagtatatttagagatagaattcaatgaaaaggctctatctacctctaaaagagaattttccatctatctctcctagttttgcattgttctctaataatgctcttgaactatggaaaatacatccatgacactaacaataattataccctataatttataggtgattgacataattaaaaatctgattgatactgattttagaaaacgtttttaatttaaaaagtgtttttttttaaaaaaaaatatttggtgtatgatgaaatttagaaaacactttaaaatttttgaaaaatcacttatgatagtattttttgaagaaatactttgattctcctaaaaatacttcttaaaaaaatacttccactaaaagtacttcgaaacaaaccatttccaaaagactctccaaatgttggaaggcttttgacacaagataatggaaatttggtggctgcttttgaaatattgagtataaaggtttataacacttccaaaaagctcctgacattcatatcaaaccaataatgattgttttgtattccatgcatgcagtatttgacaagatacaccagatctaaactcccagtactttgtatatccttttatttatttatgagccaattttagaaatgtttgttttatgtattattttgatctaaaatttttatatgagttaaagaacatatgcaatagcatgccataaagaaatttcctaacttcttttttaaggggaaaaaatattcaaatgtgaaacctataaacttcgaaaaaaaattgtgatgatatacatgcttaagaaattgtgaatattatttaagttatatttgattctcgggaaaatgtaagaaaaataaatataaaaaaaaaagtagaaagaaagaaaaaatgaagtaaaataaaaaataaatttaaaatcaataaattatttttattttctatttcaaacccgttaataatttaaaaatacgtaaatttttaactagttttaattatatttgattttttttaaagataatcaaacaagagaaatcgttttcattaatatcttttttctttctcaaaaccaaacatagccttaatcatcgaaaagtcattgttagtagctttcccgccatatatcatttacacgaattaggcttcaaatgataaagttatgagcaattgaatcatgggttaaaaaccaaaaatataaatatgtgggaattctttgttggagaacctgaatatacttacttttgcccagtgaagggtggtgacaagtatggtgctatggtatccattcttaacacacttggtatcattggattccatttttaatttcctttctgctagtattttttttcaaaattttagaaaaattgtatttttctgagaaaatatttttccaatgaaaatgtctatttttgggagagtgagaaattggagaatttctaaatggttagaaaaatttaccaaaaagctttcattgtattagaaaaggtttctagaagaaatgtgaggagaatgatctctatttgttaaagttttaatttttagctagatatgtggaccaaaccaactctcattaggtggagagtgtgattcacccctacataatatagtgcaatttttattttttttagaatattatgcattttaatgatcatacattaaaaaaaaaaaaaaaaatgaccaagttggacggtttggaaataggtggataaatgcatgtcccacgtactaaggcagaacatgttataaaacatgcaacaagccaaaaaaagaagaatagtataaatatacacaatgatgcaaaataaataaaatatcatgatgctttgggtctctcacactaaagtgtataaaaaaaaattgatataatgcacaaatacccatgtgcgagtgtatatctatcaatcaattattgaaacattagcgttttttttttcgatcaaatccttattttgttttgcttctctcgattgttgagcctaattgacttgatttttttttcttgctcttagcctctcacttcattttattcttattttgcatcgtcatttaaacgtagacacccgatcggttcactttcccaaatgccctttatcgacccttctcctttccgggtttggatttttcacattgtttcaattctcatggttgatgaggaagaaagaaatgaatgaatgttcttttaggaaaatatagagtaaccttagctcgagtttgaactttaccccctaaccatttttaatggagtcactattaaaaaaataaagtgatataaaaatgatgaataataataaaagaatacataaatgacatacatgatggactaatgagaagagaagtttgaatattgcataaatttatttacaaaactaaaaacaaagatggtatgagattgattattttcaaaataaaataaaataattccaactccttttaatttttagaaaaatgatttttaccttattcttagttcacaaaaacaattttattgtttgccaaaaatgatttaaaaaaagaaatttgatttttttttaatttacagaaaataatgtcactttcttaaaagaaagtgacttaagtagtgttgtttttttacttaattttaaataaaaattaaaattaaatattgtttaatagttttaagtattaagttatttgtttttaaatattttatttatatttaacattaaaaaaaaaataacacattattatttttaattaaaaaataaatgattattcaggaatttttaaaaaatcctaagacctatcttggcttttactctatgggataggaaaatgaaaaaaataaatgattattatttaggaattttatttttatatatgaaataatactaacagcatgtgcttttttaaccagcggtaatcgtcctcgtcgagttcacgatcggccaataaactttcgtaaatgacaaaatggcccctgtgcaattatttctgaccatttccgtcgatctcgaactctgaaacagcagaatccgcaacacaccgacacacaaaagagaga

SEQ ID NO: 10347 - DNA, 1181 bp, Vitis vinifera
  Intron number 5 from transcript GSVIVT01029901001 (locus G SVIVG01029901001) derived from phytozome v7.0 (chr-ID chr8 ; pos 1221599 to 1222779)
gcatcctggtaatgtttctcacaccaaaaaaaaaggattatttgcatttgttcgcctctctcccctatctctttatatctctccatctgcagtattgaacccaaatttttcggaaatcaaggaatgtgagataaagaaggatgagatattgatatggttgtagaaaatgaaaatatacttcctatttttagtaatatttaataaaaaatatagtaatagaataattcgagaaattttaatgtaaccaactatattaaataggttcttccaagttcgtacataattccctgttcccttcactttctccaacatttttctttccttcttttgatgggaggaatcccaccaggacagcttttgagatgtgttattgcatcccaatgatgggcccaaacctaaaagcacacaataggaaacaagtttcccaccttgtgaaaaacattctctcgtttgcctctttaaccctttcacatcatttttgtgattttttgttctcaactgtttcaaataaaaaatagtatttgtttccattatttgtcagtgaattctcatttttgttgggaacttgtagtgcatggtaattttctatactcatgaagacgagggaaaatgggaaaaaaattgtagaagggcagaacaaacaaaataaaagacaaattgattctaataaattgattcttcggggttgttatgctaattactaaacttgttaaagagatggaatagacccaaggtatatcttttttattagaggttcaatcacaagaattaggctaggatacattatgggaaaacaaaacttccttcaaggagaagtaaatgaaagactttcataaaaattctcatagaatcaagaagaagaaccccaaggaccttctttccctggttaaaggaactactcacagtgatcagccataagtgctagaaccaaaaagcacaagaagagtagctgaaaacattactaatagctgaaataaatgagattcaagcttactaatagtgaagaactggaccaaatgtaaagttactgctgaaaaatagcttggttggatgacgagtttaatctacgaaaaattcatccatcttttcagtgtaatctgataagcttttacagtctgttatggagtctgaatggtacaagttctcaagctttaatcttcattttgaatgtgtagttgggc

SEQ ID NO: 10348 - DNA, 2474 bp, Vitis vinifera
  Intron number 2 from transcript GSVIVT01038625001 (locus G SVIVG01038625001) derived from phytozome v7.0 (chr-ID chr1 6; pos 21377323 to 21379796 reverse strand)
taatttttaaacttataaaataatagaatacataagtgtatagcttctaatatataagaaaaaaataaataaccaaaattttctttcattttcaatctatatttttcacatttaaatatcatacttattctatttaatagaatatgaagtattaatttaatttataatactgaggtaaaaatacaaatattatttgtttttaatttataatatatttatggtattactagtttgatcatgattcaatcatcagtttgaccacttcatttttttgtttcaattttaaaaacattgagtaagtaggatatttaagggagtttaaaacttttaaaataattaaaattttaacataagaaaaatcaataattttagttcaaaatttatcatatcaaacattaaaaatgtaggttgtataaatctttttattttttactgtaaatatcaacaacccctaactatttttttttttaagtaatatttgcaaccatattaattttgttgaaaggtaaaaacttagaaaataagagtcaaagtggtactagataaaaatgaaagttaaatactaaaaaatcttagtggttaattattattaaaggaaagaataaaatagaacaatgccaaagacactaaaatatttgattctcctaatttagaaaataatatttattttaaataaatcattggtacctaaatattctcctaaataatatttagttctcttgatttacgatatgatatcgatttttcttaattttaggatatttattatttctctctttctaaattttttgtataaacaataaaattcaattctttccattgttaaattatcaattttttcatggtattagacttagtggctttccaaatgtggtcaaatgccctaaaaatttcaacctatccacacaagccatatcttcttcttccaaaaaaaaaaaaacaaacaaaaaaacaaattaaaaaataaaaaatccttagcattctagcctttcatcaatattctttcctagtttggtatcaattaaactaaacgccgtaaattttctactataatcaaatcattcttttagtttgtagctttgattttctagcttttcatcgttgttctaccatttcatcaatgctatggtaaaatcaaatcacccttttaagcaaaaattccaccctacaatactagttatcgatccagttttatcacttcatgagttcttagaactacgaaataatatgttttaagcatgagctttggtgttaacatagtatatggggtatgaactttttcttaaacaacgattgcatcttgttacaattcaaaaaatatatattttgaaaaatatttaagagatttcaaaaatatatatgacaatctcgtagcaatcaaaagtcgatttcaaactaaaacaaagtttatatataaagggataattttttttcacttaatatgcttttctagccgatttatagtagctctttaataatctaagcaattactactaccaagtagtttttattttgataacatagttatggtcggaatggttaagaaaaaaattttaattgaaggggaagaagccttacccattctatgtgttacgattctcaaaataaaaaaaaaatatatatttttataaagttattgttaaaggatgtcttcatagctagatgttcatattcattaagggacatattaaaggaaaaaataaaagaggactatggcatgacacatagtacacatgatgataaataattttatatttgattgtttgatttagttaaaataaatattattttttaaattatgagaatcaaatattttaatatttgattactttttatttatagatatatataaaatataatctttacataaacaatatttttaaagtttgtttgccaagaaatacttttagcctaaaaagtgtatatgatttttttttttggttttaagtaaaatttaggaaagattttcaaaattttgaaaaataacttgtaatattaaaaaattacttattttaggcataaggatagataaaatcttttcactaaaaatactttaaataaaaatattatcaaacacactctaacttagttttatttttattttttaaaactatattaaaaataataaaaaataaaaaaaaggttgtataaaccatataaatgacatttttagagtttatcatagatcgagtttaaactattatcgttatcacaaatggtctttttgtttcatgaaaacgataatgattatagagaagataaaattaaacttttccaataagaatgtttgttttattggtattaacaataaaagctatatatatatttagtattttttgaaaatctcttatttttacgttttaattatcttttaagtaaaattatgaagtttataaatatttttaaagcccacttttatggtgaccgtaggaaacatttttagcttaaaaagtgtttttgaaaaaaaacattag

SEQ ID NO: 10349 - DNA, 3390 bp, Vitis vinifera
  Intron number 1 from transcript GSVIVT01030075001 (locus G SVIVG01030075001) derived from phytozome v7.0 (chr-ID chr1 2; pos 9617491 to 9620880)
tcttccaggtgggttttcttcatctccttccaatggtggaattgaatgaatttgttaactttttttattttcctttttgtttttgaaaatttcctgttatttctaatgggttttgcaccctactgtcacccatgtcacaattcagatatatttatatatatacatctttttgggtttttgattatgaattcttggctttcaaaatttccttctctatcacttgtgcaatgcctaggatgtatttaagcatccaaggataaaccgcctttgaaagggacttgtattggacgagtcattttcaaagagagaaaagaaatttgtgtctctttttatataaggtggtgttgctgctccttggccatatcagcttcttctttttttccccccctttagaaatgcctatttctgtaacgatccatttttatcataaggaataataataaagggttcttttggttttaaattgttttcccttttttagcatgatccttttttaagctctacaaaaatcaatcccccaccttttgactcaactttcttagctttctctccattgggatacctttctaacactaaaatgtagagatggagaccctttgaaatctacttttagttggggaagaaatacccttaattgatgggaagtggcttctggtgtttgtctcttgccgtgttccgataactccccacatcctatttttagtgaatattattacatggacaaaatttcaccttttacttgtgttatatttgataatatagaagggtactctcaaagtacatttgcttcttgcttcttgtcccataatgatttctcatttctttttctctgatttgttttttctcttttctagtatataatcatggcatgtgtcgtcatattagaatataatcattacagttttatactatggtggtcttttggtgagaagatttgttcaaaagtaccattatttagatgtgtttcaggctgaggttgagctaactatagaaccagtaaccaataatggggtttgtataaacaaatgttttcttagcccagaaccattaaagttgcagatatgtacttgggttgaacagttcaaccatgtggcccaaaaatgaatgagttgttaaaaagagattgattatttgactgtccactcaggcgtatatcgcatgagaaagacagttccataaatataattttatgcagcatgggtggatgtcactaaccatatgccccctaaaactcctggaaatctagctcgttaaagatttatatggcctaaaaaaaacaaaaaaaaactcactttgttctagtttctttctttctttcttttctctttgctgtacattgtattgaaccttccctggcaaggcaaattgatgattgaaatggcagcaccataaagctttgtcataaaccagcctgtgcagctccaaaaagcacatggaatccagtgctggtttattcaacttcccatgtcttcttgtcaccttagagataaggttcttcccattgccaccccctagcccttttcttcatctttttctcgtttatatatatattttcatttgtccaaccttgaaagcaaaaagcatgtattcaatggaagaaagtgcagttttatttaatatcatccaccttttgaagcatgcattctcctccttttgtaagtgtagatgtcaagaaatcttaataaatgatgacaaccaacaatccaaagaagaaaagaaacagaaaaaagaaaagtcacataatcttgagagaaatgatcaaaacccagaaacccaacaactgaaaggaaaaaagggggggaaaaagagttcctttgttagtgtcgatgtcacagaatcttacggaggatcagaagctaaaatcctaacaacccaaagtgaaaaaagtgggaaaaaaagggaaaaaggagttgggtgtaataataatactatgaacaaaggtctgaggagagtagcatacagagtgagagagagtggaagaatcaggttaaaaaggcagtctggtgtagagatggggtgggtgatgaagaagggggggcatatgaagattcgctgcttttaacgagaacccttttcttggaaatgaaagagagatgtggggaagcacgcttgtaagttgtaatcccatgttcatgtgaaagctttttgatgagatattgctgtgtgaggggtatggaccacagctgaaagagcctcaatattgtgtttgtggtcctttgtcttttgctctgatgcctcacactaatcttcttcatctgtctctcccccatctccaactactgctagtcctaagtgtgccatatttcccctttgttcaggcccttcaaaagctcaaacccaccattttcatctgcaaaaagagcctttactaagccagaaaaagagaaaaagatgtagttattttttttttttattttcggggctggggcaggggctgtactgaccgtacctcatgttgcaacctggattaaataataaagtgggttgtcgtcaggtctccctaatagtaggatgtatgatgaggttttgtactactgcaagtctatactataagacaagccgatttgattcagaaaccattgcctcctttcttccccttctttatttagagttctgactgtggggtactgtactgacctctccctctctgacccctcccccccaccctctagtccctagtctctcgtctgcctgcttgcttgcttcccttccctgccatgccctcagtctcaagtcccatatcccataataaaggctacatttgccactgttttgtggggttttgggcccatctctgaaaaggcctgtttctgtgtgtcctcatcttctagtcaccaatctctgtttgagatccgtcctcatcagggctcagggcttttaatgggaacccatcttcaaagtctttcaatacctgaaaatgacccatttattgtgatgaacttacagaggttggtaatggaggaagcttttagggtttttcatcctttcttagtcaaggaccatctttttcttaggttggcaccctaaaatggtaaatgcagccttgccttgccttgttagcttcgatgtttttattgttctattccatgccattgcagaaagctttgcaggaagattataaagtttttaattatcatgccatttctaaagattcacttttctcaagaacttaaaaagggaagaattatgaattatccgaatgaaaaaatgtccttggagatgcttcttattgtcactgtcttttaagcttaggattctgctttcacaagcctcgctctttgtatatatttagatgaaagggctgtgttacatgtttttggaaagtattttttagaatacatgttttgaaggtggccggggtgactgttaatggttgcaggtgtgctcaac

SEQ ID NO: 10350 - DNA, 2786 bp, Vitis vinifera
  Intron number 1 from transcript GSVIVT01037260001 (locus G SVIVG01037260001) derived from phytozome v7.0 (chr-ID chr6 ; pos 16796714 to 16799499)
gaaggtattaatattcctattcttcatttcagatcatgtccgatgttttcttttgtgatacttgatgggattttgcgaataattttcaaattttggcgttggaaattagaaaattcagtcttttgcatatgtggggctgcttgattgcttggaagaacgaaaaaaaatcaaaggaagtgggattttgaatcttatattttatgttgctttggtttccaaataatgaaaagctcatgtaagtcgtattaacagctgggttttgactttttcttcctacattttctcagcaaccaaacaggcgcatcagttctttttaatgttatttttgggctgatttcttcgttaataggttgagcattctagtaagaaggttgtttatgtttgggtttcctgttttatttcttaaattgattgtttttaaatatatattgtatattttgtcccataatgtgataatgctattctatttcctatggaaaggtaaagaaaattattttcatttgtcggatgaatgatttgtgatcctggacatttttctttttcctatatgtaggttgtatttaggtctatcataaatttccgtattagaatgcagggctattttctacttgaaatttgtatcagagtttctagttgctttcatgcttttatgatgcggcttgaccagcctgtttacttgatgaatttcaagccttttcctttaataattttttctagaaaatgttcaaggcaatgctggatgttgaaaaaattgttaagtagggtttgtgggtttttgaatgaggatgttgcactagcttgtaattgtcagaccttattaatatattcaagtgggaaccaagcacattgacaaacagacgctggttgaacaaggcacagaaatgtaggatggtatgctgcatttgctaataaagatatgaactcatgaaatgaatgtgaacaaacagttgatcacattcttttacgttgcgcatcaacgggaatcttgtggcagctaaatttttctttgtttgggattgattgtgtgatcctctcttcaataataccaatgtttttaagctggaatcaatgttttaaaaggctaaaggtggtcttgaggtgttttcctcagatgaggtaaggagtaagcttgaggcaagacaaggcgtaagcctcaatttaaataaataaataataataataataaaataaaaaatagaaaaatagaaaaatatgaataaatccacaagaaaattgaaaaataaaagcgtataagcttcataataagaaaagtaattattcgttatcgttaaaattttctaatttagatcaatttctctcttctaaaaatttagtgttttttatggtttcatcaaataattttcaatactagtaggagcctccaaggaatgtaatcatttctaattgccatattatccttcccattactgaaaatatcatccatttttcttgtctatgaattgcaatggtttttgtccttatctatcaataataaagtaatgattatatatgagttcaaccattagggtagtcaaaaatttcccaatttatctttttaatatctcttttcctcctccatttaaagggttaattggaagtcaaccaagtcttattttataaaaggcttaacccaagttaggccccgatataaaactcaagaaatctatacaaaagctcacaaaagcattgaactcattaaaactcattggatacaaggttttagcctcttaagcctttatagccttgaggctatagtgtcgatagagtgaggcttaagcctcaattactctaactgaggctatagcctcaaaagactacttcacatagccttgtcttggggcacacctcaataaccttctaaacattggctgaaatggacattttgtcgagaaggggtaaaataaagtgtggttggctgcccctttgtgccttttatggacaatttggtgggagaaaatttgaaaccctaactgaggctatagcctcaaaagactacttcacagagccttgtctggggcccgcctcaatagccttgtaaaacattagttgaaatcgacactttgccaagaagaggcaaaataaagtgtggttggctgcccctttgtgccttttttggacaatttggtgggagaatttgaaagtgtggaaattttggaaatcactcaaataatattttatgtgtggttttttagattttgttaggtattgtattggagagacatctatgtctatgttggattttgttgattggataggttcaaagtaggtctgggagggatctgtgcttttttctatctttttcttggtgccctttgtatagcccctgcatactctggtgtacccttgttgtagctctttttgtagcttctctttttatacatcatatatatgccttgtgtttgcaaaaaaatggatagttgatcgcttgttcatgacctagatggagaggaatggcaaaaagggatctgtaaggccaacttatgtaataggataaggctctgttgaactgagttgcagatgtagaattcttcacttccaaagtttagttacatttaattacaaagtcttctacttttctcatgcatctttcatatttatgattctttagatttttatgtttgcaatattattgggatttgtttacttatcggctggtaggaccataaatgtttcctggtagattttttttttttcctatcgtcattttcagtactaatattatgtattttttttctgcttttaatgtttcagaatcaagtgaagtgcactctgaagagaacaaaatt

SEQ ID NO: 10351 - DNA, 882 bp, Vitis vinifera
  Intron number 4 from transcript GSVIVT01000549001 (locus G SVIVG01000549001) derived from phytozome v7.0 (chr-ID chr1 ; pos 7228622 to 7229503)
gatagaggatttcttggtaacagagatctgggcaggtatggatttagcctcgcttgcagtctactaagcacttctgctattttcagagccttaagagccactagtaatattacttaacagtgttatagcaatctgtaaaagattgaaactggttctccaaaaagaaagggacaaaaattgcattcataatgaatattttatcaaccaaaatcagaaaatttaatcattgtaattttgttatttggtaaaaattgtgttttaggaatcaggtgtacagtgacaaaggtgttactattggttatgtttttcactcagaactgtaaaatcagtatccttgtcacaaatatgagccacctctctgcatggtgtacagtgacaaagatgttactattggttaatatatatatataatttatatttgaaactctgattggaggagattgtctttagagttttggttactagaattttgtgttggtatgttttgaagcagaagaaaatgttcttatattataactgttcagaagattcttaggttagggtacttcatacatgggagtggtttttgtagcagacatagtttgagagttgaattcatttgaagttaaagagtattctttctttgttttttcttttgtgtattttccttgatatttctgtagttattctgcattacattattgcactgttacacagcctctccccttcccatagggtacttttgtacgagcaatacttgtggatctgacccatatttattctgtgttttttttattatttctcttctctccatatggtactttagtatgggcaattcctctggctctgacccatattgttgtgtgatcttttgttatgtgacaggtctagatcgcgggaaag

SEQ ID NO: 10352 - DNA, 3408 bp, Vitis vinifera
  Intron number 3 from transcript GSVIVT01008191001 (locus G SVIVG01008191001) derived from phytozome v7.0 (chr-ID chr1 7; pos 4821506 to 4824913)
ttggagtttataccctaaaagatgtcttgaaaaaatgacagttaataatctactagaaaatggcaactactactaaataagtaattaatcactctatgccagtttgtaatgggggtatgtcaagttatgaacaatggcagctaaaaattactagcaaccgctgatcaataaaagatggttttagtataagaattttctaagcctgtaacccaacatgtctgttccatgcatatattttcttgatgagtgtagttttactagaaaaccatgacaggcctccttaattaatttccctgttattacaaaacaacgcatgcggaaaaactgtgaggctattttaatactccccctcaagatggagtgagaatattatgaactcccatcttgccaagcaaggaggagaaaacagaggtttagttagtacattggccacttgatgttgatacgagacatgcaaagttttcaatgtgtcattttgaaccttctcttggatcaaatgacaatcactgttgatgtgtttggtgtgttcatggaaaaccggattggctgcaatgtgtaatgcagcttgattgtagcagaataacaacacaagttttcgatgctcaatattcaaatccttgacaaggttgagcagccacatcaattcacatgtagcattagccatggatctatattcagcctctgtagaagactttgaaacggtatgttgttttttagaactccaagaaactaaagaatctccaatgaagatgcagaagccacttacagacctcctgctgtctggacaggaagcccaatctgagtctacaaaccccttgagctccacgatagaggacgatccaaataacaatccttattccttggtaccctgtatgtattgaaggacaacgatagacaacttgtaaatgtggaaccacccttggcttggccaaaaattgactaaggcgatttacagagtaagacaagtccaaccttgtaatggtgagatacaacagctttccaattaatctcctatattgagtgggattgtctagaaattctccctcatcttgagagaattttacattggggtccataagagttttacgtggcttgcaaccagggtaaccgatgtctgacaagagctgcaatgcatagtgacgctagctaagagaaataccctttgttgatttggccatttcaaggcctgagatattttaattgcccaagatctttaagcttaaaatgagcatcaagaaattgcttgatttgctctacctactcgtcattgttacttgctatgactttgtcatccacatagttcaagagagcaagaaaagaagttccaattactttggtaaagagagaattatcagcagctaactactgataagagaaaagaaagtgaggctgttctaatacctgtcatggttgttaaaattgttaaaatattttttttttgaataaaaaaattatttttataatataaatatataaaattaaaaagaacccaacaactactttttgtgtaatacctataataaaattaaattcctaatttttaattttttttagtgttgtaataaatttcgtagaccaatgaatgtttagtaatttttaagatattaattcaattaaaacaaatatataaagaagaggttctataaaaaataagattggagtaagatgcatggcacaaatcttttgtacgtagttgattagaggatggatgcatgcatgataatgagaagtactatgaaagaacaggcctaaaaattgaaagatgatcttcaatttgacttctaagagattacaaggtacataaactctattagtttttaaattaatattttcaatagtaaaataaattataataatttagaaagtataccttaattaattttaacaaaaagttaaaatataaataaataaaaataggctaatgcagattaaacaaattggaagtctaatataaaaaatatgctatttggatgacaattttggagaaagagtatgaaaaatataatagtatagaaaatgagaggaaggactaaaaaaaatgtggtacaaatctttggaagctaagacatttggatagatcaattaaaaaaaaattatagtaattcaaaaagtataccttaataaagttcaacaaaaaatttaaatacaaatcaatataaataggcaaaaataggtccaaaaatcagaaataataaataaatgagtggtttaaaaattttggtaatggactaaaagacatggcacaaatatttaattcgtagtcgacatcactggctgagctagctaaggacaaagaagggcacatgtcccccctcaaaaaaaaaaattgcaataggggttttgaacctcgaccttatgtttaaagagaaagactgttttccactacattatataccattgtccctctcccttttctgcaccctaaaataattcctctctttgtgcccataccctcttatgattaggagtaccaaagaagaaccctaaaattgattaggaagtccaccaacaaaaaaatatgttatttggcatgaattttttttagaaataataggaaataggaaaaatttaagcataataggaaaaatatgaggatggagcaaaaaatatggcacaaatcttttaaattgtcaaaaagacctcaaagatcttattattttctcccatttaaattgtaaaaaatgacaatatacacgaattccatatgtttctaaattagaattttcaataataaaaaaaacaaaaaataaataaagattataataatccacaaagtataacttgattacttttaacacaaacttcaaatataaaatcaatatatatgatccaacaaattaagagaaagtcctctaccaacaataagctatttcgagtgattagtcaacttcactttggtatggagaacaacccatgcccctaaatgactccatgttccatcatctataggtgtcgttaatcacaagtaagaactatcctttctgaggtcataattttgaaaaattacctcaaataaacacaatcttgttcaaattcaatcaaattggtgatttgaattcttcaaaaatatataaatctaatgaataaaaataatgaaattaattattgaaaaaatggaaagcctaaaacaattaaacagatggtttggagggacgaccaaccggtggactaattgcctttttatatgaaaggagatcgaaaatggaattattcagagaacaacccttgtctatggttcctccagaagtattattaatcaatatatagggcctgcttttgggtttgagatcattaattttggagtgttgttataactgcaactgcaaatgaaggcattagctaccaaacatctcctgatttttctaaatataagtatcattcaaaagacatcttagctactagtattct

SEQ ID NO: 10353 - DNA, 8764 bp, Vitis vinifera
  Intron number 1 from transcript GSVIVT01021979001 (locus G SVIVG01021979001) derived from phytozome v7.0 (chr-ID chr1 4; pos 4795112 to 4803875 reverse strand)
tttcaaaatttgtctcaattttttaattgatacatgtttatttatttttatttttttgaagaatattttataaaatatttcttatattgatatgttataaaataaaattttcttatggcataataaaaataatgaggaatatatctctataaatattctatgggaggggaaaaagttatgaaatggatgtaaagatgtaaaatgtataccgagtagttagaaatataaaaaataatgaaagatatatgataaagtaaggaaacaaacatgaaatattttagagctcaacattgatatccattttgttgtcatctatagtattttttataacattgtgaaataattctctttcatccatgaatataaacatgattgattaaaccatgttaatatcttatatatgtttgtgtatagattattttatccttatattcttgaactaatatatatgttagcattaaagttttcgctacacttgagatgttaaggacatgtttgacaactatttttaagagcaattttttgttctttagaataaaaaattagaaaaatatatttagtaactaaaaattgttttctattttctgttcttgagaacaaaaaaaaaagttttaaaataacatcttttaattgttgttttaacttgttttctaagagctgttttaaaaaataattacacaaacatgttcaatgattaaacataaaacattaggcataaaaatcattttttaaaacatatttaaaaagtattaaaaacgggttaaaaacattttaggtttccaaataaacttttgttttataaaacattaacgaatcattttcaaaaattattttatagagttgtcttaaaaaacaagtaccaaacagaccctaacaatgtcaatagaacaataaaactcgaacatcaagtaaaactactattcactctaaagtttaaattattgggataacctgtgatactattcactctaaagtataaattattaggataccatgtgattcaaacaatattttttatggccatggctttaattaacaaatttggaaaaacctctactaccaggtttagtccaccacccactccagtctccttaccttcctcactgtaaatgttaggtttgttttgaatgtttggcagtcacctctattaatatttctaatcaagaatgttagattggttaattcccaatgtgcacatcaagttagatgccttagtttaaaaaatcaggtttagcagctactaccacaaagacagctatagcttcacatataatattaatttgatgttgccattgcatgccttcaaccttatatccatttaggtgtatatgcatatttgtgggtccatactccatggtaatgttgcatcaaggtattaattagtcatctattttagaccaacagtgtttaccaatgcctgatcatatatcactctcaaacacaactacaaatgcactgaatttaatgcacccatttttaattcttttagttaagggataaacaaatttattagtagagttatttatactattgaacattattggggaaaaagcttaaatcaatgggtaaggtatctaaaagaaaatttgacaaaaaaaaaaaagagtaaaatagcacatgtaactaaaagtttatttgtgagtaatatttataggattagatggagttcctaatataaaacttggttttttattttccctttttacaagaattatgtgttgttaaaattgtttttgcctttgggcctctgacaactctgcactttattaaatgctcacatgactagtatgtatataatgattatgttcgacctaaaggtacatccacaagtgaacacaacaaaagactcccattatttttcaagtagattacaatcttagaacttttaaatttcaaagatctaattacaccaaaaaatgactctctttcattaaaaatttatttttatatttttcctaattatataagtacattttattaagggaaataatgatatacacaaaatgacataacgtaaataattaagaagaagacaaattgatagaatgagaaaatggaaatattcaagaacaaagaatgaagcgcataatgccaaaaattcactccaaatcaatatttccataatttaaaaaataatatttattttccttaattttaggatatttgttattattttctttatataactcattatacatttttgcataaacttttgaaaataagtaatataacttaatgcttctattactaaattatcaaaattttcatggtatcataatcaaggtagtatgctcaaacttagattttttttataaaaggcttgattactatcaagccaaatgatgatgatctaatgtcataaaatgttcaacctaccttcacaaaccatgtctttctcttcaaaaataaaaaacaaccaatcttaatatttaagtcttctattagtattttagcttgatctcaaccttttctaccatgaaaaaaccaaataatctccttattcatagtatgaaacaagactaattaattaacaaaaacacccaagaaagagggcgaattgagcaattaaaatcttttcaaaattgagtaaataaagtaataaacaagcaactattaaagcaagtaaataaagaatagatggaagagagatgcaattattcatgattggctagatcattgatacaaataatattctcctttctaagggttctactaatcaaggcttcaatcttatacacttggattggcggccccaacggacattacacttctttcaagttcttcactaacttgaagtctcaaaacactcaattttggacaaagaaatgagattttaatatgctcaatcctagtacaactcaatacaaagaagtaattaggataatattaaatgggtgcacaaaaagattgcaagtgaaggatttaatgcacttaaatagagagttcttaataagagaaagtagatgaaaaatgaattaatgcgggtattttcttatcaataaatgcatgggatctttccaattttagaaaaacctctcaaacacccaaaacttagcaaaaagccctcaataggttaagctctggttcgatcgattgggtagccattagggcatctaatgctctacaagtgatcattggtgtttttaaggctcgaccagaccttgatcggctagacatcaacaactagaagagagaatttttgtgtaatcttaactagtcctcaattgggaaaacttaattggtttgatcagttcaagttatcctttaccagttgggcaaaaatcaacccaaaatgcttttgatttcagttttattcttccaataacttgaacatttcattttaaaacctcaatagagaattttttgaaagaattaagcctaaagttttgaagtaaaatgcatatttatctaatttttaagaacttaaggtaacttttaagctaacaaggtatgaatgaatgacattagaaagtgcaagaaaaaaaaagttatatcttaaagtgcttccttgagatccatcttagattgattcctaaacatcttaaatcttcaaggattcatctctcataacatttgaatctattttaagtttacttaagctttcttttgattttggtaataaaacctaaacttgacttgatttaaacatgttagtccatttaactttattttattatcatcaaaatatacttaagaaaacccttgggctaacacatggcatcgattttctctatcatctcttaactagagaaaaacatgttaaaggaattaaggatgataagggaagtaaaagttccattgtgcaataccaaccaaggatcaacaatgatgaacttgccacttcatgagtttttaaaaccataaaagaagaaatttttagcatgatctttggtattaataggatatatgagttttgaacttctcttaaagagaaattgcacctcgctacagttgagaaaaaaaaagaaaaagaaaaatatgttgactctaaaaaaataaaaagtcatgatctcttgaaaaatatttaagagaatttgaaaataaaaatgacaatcttgccacaataaaaatttcaagccaggacaaggttttcgaattcactcatgaacttatcaccaaggtatggattttttttttcctacttgctacgctcactaaaccattttatccttcttttagcatattcgtgttgcctcttcaatgatatgagtaatcactcaccatccaaaaggaggaaaaaatgttcctccagcatgcacaagtttttattttaataatataattatggttgaaatggttgaagagaccaaaatttcaatttgagggaaagaagtttcacccctattgagcattacctgatatgataagtttttctcaaatgatgtattcaccaagtttttagccaagtcaaatgtccattttcattcatactctctaacttgagaggacatattatgggaaataattagataaacaaaatgatagaatggaaataatcaaggagaacatagaccattagaataacaaaatggaaataattaaggacaacacacaataaagtgcataccaacaagaatccactccaatcaatattttcatgaatcaaaagcaatcaaatatcaataatattttattctcttaatttagaaaaaaatatttattttccttaattttaggatattagtcattcttataaaaagaagtaataaaacttaatgcttccattgccaaatgatcaaattctttacatttcatgtagaaaactaaatgcataattattaaagatatttatttctatattaaaaaatacagtaagacatttctttataataatagaaaattctctaataagaacataccataatagaaaaaacacataaaaaatttacaaatagactcagaaaataatttgagacacttttcaacaccatttctaaaaatattaggtttaagtctttcttttttagtcaaaaaattctttgcataaatatctataagaatctcgtttttattaacttttaagaatgaaaattatcgctaattatttattcaattattagttcttatgggtacgtaatctttctttttctgttgcttggagttataacatttgaatgtttcttacattccacattgttgaaatggatcctatcaaatatctcatattttctatgatcatcttcatttaaatagatcgttataattttctgcaataaaaaaattcattattgcaaagatttatttaccatggttgagctttcttatgagataatttatatgaagttaattatggttgagcttactcagcacaacctaatgtggtaagccttactttggatagtgttgagtgataggccctacttggcatagttgtaagtggcgtcttactctactttagtgttacctattgcaagagcattacaagttgtcttcaattggaagatcttattacaaaaactccattcaaggctattcatttttgtaaagattttattctaatattctaaggctactcattttggacattttccttttgtggtgttcagatgttattaatttccatacttaaaaagtttcaattgtatagtttctaattgacataaaactatgtggcaagctttattcacacaaccttatgtggtttgccttccttgacacaactcgatattcggcacaaagcctctaatgaacatatcattgacacaaagccctcttatgcaaaactttaatgagataaatccttaaaagcttaattgattgtcacgtgttgaaagttattgtgttgatatatgaaaccatttagagcgaggtgagtaagttgtctaagtgagatatctttgaagttataatttttgtcaaggattttaataattttaatagatatataaataatgaatagttattgaataatatcaatcataagaataattaatcgaataatgtaacctgaaaaaattactagaaaatctccaagtgtaaaagaccataaatggtctatcgaccataactaattcattaaatatgaagaaaaaaaatgtgcatagttttacctgattgaatgcacctactccctaaagttttatatctttagggtctacactcttttttcatatccttaaagcaacactcctttgatgtggaattcgcttgacaaagtactaccccatactccttaatggatcacctaaaagactattgaaactttagtgactcaaatcctcgacttttatattcttataaggttctttcaagattggttttgaatgagaaatgaagttttttttagggtatagggatgactaatcttttgtttattatattcaatataataaatttatctatttataccaaaaacctcaagcattgatttggtaaacaatcataacttcaattttatgaaaattccctccaaaatataaagaatggtttaaagtttcaaatgaagggatctaatgtttgcatacttgaaagagatgctcaaatgttggagagattgtttgaacgtttcctaaggcaacgtttgaacatcctataagacatttgaatgctcctttgaatgtttgaacgctcttttgggatgtttaaaagctccttcaagatgtttaaatgtttcttttggatgttgggatgcttctcaatttttgtgctctggacttcatttttcacatttttcttcgaaaggaactcatggtaacttatattagtcattccttaaatcttaacaactccaagtagatacatacttcaaaaaataacaacctctaagtaactttaagttaaaacggaaccaactcgacctatgaaagtatgatgcatgaaccaaataagaaacaaaataaaattactaacctaaagctatcatatcaccatgcatcctcactaagatttctttgcataaagataagtactcaaaaagcgacaaaagagacaatgaagcgaaaatcctcctttgaaatataataccaatctagatattaacaaattcttcaagttacctctccatctaataaaaataagactagatgatataagttaactaaatgctaaattaaaatcaagtttgactaaatgtcaagtgagaggtatattttttttcttcattacgctaagtctatatgcatatattgttagagatggaacgttcaacatgctcatttgtaatctttcttttttgcaagtcttcaaagatatggtgttgctcatatttcaggaccaaataacaatcggaggaactccaaactttgttggacggaaaggaggaggagaagagagagcaactgacattcttaatggttcgttcaaccatacctatatatattatgaaaacagaggagggcaatttagtaaaagaaacacctaactcgtggcaacctgcacatgatgagtcggcgaggcaaaagcgagggagatggagtgtcacgtgagtttgttgacacctaactcggggcgaggaattaccgattaaaaagctcttcaaaatttagtgggtaagcctagtcaatggtgcgcccatctaactaacccctgtctccatcacaacggcctgctgctgatgcatgtacttgctctcctgctcctcatgtgtatgtcctccacattgttttgctttatgttagcgctggtttcatgaatttatcctatatttttaaatacatatatatatatatatatatatttgaaattcaatgtagtcttaattttttttaaatcaatagcttagtaaaataagattttaaaatttattatatcttaatttaaagttatcaatatattttaatttttaaaaataaaaaatgaaaaatttataaaaaaagaaaaaagaaaaaaaatcattattaaaaaaaatatatatatatatatatatattgtcatggtaggtgggtgggttgagtcaaagccacctcatttgggctactaagcatcaaaaggtagacttccattttatcacttaaacacacctaccacccaacatttaatcaaatttaatatcatcaaatttaaatcaaaccatatcatttttgtatttgaaacacccactaattgaatttaaagtttatgaaagtgttgaaatcaagtggaaaacattccatcattgatttgaaattttctcaataaattttgaaccaatttaattaaggattcaatccctatctttaaaaattataaaaagaaaaaaaaaaaaatagacctcgtttgataaactttcttcgagaacaattttatgttctcttaaaaaaaaaaaaaaaaaaaagacaagaaaaatgtatttaataataataaattgttttttgttttttgttattaaaaacaaaaatagaatgtttttaaatgataattttttaattattttcagtttttttacttattaagttgaaattttgagtaaaaatggatataaaattattttttgggtttcaaattttatttaaaaattaaaatttattgtttttagatttgggtagaataatattaaataatatttaaaaaaatatttaaatgtaaagtttaggctaaaaaacaaacatggctaactctatttcaccttttgtttctcatcaaattatcaaaaatcatttctaaatcaatttatttattttagttttagtttacaaatcaaattttattttttaaatgcatggctttaaattgtaaggaaaaaattcttgaattttggaagccagctaacggtcatcggaatgcagagcgtaaagagagaacatactcatgagctacagagtctcaaaacgcaattcctcctctgtct

SEQ ID NO: 10354 - DNA, 5629 bp, Vitis vinifera
  Intron number 3 from transcript GSVIVT01033052001 (locus G SVIVG01033052001) derived from phytozome v7.0 (chr-ID chr1 4; pos 25360564 to 25366192 reverse strand)
gtgataaggggtcaacaaatccaggtttacagcaggtaatttgctcttccccatttatgaattgagtagggtattccatgtgtatacacaaaaaaaaaaataaataaataaataataaaataaaataataaaaaaacaactgattcatattcataaaacaccattctatgggtttctatctgcaactatgtgaacttatactcctaaagtttatatactctgtcccttcgctttgtacagcactgtttccaataaatgcctgcaatcaaatttttttgcaattttttttattctacttctgttttactgctctctgagtttatattaggcttgtccatcgctaaatccctattcctttgcatgccaaaaccaatttggctctcccttgttagatctctctagtatgtcctagaaactgaagcatggtggctacaaatcctgaatgccatgttctatccaatagaaaaaaggataagcattggtaatgacccaatcaaacagtcaaaatgcacaaaaacataggaagtttagacataggaaaaatttattagttcagaaagacccaaagatctagtgggtggcaagcttactgggtcaaacaaacagctctatgtttttagacattctgattagtgctttaaatacaaatcatatattgaactcagctcatcatttaaatgagtcggctcatttactcaattggatgatgcatgatgctaaacatatactcaaaaaaatgaaaaaatttggaaaagaaaaaaaaggttacctcaaaactagaagtatttttctgttggtgaactttgaagaaaggagaataagccttttcaatatgctttaatttccaagtaactgtatcaatcacgtaaaaattccaacaaatggagaaaaaaacagcaattcaaaactaaccaatgatattgcaaatgcattaaactaacctctaagctaagcaggctcacatggcaaaaattatacatgcatatgggaagggaggggacggtgttgttggttcagtgtggaaggagtagatctaaggaccacatgaccttcttcatcctctctttacatttttctccaagtctcacctgttttgaggtgaacattttggttttggaggaggctattatcttctcatttttctttttccactaatgagacccaataacacaagtaaagtcactttaaatttttttcctctccttatgccctacaaactgcaattttaagcttctttactgaaaggtaaagtgaggtatcataattctaagcaaagtcttagccctaactcattggaaccttaaatgtgtgtttcttaaattttttatttttccttcactattgatgctttcttataaatgagagtatgcttttatgacaggtaagggaaatttcacacccttattataagctcactttttttttctttattaattttgaaaataagtcttgactaagtgaaaaatttaacagaatttatgctttacacttatacttattctatgaatgagaacaaaaatgttatacaaaggggcaaaaatcggttgtgttcatgtccaattcatgttatgtcagttattaaaaatggctcaacctaggtaaaactccttcataactgaagcaaatcttttgacattattaaactagcttaatatatcaaactcatttaagcttgtttcaatatggttcttatttgtaggaggccaaccatattggtgagttgtttagtagtctgaggtaagagtggagtagagtaagaggtgagaaagaaaagaatggcagtggaatcaaagagagaacctaaaaaagtaggaaaaacattttttattttttattttttgtttggtaggaaatggaaccttcttatagtgctccaaaatagtaactctcatgttaatggatcaattattacatagaacattttggggatgacatgtgtcataaagatacaccggtcccttatctctaattttggtcaagataagtttgatatttgttaatccaacctcggtaaacctctagacaccaaaccaagacccttaaactagtccaaaagtgctcaatgattggaaggttgattccaccattgagatgcaccaaattcattttatgagccctattccaaactcagacaaacatataagcatcacagcgctatgtcaaggatgaaattttgagggagatgtagcaaatcatctagctacaaatattatggaggaagtatccttcctatagcagggatgaaacaatcaaccttctctggtgcacgtagtgtctccttcaccaaggagtatagtaatagagacccccatccaccataggtgagcatccatattctgtgggcatctgggtagctcaggaatatatttggaggtacgagagaccagatgatataacattatggcataggaactatgtaaggagaatatggatttgtccatacattggagatcaaaggtgagatacgttacatgtcatgttagtggagagtgatcttgagcatgttttactacatactaagacacatgatgttctgtaatcgatcatgttatgatggagctcacattggatatattagacacatggtaagttgtgtccatgtggattttgctagataggacatcaacaagctatagccttaattttatctcatgagcaaccttcttttagacttgcatgtgggcttaataaattggaagaaataagcacgtgatgaggttcaaactcatgacttccaaataactacggatctaatacaatgtgaagctatcaattgacctaaaaacttaaattgttaggtagtaggtcaataatatatataaaacttatttgggttgcaattctaacgaacaaaatactacatgtttgttatatagataacaaaatacgatctctataaacataacaaacggttggattgggtttggtttacataacttgttaaattatatgttaattagacattattgtaacttaatcatgacccatttaacatgttcaacaatctaaacacatagaaattacaattgaaaatgttttctcaattaacttattataaaaacataataaaattaacgtgacttactaatacaattcttttttaaaagaatatagaaattatatggttaaatggatcatacaattgagcaataatcatgttaatatgacaccattgttaaaagggtccatgtataggttgaatcataactaattaaatatgttaaataggttgaaacctctaatgtgaatatgatccatttaacaaaggattgggcaaattgctacaagtgcaattagattgatagggatgaatcttcaatatttattcacaaaacaaaaaaaaaagaaatggaagaaaaaggaagatactagaatttgggaagtttccaaatttctcctaaaaagaagtttctaaactttaacagaaaagtcttttttacttgagtcatttttataatctacaaatcttttttattagaaagttttattacaagataaagtttaagtttataattctaaaaagaaggtttttatttttccttttaattttattatatttggaagaaataagagctttgataagttattatgtaaaggttttgtttgtttgttcatagttttattggggtattagctttttctaaagcctatagatagggctaactactctatcccgaatcatccatatttttcaaaagactaagaacggtaaataaaaaaagtcaaatcacaccatttttgtaataggtaaaatgcctctaatcaactttatgagatagagaaaaggacgactctatctccatcaaaacttgaccgatctaatctagtggacagggaactacttgttgggtacagagtcaatttgaggaatagaagagcaaacggcaaacggtttggtttgattttttatagttttgttgaggtttttagcttttcctaaagcctatagatagggccaactgctataaaacaagtttaatgaataaatgctgaataatacaaatttatctacatactttacaatttatatatatatatatattattttcaatgatgagactttattgtttttcttctaagtgagcctcgtagaagtccttagtgagattagaagatttcctatttttctcttctttaccttgttcttttttctctctttcattttacttttccttgttgacataattttgttctccattctcttcataaatcttaaacgatcaaagctatagcccaccttatttaattgtaggcaaccatcctagggttgtcctacatcataaatccaacccagatccgctaatttaattgatattattttctaagtcacctttgcaggttgtgtgaagtattattggctgtagttgttgttacatattttgtccaacattgctttattttgttgccttaagaattcaattttcatttattattagggatttatatcattgattaatatcaaattccatatttgcctctactattgacctaccttctcccctttgtagagagattctttgtattaattgtaatccgtgaagttgaccatgtacttatatatatatatatattatatataaaggaatggggagggtttgtgggaggttctaggttcaagtcccaatggggacaaaaacttacctatcaaaatagaaaatatataaatatatataattctggtaatgaaatatcacatcacaatattccaaatacaatatttcttcatatggtgtcagaacattttcttctttctgccagttgacactttgctgtcatttacttactttggtagttctgcaactccagattcatctgtggtaaaaagggatttatttttttcatcttcgtcttccatgttcatcaatcacagtagatatctacgcaactgttgatattaatcatccatttcatctgcatcattctgataatttaggttctaatcttgtttctcaaccattgattggtgaaaattatttaacatgggacagagccatgattatggctctaagtgccaagaacaaaattgggtttattcatggatcaataaataaacgagtagagatgaatagttgaatgtcaatcaatgggttcacagtaataacatagtgaactcttggatctttccaaggagttacccagctgagtgatttatggagaatgtgcttacaaatttagtctgatcttaaaggaatatttttctcaacttgatgctccttgtcattttgaaatagaaaaggcaattatatctttaagacaagatcaattacgtgttactagttattatactaaacctaaagttttatgcaatgaactaacaaatctacaggtttttcccatttgttctttgtaattcctaatgggtcttcatgactcatatttggtaatccatgtacaaattttgttaatggattcttttccattagttaaatgtgcacattctcttattttgcaagaaaagagataatgaaatattgccccaactgagcattcaagcatttagatcactgcttgtcacaacaaagtggaaattttttttctcaaagagaaggttctcataataataataagtgggattccaagggtggtaaaagacaataacctacttgtactcaatgcaattaggtcggtc

SEQ ID NO: 10355 - DNA, 2542 bp, Vitis vinifera
  Intron number 2 from transcript GSVIVT01007961001 (locus G SVIVG01007961001) derived from phytozome v7.0 (chr-ID chr1 7; pos 7139601 to 7142142)
gaggaggtgaagttctttgtttttttaatttataattttatttatggcccttgttgcactctcttggcagttcagttgcattcatttccttaacttgacattttttttttgttaatgtaattgaatttgaaactaaagaacacccatcctggatggaagtagagaattgtgtcattccattgggcctttccaggccaaccatcctagctagcctttaaaatgtattgttaggtcagcgagagtttcagaaacaagaatttaaaaatgtggaaagaaaagactacatggagctgccttggacgcagtggtgatgtggtagtggcttggcttctgtaggcatcccttgaagcatttatgctgaacatgaaaattattttattattatttggattgaacaatgcagaagcctgagagcttggtctaaaccctgaaatctcatcatcaaggttttctatactgggtgggttaaattttgggaccacctggtatcatatgtgcaagaacggacagttccaacaggtacggtgaattgatcatttgatcccttttaggaaatgtggaattgtgacattatgtcatgctttgcaaccggtatctaagtaaaatccactctggggtagtgttcaactcagccctaaatctaggttgcactttctgatttgtaactacagaactttgctttggccccttcttcctaccatgtgctggctgccttctagtccagttgccctttcttcaggtgtggacttaactccttttgtgacttaagacttgagatgcggtcttaactttgatgatacaaacctaagcaatagaaggagatcacagaatcagtgcttttaaaccatttggaactggaagcacgagaacttatcaagcattgatgttttaactgtttccagaactattgttatagtggcattgcttgctaagatccctgatattgaaatcacacacaattccttaagtcactgagattttggcgagggtggttttaattttaagatgagttgcttatcttatctgacttcctactatttgttgtcaaagccatcacatgtaatgagtttgagggttttagctacttgcagcaagacttttattaaaaccccattactagagctatctagtgtggtattgacttgtttaggagtttttgggtttggtgtcttttgttattttgattttcttctattgcatctttggagatccttagaagacctggatttggtaatgtaagtatgtcctttcatatggttattctggtcagagagatctcaatttgaggtttgtagaagagtaggaagagccggcaacagttttgttgtgtttactggttaagatgtaattctataccatgaacttttgtcatctttataaaaattcctgaatgtctgtatctaattttaatgggcatggcatcaacatcttgacagttgcatatatccactgttatagtttggttctccctaatgtcttcttcttgagatttagtgctgaaatcaagtattacttgtttcactgctgcagaaaattagaatatgtcttataagaagaatctgtgaattcattggtgctgagaataaaattcaagaattatttgtgataatttgggaaagaactatcaagatgaaaatttcccaatatcttttcaagaagttcatgattatttggaaaatctcaagcgtattagaattctaattgtttttattttagtttttttattagatgcaaattctagggactagaaactgttaagctacattccataaatctggttatattgcatactattgatgcaacatattaacagattttaacaaaagaaaaaaataatagcaagagcaggccaatgatcttgtcacaaaatatttgggttctttcttcttcttttttttctttttttctttttaaagaatggatggaaaagtaaaagtttgtcatctcaatgccaaatgccagagccatgcccccaggaattcaacaaaccaaggtgtgaaaatgttatggatgatttggaaaaaccaagaataacatgaacccaaactatcaacttgaacaatgaggattgggtgcatccaaatcaccaccttgaacaagatttagaaccacaagtagtgcattcaagtctacagatcaacatgcaggttaaggctcagaatgacaatcatttcatggacactaagacctcaaaatggacaacctactcacccatcatccatcataagaaaattgattgaccaccaataagaaggcaatagaaagttaaattgaaggaaatcctagctagcaactttatatatggaaaagcatccatatcataagagagtattaaccaagtgagataacaaaactgttcaagcataaaactcagccaagaaaggttcttagcaaagaaaataatcaattccatgcattaaagaaattccagcctctcccaaactccaaagactctttccactaggcgtttgctaccttcctttctgatcaaccggttttttgctcaggcgatcaattgttacacaaaagccagtaacatcca

SEQ ID NO: 10356 - DNA, 16368 bp, Vitis vinifera
  Intron number 1 from transcript GSVIVT01019738001 (locus G SVIVG01019738001) derived from phytozome v7.0 (chr-ID chr2 ; pos 2853840 to 2870207)
ccaggcggaagcagcactcctaagcgcagtagaatcagcttgatgaagagcctcggcagtcagaaccacatgcctgttcagacctgacctcgggtgttgtatctgcatggttggcaagcatttcttatctttttcctaagagcacttgagttgctgaacaacaaaaacattttttgaaacagactgttttacgtaacttgcgacataaatagtatccctaccaactcaaccaccatccatggttcttcctctgagaaaataaactattcatgaacccgagccttaggtacaagaaaaacaccacaatgatataagaacggctaagtcatttgtcgggcatcaagcaccagggttctgtaactgaaacaagagcactcatattcacccaaagtaagctggagagataacggaatgaaggtggtcatgtataggatttcttgcacttgagaaaggagtgaaaatgagctgaaggtgggttagatggatgggcatgaagggtggaggagtgatgggaaatagtgggagaaatgggttttggtggcgttaaaagatatggtgatatgcataggagcatgagggatgagtgtggaaatgggtgtgagaaggtgggcataaaggatggcagggaggtgagattagtgggtgttagaagatggtatgagataatgagatgaattgatatggatattgaaagatggggacgcaaatatggtgggttggtgttgagagtgaaagagggccatgcaagtcgatgatgaatgcttcaatgaacccatcacaatgatcccttcgcctgtagccacactcggtacactgaccttttcacttcagttaccaagttcacaaggccaatcaacacctcaacacctccatatgtaacaccaccctcaatgtaaccgttatcataatatccatcttcatcgtacccaccgttgatgcacttatcattccagaacagtagataaccatagttctaacccagtggaaatgaataaccgacccttctatgagaccttcaacaataatatcctcaacttgacagatctgaagagtgaaaggcagtgaaaagctcatattgcaatcttcaggagaacgcagtagttccatggggcaattctagcattttaattagagtcacggtgtcatatcagtaccattggcatttcccaacatgctttcacataacagcatccaacccattcattgcatacccacactacaagaaaattgactttcatagaaagtctaaatttcgtgtgaaaaaatatttcccaaccaaaaatgtttcgtgattcgtagctctacacccattgctacaaaaatcctattttgccacctagtattttccctgatgaaataaaaattttgttactaaatatttttctcaacgaaatttttcattgacaaaagtaagaatttttgccactaaaaaatataaatttttgtcctcaaagtcgtcaatacttagtgatgacgaatttattttgctgccaaatattttttgtaataatttaatttcatctctctatgctttacaatcccaacaaaagtttttcttgatgaaatagatatttcattgctaaaggattttttcaactaaaatatttatcattaatactgaaaaattcatttcattgctaaatctttttatttacaaaatgatttcgtccctaaaatgtatgccaatgaattataaattagttgtggatgatataacaatcttcagcaacaaaaataattcatcaggaaatatctttagtaataaaaaaaaatttgtcaagaaatgtatttacattttttatttttcatattacaaatgtatggtatttggtatttaaaatactaattataatggaaaagttagttatgaaacctgcttacaaaaatcaaaatatatatcacataagctcattggtaattaatatatgtaaccataacatgtgatcatagtagtataatatctatgctaatataactacataacaaaataaagtattagtttaacaaagtgtatatcacaaaacaactatattagcatagacaaaaaaaaagaaatgaacgtccatcatatgcacatcataaaaaaagggatcatgaggacccttggcttgatcgtagatgatgcaatatttcttcaaattgttgatgatgttgttgattttgtttttgtaccaaggcctctaattggtcaattcgatcttgctgagtctcaagttgttattgttgagtctccacaagtagttgagtctcagcaagtctatgctccaactcaatttcacactcaaaagatgatggtctagatttagaaaatgagattggtttagggccaaaaccaaggcccttgacatatcctgatttttgtcccaaaactttctcacaaatttctgcctcagtcatagccacagctccttctgcaacaggttggttggaactccaacatcttctcctatatatgcaaaataaaaaataaaacaaaaaaaaagaaccaaaacataattaataagttagtaaattaaaatttccattaaatttgggcatgatctcccatatttagtagatattttttaaattatacctactatatataataaatataagcattggaatttcaaattagttaataatcaaattgatttttagcacaacaaaacatccaagtgccttaatttgttattatatggtaaataatagtagatttcaaacaagaatatagtatttttatacagacattgtaacatcccataagcacacataatcctaaacttaattttaagctaagaaatgtctaaaaagtgtttataaacatgttatcacataaacaagaatcatatatacatactaaaatggtgaaaattcaaaagcatttagaatcttaacttaattttaagtaaagaaaattataacaagaagttagtaagttaaaaatcctatttaaatttcagcatagtcccttaatattatatttcaaacaagaatatggtatttttatacaaacattgtaacaccccacaaacacacataatcctaaacttaattttaagcaaagaaatgcctaaaaaattatttaaacttgttatcacataaacaagattcctatatacatactaaaatggtaaaaattgaaaagtagttagaatctcaacttaattataagtaaagaaaattataacaagaagttaataagttaaaaatcctatttaaattttggcatagtcccttaatattagatttcaaacaagaataaggtatttttatacaaacattgtaacaccctacaagcacacataattctaaacttaattttaagcaaagaaatgcctaaaaaaagtatccatgaaatgtcattttccccaatattgcactaaaattcaattacccaactcattggcttgttttgaataagatggaaacttaggcttaaccaacataaaactctaactcaccttacatattttgctatatacatgtaaatgttaaaatctaatacatgagttgtacttcctacataaattaggtggtggttcctatcccatttaggattgcataatatctaagaatcaatcaccaagttgcttagatccattttgagaaaaaaattggcagcatttccccatagttctccaagtacacgacttggccaatgcacaaacaaactattagttagcttaattatgcaactaacaatatgtcaccttatccaaatatgcacccagagaacaataggaataactgtcataatctttcaatatggacaaagcactagcaagtgattagataaatattatgtacttctaaactatccaaacggacaattcaagcatcatttgaagacaaatcactaatcatatgctagacatataagttgtcaacttgaatttggcgcaaagagagtcattttcataattttacaacttatttgtcttaagtatatgataagatacacttgtcctacactaatacttaaacgagatgtctaaggtttcatgcatgtagtttcattattaataaaaagatgtttgttgtttttcctaaacttatttcatcaagtttagttcttctaacttaaattgtattaatatgaaaaaaaaattataattacaagataaaaataatggtataattaacatttcaagatataatacataataaataaaataattaaaaatgatttttttaattaaaattataaagggaattatgtaatgtaccattttaacataagttgttgaaactctaaataattcattttgtgataataaaaatgtaaatgaaaagcactacatttttacctaatccttgaagcaaatctaggcaacaatgtggtaaagcacaaataaataaaattatataaacatgtcatttataaatttaattgatagaacatatagatgatatataatattaatctattatataatatctaatatattgaaatggataggtcaaaggtaacaaatcatattttattaattagcttaaaattctattttcttatcaaaatgtattttccttaattaaattaactttaaaaaaataacaatttaattttaaatattattcttttgattgaaattacttaatccatgcaaaaattactcctccctaataactactttattatttcgtattattttactaataaagtgaaattaaataaattaattaaaatgatgacttttatttattaatataatgtttggattaactcacaaaaattattttagtttttttaatattcttcttttcatttaaattacttaatccatgcaaaaattaccccctcccccctaataactactttattattttttattattttactaataaagtgaaactaaatgaattaattcaaatgatgattatttatttattaatataatgtttggattaactcacaaaattatttcatttttttaaactaccataaactagcattattttaactaattttctataaactaatttttaataacctaatttatatcctctcacatctagatttttctatataatttgcttgtttccactagtcaaaaattttattctactctaaaaacctgaattctaactaaaattatttttacattagtttacattttcaatttcaaattatttttagttcaactcaaaccaaattattagaaaattttgttaaaaaattaagtccattggagagaaagaaaaataaatacttattaaatttaaacacaaattatttcaacattttgagtgaaatagagagaataatcaagtattaaaaaacatgtaaacaaataaaaaaaaaccaataaaaattatatgggaacataccggtggtggatttctgtagtataacaaacctatgaaaatggtggataggaagctttgtcacctcgataaactttggtggagaatggtggatatggcttgcaagtagggaacaattttttaagaaagtagttgagatggtgaaaatggtggaaggttcaggaggttatggtagatgttagagatgtggtgggaaccagaaagtgatactctttttcattttcaaagttacaggcaaatgatagagagttggtgagaaagtcttctcacttttcaaagttccagtgctacatgggtacttgggaaattgtttttttttcttttttatttcactttcttttcatttcatttcccaaccagtactccacaccatccattgtgcggtctctgcaaccaaatctcagtatcatgctactacaactcggcgcatttaatgcatttcatgatgttatatgttttatattatttaaaatttagaatttaaaaaaatttaaaatataaatataaattaaaaataaaattgaaactttattatttgtctattattgggactatttattatttaaaatttagaaaataaaaaaataaaaaaaattagaatttataaattacaaattagactaaaaataaaatgtaagatttataagttttgtattatttaaaatttagaaatttaaaatttaaaatttaaaaatcagaatttatacattagaaattagagtaaaataaaaattgaaatttaaagtaaggaataaaaatcatagattaaatattttattaaaaaacatgtaaaagtgtaaaacaatccttgacaaattaatagttataatagttgctacttttgtggcataatttatgatcttattttagtagttaagataaagatcattaatacatcataaaattatttaaaaattaaaataatcaattgttaattaagaagtggttagataccttacaatttttttttttatgtatataatatattactaatatataatgcattttttattttctaaaataataatatagtagttatgcatatggtacaatgtattgtatcatatgatatttaacttacaatcatatattcattaatgatatatgatatctttataaacataaaccatatttggaatttacatcaatagaatatcttgacaaaaattaggttattatttgataatttctaatattaacaattatttaaaaactaaacaataattaaaaaaatatttttattaggttaatctaggtaattaaatattagtataaatttactttcaaagtgaataagcctaagtttaacaattcgtgtcaacaggttatctttatctttttttattttcttcctcttatatttcaaatgaaaatatcaaatgcaataaaacactataaatataaatgatatactattttttatgatatgttacaattatttttataactatatttgttttacttgttttatttaaaaattgtatacaaatataaaaacttctttacaagttagtaggtacaacatttactattttgtgatataatttatgattttatttttaataagtaatcatttatgataaattaatatttaacaattaaaaataaaaatttataatgagatcaataaagtgttcagtcttccccagtttacaaagttaactatacaccactagtataatcattcatttgagttattaaagtgtctatacattatatataattatgtttacacctaaattttatatacattttaaatactaaaatgttaagataaagttttaataaatctattaattttaaatatttaattttattttccatttaatttattattgaaagcacaaaaatcatgaatgaaataaaaatataataattattcacatattataaagtaaataaattatcattttaacattaaatatgtcttcaaatattgttgattattataaaatgttacaatttatatcattcatatattaatttcttcatatacccattatattatgtgtgtgtatatatatatggcacattttttattttgttattaatattatagtagttaggcatataatgccatatatcatatcatataatatttaattgcaatcatatatgtattgataatatatgatattttttatacacacaggtattatttgaaattatatgcaaatatactgtctttataaacattaggtaatttatttgataatttcaattatgaaaaactatttaaaaaccaagtaataattataaaaatctattaatttaaactaggtagttaaatattagtataaatttacttcttgagtagatgacatgattttgaataagaacaaattagaggatcattacttattcataactaatttaagttcaatactatattaaacttgcaaaaataacttttacattgtataataaaaaagatttaaaattatttatgtttggttaacattatataataatattgaaatttaaataaatttatattatatcttggattatttgttattatctatataaaaaaatataacatacatattacactataaaaattaattgcttaaataatttacctttttattatctcataacaatactattattacataacaaaacatttaaatttctataaatctatattctagtatttaattttatgaatctttaattagtattattattgttattattatatataaaatattataatttaaatatcaagtctcaaaaaatacgtattatattattttatagcataaatcttttatccatttgtcagtatgacttattactattacaatttagcaacactattcaatgacaaaattactcattttgttagaaaataatatatttactgatgaaaccattttgtaagcaaatatggataaaaagttgtaacttttagtaaggaaattattttcgtcacaaaaaaaaattgtatttagtaacaaatattttcgttggcaaatagttttttttcatcacaaaagcgtttgcgcaaaaaaaaaaaccgccaaattttcccgccatgtcttttggcgacgaaaattcaaattcattacaaaaagttttcagaaatttgacattaccaacaatatctaaaatttcatcgataaaagttatttttagcaacaaaattacaattcgcccctaaatttttgtcgggaaaaataagttttcttgtagtgccagaatcttcttgccatgatgaataggtcatttttgtgtctagaagatcaccaaattctcacctattgagaatatatcctctgtaactccttgttcccatgggtagagatgagaaaaataatgcactccatgaacaggtaccagaaacaggggaatacgaaaaaaaaaaaaaaaacagagcacaaagtgtaagagtaaaaatgaatccacacaagccacatttcatactttaatcgatgtgcttagatgtaggggtgggccaaaatagatttcaaatgagttttaaaacaaaatcaagacgtggatgccaatgtctcatatgaaatctcaaaacaaaggacatacaacaggttagaaaccaagcataaggtgagtgcaagcaagctcaaattccataaaaatgagcaagagtcctcaataagcacattcaagcatcaaaatcgaatctcataacacccagaagacacaacaaaatggcatgagtatgaaagcatcaacagcttgtggaaataatacatttgtcaaactctttcaagatgattcttctgggtgtttccttccctttctgatcagctctctcttccaagctaccaaccaccttagctcgtttcctcttcaagctctcttctctactcaaaaactccccagtcgaccctactagactcccatgtgtcttgccatccaagaaaacctccaaaaaagatctccttgtccctcaacagaatccgctcccctctttgtaacctatcaaaaacccaaaaaaatcatttttcctctctagcagtttgctccccaagccagaaaaacaccctctctctagttctctccaacaaaatctctcatctagttctctccaaccaaacctctcctccagttatctccagcaaaacttctccgtggcagcccagaaaaaatatatctcctcccttttagcttgctcccccaagctaaaaaaaaatccccctctcaacagaatacactcctctgtttagccatcttgctctctaagaaaaacctcccaaaaaaaatatctcctcctcaaccacaaaatcacctctctgcttaacggcctcttacacccttataacagacacgctaccaaaagaacgctcatctaccgaatattccctccacctatctctttcccattgcatccctagaaccactaacgcaattctctaaagaccaatcagaaattgacatgtggctacccaaaatggtgacacctagccaaaagaagctataaaaaatgcatgaaaatgagccccaaaattggggtctacactttactttattatatgtttggttgtttgtctaacatatttatctaattcttttagtaatattattgtgtagaaaaggtccgctataaataatgaaaatcgtgaaaagctttcattcaatcattgtgatggatctaaaccatttacatattatcatcaccataactcaatgatataatatatacttcttaattatatctttaaaataatatttttattttattctatttatgtaaaaaacatgtttaacctagaaatttgtaaaagagagtttattaattatctttaaaagcaacttaattatttttttttttgtgcatgtaaaaaagtcttaccattgaagagttgaaaatgaagtggagttattttatgccacctactacaattaatgcaagtaaatgatggataaattatactcttaaatctcaatatgtaagagtcatgttacttgtagtagtaaaaggtaaaactatcttttcattatatgttatggtaatatttttactaattgaaattatactatattttcaagaaaaaatgcatgagattcaagagaaaagtacccagaaggttggtactcttgtctaacttagtaataactcattgagtgctcaagaaatgattaagtaatgttcatggtttgggatatggatcacaacttaagcgttcgagtgcaactaaatttcctaatgaagagacaaagaagttgcgacaatagattataaagttacaagagtttaagactacaactaccacttaattggaggagttgaagacaatgatatagagtttcatgccacaacaaaccaatacttctaactaactaccacctcattttagcttagcttcccaaccaccaccttcactatcaatttgacgttattaggtggtttactattatatgttagtcatttttcttttagataatattcaaatagcatagacaatgttatttgcaagtatggtttgcattgataaaacaaatgttttgttattacttattttctataggttattgtatttttacattattaaattcttcattttgtatagtatcatcatatatttgaaagtgttaaatatcatacaggtttataaatgtttcaataggattatttaactttttaaaaattaataataatattatatttaaggaggaaattatttcatcctcaaattagtataaatacgaaatttgtttcattatttcatctcctaatatgaataaaaacatttagaaataaaactatttcattgcctaaacatgattagttttaaagatgaaacaatgttgtctccaattgtaatgagaacatttagagacaagatttatttgttaccgaaactatatgtcaatatttcgaaatgaaaacatttcctccctaaatgtaagtggaaatattttgagataaaattatttcgttgaaactctatgttaacatgatggaaatgaaaatatttcatctcctaatgtataaagtaacatttagagatgaaataatttcgttgtccattgaaatcttgtgtgaccaaatggtttattagatatttgaaaatctaattcccaacaaaacattttactttatgccacaaaaaattctcattgccaaatagttttggccatgagatttcatttcgtcatagatacgttttcctaacaaaatgtaattattcgtctccaaaactataggatgacacaattatggagacaattgttgagaccaaattttttgtcaagaaatccttttggccacaaaagaaatattgttagagacaaagcatttcatccttgatcatgtaatttgttgtaatgacctaatatcggtacaaacaatacaaaccaacgcaaaaaaaaacccacaatgattcctagtagtccactagctataaaggacggaactgtcggatcattagccggccttggagttgaaccagttggagttggagttgtaggatgcctagttggccttggagaggcactaggattgacagtcggagtcagagttgcagttgcagttgcagttgcaacaagatgcatggttgaagttggagtggcaagagttggagaggcatcgggattagcagtcagagttagagttggagtagcaacgggattagcaatcggagttagagttggagttggagtgataccgtgattagcagtcggagttccaacaaccattgaaataagaaggaaaccaatacccagcttcccattgttaatagtgagaaagaagatatggagatggaagctatgtatatatatataataagtccttgttgacttggccaaatgcttattaaacctaattgcattgttaaaccaaccatcatccttttaatcccttcataataagttttagtccattactagctatcattgtgagaatattcgcagtagttgcttttgcaaagcgtcttcacatgggcaagtgagtaacgatcacacaatacacattttattttattccttctaatgatctgagtgtttctcatgccatgatcattgagttcatgggcaggtgagtaaaaatcacatgatacacattttattttattcattctaataatttgagtgtttctcatgtcatgatcattgagttcagatgttggttttcactttaatttgtatcagtatttaggtcttctatcttttgatgtgaagaataataggaggagacctcgtctgtcattgggagacatttattacattgaaataacaggattagttttatcatgatgttgagaatctcaagatcttgtacgcatttttagtatttattttagttttagttttgatttcatctattaaatattgacctagtagaccccaatattaggattatttgctatcttggaatgtcattcagtatgaatttgctacattttccttctaagtcctatattaaataattatctatggaaatgactttttgtttttcacatggcctaaaacttaaacagaagtcaaatcataatttttaaatgacaatattgatattatagaaactttattaaatatgaaaattttcttatataaattagagtttttataagaaacaataatgttctaatttttatatatattattttttgtaatcataatttttttttaaaataaaattaatcaaaaaaatttaaaatagaagggtatttaacctctcaaagcaaatcaaatttatatatcaatattcatttcactttaaaattgaccaaatctctctaaaatcagtgttgaggttctagaaaggctaataagtaaatatgccctgttattttactctcattttcctttcatcaaaattataccttccttaaaattagttgtcggtcttctcaaatgaagtgattcaaaataaatcacaatctttttctatgttctagttttttctcggcttttaattagatgttagagaatgaaggtgatgatggactattttacaatatccctaggcacattttcttaagaggatttcacatatcacaatttatttaacttgtattggttctaagaaaatttgatgaaaaaaaaatttaaaaaaatgaaaaatgaaagaaaatttgaaaattcataagtcaattttaaatatattttattttctttcttatttttcattgtaaatgaaatatgaaaatattattttcttaaatatttttttttttaataagttgtgcacactcacttgaaagttcaagcaatatgtcatggaccctaaacatacaatggttgattatttaaggatgatattaaacctaatttgtgacttaaaggctatcgataacaatctgactaatgagcaatagttgttgttcgctcttttctcgaatcataggtcaaatgaaacttgtgcttacacataatgagaataccaaaacccttactgatgtttctcaccatttaagttagaagcgaagtgcctacaggtgcaatacaccatacttgtcacccatatgaaaacgcaataagctaacaaacctaagaatggacaaggaaaatgtggtggtacaactagccattcgaggtcaaaaaagacaataaaaattaaataaaaattaaaaaacgccagatagacatgcgaaagggaaaaagataagattaaaatgaaatattataactacaaaaaaaagttgagtcactttgttcatgagtgcattgagccgaagaaggtatgcttgaatctcaactctctctattcatacacatgtattagttgatcattctcttcctaggtggattgttgactcaagagcaacaaaacatgtggcaagagaatgagtaaaacatgtagattatagaaggataccaattggaagacattacgttaccctaagtaatgaaataaggaagaatgttctaggagttagaacattccaatttaaattgtgtttgggatggacggtagtcctccttgatgtgttatatgcacctagtgtccaatgtaatcttgtttttggttatattcttaaattgggtttcctttttatttgttgggccgaagcttgaattctatttgaataaactatataataagaaaatgaaacaaatgataaaagttttttatgcatgcaaatgcaattagaagtctgatacatgttatgttgtgtgcttgacatatgcttcacaattagattagtcagttattacacaaggaactcatgccttgttcattggcaagtacttaagaggatttttgttacctccaagagaccaaagattttgttctttattatcaattaaggcagggacttcagatcaagaggatattatgatgtaaattgaactaacgataaagatgagtgcaactccaatataagatgtgctttcttgctcaatggcattaatataacttgctatagtaagaaatgctcttgcattactctgtctactatagatttaagtatgtcattttttcaaggatagtacatgcataagactttctagttaaggagattctttcaacacctaagagtcatgactctagtagaggagtcctattactattttcattaatattatgactactttagcatattacaagaatcctaaatatcatgcggtaggaccaaacacttaattagatgttcattttcactacattcaggatattgttacatagagggagttagttctaattaaaacatatattgactaacaacatgatggttgatctacctactaaagctactactagagatgtctttcaaacgcatattaagagtttgagacttcgtagactttgatatatattttaggtctggacactttttatatttgatatttatttaggggtatcttatgcatttattcctcgatcatatatgtaaattcatgtttagtatgattgataccatcaacatatattatttgattgtcaccgggcttatatcggcccactcacatgggcaatcactttggttgcttagatggtgagtagggtgggatgatatttattttggcactaagaaagtgagcaaatcaactatatttttaatttgaacatcaccttagctaggctaaaacgagatctataagggtaaaatattaaattattccataatttcatatgtcttgaacagaccaaatgtgagatgagtgactatgctaaaaaaaactcaagttaagcacttgaggaagcgactaaattaactaagatttatatgactttagagagtgatacacccaatttagtggaagcttcattgtaacatacatatcatattatatgtgttatctgtgactattggacggagtgattggatggatccttactccaatactaaatctttatagattattacaaagtttaccatatgcccctgaacctagaacatgtaaacaaagtttactttgtcaggaagtaagggttagacgttaccactttaacatgtaaactaagggctatgattgatacaatctaacaaaatctattaaaaaaatttatcaagtctaaatgaattggcatgagtgactagaatggctcatagcctggacaattatgttgtctttgtgtacgatatatgcccactataatggtcatttctgattggcaactggggtttattaacagctaagttttctgttgctgactgcattctggaagttcgatcgatttccctctttacgtggttctcataattgccattcttaatgatagttagtattactagtctcatatgcttctatgttgtgttattcatgacaattgataacattttgcaaccatctcatttccttgtatttacttgttacccaacttttgaacttgctttcagctattgtgattgctatagacgatgacaaggtgaagccatctccagttcctgacagttggaagcttagtgaaatttttgtgactgggattgtcatatgaacttgaccgttatattcttctgggcagcttacgaaaccaatttctgtgcggtacaacctcttgctcaatcaaatttggtatttcactcattgacttgaggaaaatcgattgctctttacactaattatcttggcactaacttgagcttactggctagtgaaacatgatttaacatctttttcatttgtttccgcagaagaacttcc

SEQ ID NO: 10357 - DNA, 2306 bp, Vitis vinifera
  Intron number 8 from transcript GSVIVT01013468001 (locus G SVIVG01013468001) derived from phytozome v7.0 (chr-ID chr1 8; pos 207715 to 210020 reverse strand)
ttctgcaaggtaagaatagggcctattgtgctgtttggtttatttgtttgtcatcttgtatttttcagtgcatctatagtgacctgccttgttttgttgcatttctaaataattcctggatatttggaagtacatggctgtgtgtaaaggcaagaaaataatctgttttgtggaacactgcataccagctgctttcacgtcgaaggtgaaatgataaaactagcttttatggagaggaccaaacgtttttagcaaacaaagccctctcttcaagggcaacatgatgccagggctaagaaaaaggaagaaagacgaggaatatagcagtcatgagaagtcctccttgttttcttccttttttcagtttgtaacacaccctaatagccacttcctcttctgaacccttaatagtctttatctttgctaaattaaaagttttctaccccttcaatttgctttgttgatgtcttggaggtgccttatttatttatttatttttaatttatattgcttaattaagactatttttttatggtttttgagaatgcttcttgaaagttctttttctttttgagggggatgcaatcaaccaccatgactctaccttgaataatgagtttaactcttcatagatttgagaatgtatggaagaataatggcaatatcaattcaaggcatgtgtatttttcaactttgtaagacgtatttatatagtgaaaaccctaatgggtcaggttcgatagtgggatttcttattcacgaaattccaaaattaaaaataaaaacccaaaaaatcaccctgatcacttaagagcttgcaaggggtgcttgagcactcctttggtattttcactttgtggcccttttccagattgcttctgtaaaaaatcaaatcatacctattttcttgccatttttcataccaacctcactaaatcatacttacctgaatgatcacatgtctgaatttattacttcgagtcttcaatggcaagtgtaatcccaaggaagtacgtatggtgaatctagttatgtttggaacaaaattgtcaatctaaactagctaatctagcttgcaaacaactatcttcacctagattaatctagaaaggatggggagaggtgactagattttttaacttctaggtgattttgtagatagggtgggatctagataagagagggagtagttttttgtgttttttcttcctctaggctattccttttgatattctttgtatgtgacttgtgtacttgggtgtatagtttttaatttttttttaaaaacttgttgggttctctaaaattgtttagatcagattcaaaccctagctatatcttcctattcaagttcaatcccagtgaaagtaacaacagaaatgctaagtaaataagagatcatacatgtgacatacatggaaaccccaaataatctgtatcttggaggggaattagaggatttctctgtagtaagactcaaatccactagaaataagaaggtagttttacaggattagtgaactctcatctaatccacgttcatgggcttgtttttcatgaatccaccctttacactgaatcctcataacactggcctattccaattgatgtctcaatggaagctgaaatatagctcctattaatctcaagaaattatcctccttgattgatgaaggtgatgtctctatcaaagattaaatacctgctcctattagtccatatatcattgatttgatttgatggccgattctttgctacatttggcacagttgttttaacaaataggttttctggttgagcaaaaagaactttgacgttcatgaaaagataatactcgtttttccatatgtcaagaatagtctctaaagcaaacttatcattctatgtggtgtctggaataaaattacttgaatttgcttgctggaactttatgcaactctatctggtgatcagtctgcattgaatggtgaagatatactgctcaggagttaccagctatttcatttgaacagaattgccatcaattactaattttggactaacaaaatcctaatgcttttcatatttttttttacagtactaataatttttgtagatcattaaaaatggacaagaaatgaactcacatgcacacagatatatgtatatgggtatatttatgtatgtgtatgaacagatcttctgtatgcatgtgtacttgtttctttatttcttggtgatctgtcttttatatatatagacctatggaagtggattagattagttgggattattgctgcagattcctgtcaacaaggttcagacat

SEQ ID NO: 10358 - DNA, 4714 bp, Vitis vinifera
  Intron number 3 from transcript GSVIVT01022926001 (locus G SVIVG01022926001) derived from phytozome v7.0 (chr-ID chr1 2; pos 17901214 to 17905927)
gaaaaagtgagaaaagaagaagaagagaagaaaaggtattcaatcacctcacatccttgttttaagttatattgtatttttcctcgagttgtttttatctttaggtaaaatctaacttccctatgcctttttttttcttttttttccaattttcctcttatcacattattgacttttgttgtattttggaagtccatagattaaatttgtatggtttttattagggtttggagaaactaaacttaagggtcgagcgacattctataagttgcaagattttggttctaggtctattatgggatttaaattttgttaagtttcattcacgtgcgattttgaattccttcttgttggtaaggatgatgagtttggtctgtgccccttggttttttgtaatatgatttggtagtgatttaaaaatctgttgaggcttaagccttgatgctcgcgtcaatgctaggttctggaaattagcattgaggctatgaccttgacatagggtaatagaggcttatgcctcactttttctaggcttacaaccttgaggttatagcctcgtgtctattgaggttatagccttgagtctattgaggcttaagcctcaaatactcaaaaaaggtttttaatggctttaggtctttttgagctttctgtatatctcttataagaggtttaagtctgaatattcaatgtttttaatgagttgtgcttttgtggtttgtttattttttttatttttttattttatggatttataagttttgccttgcatccaagactagggtcaaacttcttacaaagtaatggcttagttggttactaattaaccctttaaatggaaagggaaagaagaggttaaggccttatttagtaactgtttttgaaaatatatctgaaaagcagtttttgagaataatttttgaaaaccattctctgatgttttatagagcaaatgcctatttgggaatctgaaatgtttttaactttttttctatgtttttaaatatgttttaaaaataacttttatatgtagatctttatttttagtcattctccacatttgtataattgttttttaaaataacccttagaaaataaatgcaaacaagtaaaaataactaaaagatgttctatgaaaacaccttgttttttgtttttaagaacataaaattgttttctgttttctagttgccaaatatgttttcttgtttttttattttggagaacaaaaaattattttagaaaatagttaccaaacataccctaagaagtagaaatgaaaaaattataggccattgtagtggctaatcttattatttatagataaaggaaaatgatcattgcaattagtggatgaagaacaagaatgggtgaacattaacactaaaggaaaggatagtagaacaattagatatgattatgattcattagaggaagtgatgataatattgaatattatttgattaagcatgagagagttggattttagaagagagagagaaacataattagaaactattgacaatgacataattaattttattactctgaattttatggttttcttattatttaattttcatgtgattttatattattattattactactgccaatgagatttgcattattattattatagatgggacatggtccttttttgcaattagcaataaggacattgagatttgtgttattattattatagatgggagtatgggacatggtcttttttttgttagtgcatacaccttattggtaacaaggacaatgagatttggttttacatgactctgagattgtatacatcagcttgtctttttcactcatgactagtttcattttccaaagatcatttaatatatatgtttgctttttctaggaaaaaaagtgatacttaaatattaaattagagttgaattttatggttttcttattatttaattttcatgtgatttatattattatagatggggcatggtcctttttttgttaatgtatacaccttattggcaataagaacaatgagatttgcattattattattattattatagatgggacatggtccttttttgcaattggcaataaggacattgagatttgtattattgttattatagatgggacatggtcttttttttgttaatgcatacaccttattggtaataaggacaatgagatttggttttacatacaactctgagattgtatcaacaatattaattagcaatgcattcaacaggtaatggggatcttgggctatatgtactaaaaaaacatgcacatttctctaaacatcatcttatctttttcactcatgactagtttcattttccaaagatcatttaatatatctgtttgctttttctaggaaaaaagtgaggcttaaatattaaattagcattttttacaaagttaagagaagaaaaagttggcgattcctagctgtagaagtggaagtaagaacttgtgcatttcatgaaaattgagaacccttgagcattatgattcttttctgactatttaagcattgtgcactattcacaggctcaggccattgctgagctgtaaagggaaaagcttagcccagggagaatgtgctaggctaaaaaattattggctgctaattttgtttaacaagataaagaaacaggtcctcatctcttttccagaccaaaaagtgtttattgttgtctgcaatttgccatgttttctttttgcttccaattaacatgctaaaaaaagtactattgatggttaaaaagaaaaaatagtaggtgattaatggctttttgtttcaattgacagtaatccaatcacagagttttaatgctttatatgagatttctggcatcatgatggtaatgtgctagtaatccatgatattagattaaggagcttgtaaatgaagttatttttctcaacttagggaatattccttgtgtactaaactctgaggctctgtttgaatcgtagaaagtagcagggaaaggaaaaaaagtaggtaaaaattcaaaatatcttgtttggtttaccttgaaaaatacatgccaagaaaaatcaaatatagtgaaaactatttagaaacttgtgcattttccagttcttcattctttatgtaggagagaaaagaagagaaatagattggaaagttatgtgagaattttaataagctgaaacctatcttttattctcgtccattttttcttttcttccattttctcatttattttcttttcatcatactctttggttttatatcatgaattgcttccctgaaatgtttctcctgaaagacttaattgcatgccataaaagcatttgcaagaccaggggcatttataccagttgtctatattttataacatcaaaaactacccatgttaatagggatgtacggatgtaggttaacagatgcaaaatccattctcttgagttactgaaatgctttgtaagaaatcaatggtacgagtattaattagacatccttgcatatatggatggaattatatgactgttgttcatatgctttttagcctcccttgttaggaggatatggttatgggttcccttgatgttttctgggctggctaagttcaagaccaaccctaccaaatggttaggcttcagattagtgttttaggacagaggattggactgtgcctgggctatataatcatcatgggtttatggaaaatacttggaatacaacctaccaagatcataatgtagttattgtagcgggtgggttggtattattttgggaaatcctaagtgtaactactgtacttatcccatttcccatttttccgcttaagaggcctatctataacatgacattttgattatggcacagttaggagagatccaacagaatgataaaataattatttgattagccaccttggggttcatttttagtgaagaataaagtgttttttagttgtattatatatctttatggttattctttcacttctaacctatcagatatggcctaaaagggatccaacttacatcagtcttggctgacccaggtttaatgtttaacctgatccaacctgaccaacttgcagcctcaggggttccttctgtcaatttaaaatttcatgcttttcttggcatagaatcactagttcatttgcctttgctttatgcacccaacactcaatactaagagaaaaagcaatttattacacaacattcagacttctgattgtcaaaactgtatcttaatacaaggattggagtatttcggtgattgttagttttaaaactgcgacaggtttcttgacattcttctccacaggcttttctgaaggaagatactgctatagttcaacttgttatatttgatgatcaattggtgcgtcgtttatctactgttcaccagttttgaaactcatttatttggtcatcaattagaggtatgccttataagtataagcataaacatgtatttagtgccttcattaacataaaggttagtttgcctttcattgtagttatgttacatgatgtaagaagtggaaaaaagtggaaatgacgtttgccatcttgatcattgtttcaatttcaactgttgtctggttcaaagatgttgaaaatcaaaagtgctgcattttcccctccacaacagtggctactttccccttaactttttttcctgttatcaggcgtcaacaggaagctgaactgaaacttattgaag

SEQ ID NO: 10359 - DNA, 3590 bp, Vitis vinifera
  Intron number 1 from transcript GSVIVT01021403001 (locus G SVIVG01021403001) derived from phytozome v7.0 (chr-ID chr1 0; pos 4942526 to 4946115 reverse strand)
gatacgtaccagatgtctagggtggcaatattaacaatttgtacctcttcccagaaaggtgggggtgaaaattaaattaacatcttggcataaaatttcaaagagagaaataatcctcttgagttgcattattgtgtagagctgctctgtccagcctcccttacatatgctgagtactaaccacaaaagacataattttgcaaaatgtcagttgagatcattcatttgacaacattaaaccaggagtctgttcatgtttaaggatagtgtatctgattgcattacaaaagaaaccagagccatgcgaccaattattggcttgcatttccagattcagatgtctctgttagatttatatcttggatatacttaatgcctttgaaagctttttctccatttgttcattacttccaaactttgctttgcattcaggttttgggctgtttttgtggttcacattgcccattctcatgttatatttaaattaatataattatcatcatggtttatgaaaagtggaaattcttgacattttattcattacagcgaccttctctccccatttcatccaaaaccaggtcagcttagagcttggacaatacagttctctgatcatagaaagtagcaatcacgtttccatgacttttcctacctttagttttgacaaaagcaagattggcctctcacaagaaattgactgagtggaattggcaatctaggagaggggacaaaagaaggttttgtttttttttttttttttttttttttctgtgagcagccaacattttttttttaatcagaagtgagcagcgaacattgttgcataacttttagttgggagatgattttaaatgagtatctgatcaaaaggggaaaaatgaaaggagattttaaatggctagtaattttctgaaaactgactcctacatatattgttagaaacaaggtgtaagcaacattctaaggagacttcagagcattgcaactggaaaagtgcagttaaaatgctggagaatttgaaattactgtaatactgttccaatattatatttcaggacttgtaggatgtgaatactaatgatatctaaacgtagttatgattaacagtgaattttcaattacctgtcaaaaaaaaaaaaaaaaaaacagtgaattttcaattaaatcttagctgtatagtgaaaattagattctttccgtctgaagcttcattaaattgaaactcttgctgatccaaggtaattttgttgtcttttacaccatgctaatatattattccttgcccaggtcttagtaaatagcataggcagtgccatgcaagatcactatcctagtgaactccctaacccctggactgaaaaggaaaggagaagaataaactcctccattcaatgctagccttaggcttgactacaaaaagatcacaaccttatttcattcccaatcactgttcgttcatccccaaacccttgaaccaagtccttctctggtgtctaaagttgttttaatttctaatagtaaattaactaaatacaagcttggcactaaaagggaatttacctgcatccttctttttttcttacccaattaaagagtgagtccttctataattgaagagtgaattatcaagtgggtagatttgctccaatcaatagcagccttctgaatttataagtttattttatttcttctttgttatgctagcttgtttctgtaatagattaaaaaagcttccaagagattgtcaatggaggaggggacgaagagaggaaaactcacatggtaaaatggtagattttgttctctccaaaaggttcaggaattaaaagttcttattctcaatagtccctttctaggaaagtggtattggagatttgcaaatgacaaagatggattgtggaggaaagttgtagaggactgttttgaggtaacggagaggtggtggtgattaaaagaaggtgtggggattgtggatcaaggatttgaggagaggattggatggttttttggatgcttgtggtttatacctctgtaggttatggttttaggaccaaagcctggtcccatgtttagtatgggagtcttctttcagggattgtttcttggtgattgttgtcttggtttgccaatagttacgctctggtggtggattattggagtgtgtgaacagggaaagtggtctttggagtctgatgttcattagaaacttttaggaatgggaccttgagccagtggagagtttcatgtcttgcaattttcagtatgctgttagaaaggataagggtgatggttttgtgtggaagatctccaagtggggttctttttttggttaaaattttctactggatgctattgtcaagatccaatcctttttgctttcatctttgctgtgggattctagcatactgtccagggtggtttcttttgcatgggaagctgttatgaaaaaaatacttactagaggagcagaatcttaataatattgttgtttcttatgccagcagagaaagaagtctactaacctaatcctcattcactgtttcgttctcaaagatcggtcttttgtctgacatctttggagtttcttggatgctaccttcattagttaagaagccctggacattctgacaaggaagttctatgaggaagaatgagaggaaattttgaaaaacaactacagtttgtcttcttttggtcatttggaagaaaaggaatcagggactccttcatgggttggagatttgagaactaaggatgaaagatatcttccttaagttttggtttgcctgttctaagtattctctcaacaagagtagcttgtcattttgggacttgattgatagatgggggtggccaaaggctctttggttgatagtgttcagtcttttgatttttctttcttttttccctttctagcacatgggtgttctatgtatacatctaatgtgctagggtttcctcatttttagtagtcttcatatatattctatattctgtttgcctcgataaaagaatcatcacatatttgaacattaaagtgataaaaaaaggtgattcctttactacaaatattttttccatgtaaacaagatgagaatacaatattcattagtggcctaaaacaaaattaaaattataattgttgctataattctgagtcaaaaagaatagatttttatcacaagaaatttgatccaatgctataaaaaaaatttgttcttgattagagataatgattgttatgcaccttttatgtatgtactatatgtttggatgtctgtatgtatttatgtattcctttttgaagaatatgggggaaagaaaagggcatggggttaagatctcaggcggaaaggaatttggcttcccatcttgagagggaattacggaagcttgagtgcactgttagttacaatagctctccgtgctccttcaggggaaaggggaggaataacaggggttctacagttgtcttgtgagggagttgttttgtttcttatgaggtttcttgcggggggtggggggcggtgttggttttattgagtagggtggtaggttttttgctttttctctcccctcttgcttgactt

SEQ ID NO: 10360 - DNA, 8830 bp, Vitis vinifera
  Intron number 5 from transcript GSVIVT01034490001 (locus G SVIVG01034490001) derived from phytozome v7.0 (chr-ID chr1 8; pos 20476913 to 20485742 reverse strand)
attcagatcgcttgagatctcctgcaggaaaaacggtatgagtcttcttctattattgtatgtttttttttaactatatttgatatctatatatatatatatactatttgtttattgaataaactggttgtacctttgtactttcaattttggcagtgtatcttttttgagatgtatacagtgtccttacgttcattgtggagcaatgctgaacatagctgtggtgataattgcacttttgtagtagtggtgatgtcatgcttctttgaagtgtcaaaatctgcatcactgatatgtccggatgccattacttctacatatccagttaaaaccttatatgcatatctactaaaaaaaacacactgttctaattatatttcttgttcttggagatggttgtgtttgatgatcccattatgagttttgaagtcatagccagcaatcaaacatgtgatctatgaagataagatcttctgttggagtttacactgcatgtttttctggattatgtactcaatgaataatggcaaaacaatttattgttctatatttgtttttgtctttatgttgcttggtcttagaactttccttttccttttaccctttttcttcttggacaaagagagtattatataaaaagagtgccaaaataagcacaccaaagtacataggatgtgtacaacaaccaccaaaaggctccaatgtaaagaaagagggacaaccaaaaaaaaaaatactccctccctcaatgagaacctgaccaatccacaaagttaattaaggaggttaggccttcatttatgtacaacttggtccaggataacaaattactaagaaaagtgtgtttcagtctttagttagaaagctccttgttttcaaatgatcttccatgcctctacttccaaattgttcaaaacatgtgcaaaggagtggcttcccacaccttttttcatttcttctcgacaaaggacctactccatcctaagagggtgtctctaatcgaggatgataacacctaagagactccaaaaagagaaaaaaaataactgccaccgaacccttgtctcaccacaatgtagaaggatgtaatcaatcgattcctcctagatatgacataggaaacgtctgttagccaatgtccaatctttcctctaaggttgttccaaggtaaaactattccccaagtagcctcctaagcaaagaaacttgccttaggttgagccaaggaattccaaacaacacccattaggaaatgcattgaccttccctggggatttaacgtataaagttctactctttgactccaaccaaattaccttatcttctcctctcctattcacctctttcctttgagtcttgaaaggaatctctccacattccaatctctaatcatttagatgtctagtgaagcaaggattccatgaaccccctttataagattgattccataaatttgccacccactcctcttttgatgcaactttggcaaataaggaggggaaagattataccctcctctcattgcccactaaaagagggactattgttgacaatttcctaatcctttttgatggctttccataacccaaccttgtatttgtgtctcacttcttgagaatgccacccccctttttctccatatttccaacttatgatttgctttaagaaagcctcctttttcgatgcaaaacgtcttctccacttgcaaaaaagaggccttgttaaacgaagaaagatacctaactcccaagcccatatcctcttattatttgaacaatcaataacccactttacaaaatgtagttttctctctaaagcccctcgtccttggtgtcaccccccaaaggaaattcctttgaatatgccttaacctcaatctaatgttacttagcatatgaaacaaagacataaagtatatagacaagttagatagagtgctctaaatgagactctaccccctttggaaatatattaccttttcctcattgacaatcttttatgaaattactcttccacccatcccaagttgccactgatttacactaggcaccaaaggaagacccaagtaagtggatgaaggatttcccaccttataacctatatttaaagccatatctttcatgttctccaccctcccaattggaatcaacttgctcttcactaggtttatttttagccacaaaatggcctcaaaccacttaaacaactaacttaaattagccatttgatcttgagaggcctcacgacaaacctaagtatcgtcagtaaacaacatatgggaaactttcgctccctttccacctttgctcctcattgtgaagctcagcaaatgaccacccttcctagccctctcatgaaggcaactaagtgcctccatggcaagcataaacaaatagggccagagtgggtccctttgcctcaagctccctagagctttggaaaaacctagataggggtccattaacaaggacaaagaatttggctattgatatgcactatttaattcatttgatctaattttgggtaaaccccatattatctgatacaaggttattttcttattcttatcttttcatatactgtgatgctaatgtttttaattaggactttgttgattgagtgtttgaaaccatgttactactcataatggaagattattaatgttgtctgggaaaattgtctatagggaagttatgccttgaagatatcttcttcaacaatgaaatttaccattccaaccattcttccattccattcagtaaaagggatcaccatttgggatcttagtcacctagaaagtatgtgattccattactaggatgtgtcattgaagactagaataaaccaagcaaaatctttctcaacttccagaaaaatcattgaagggtaggaaaggaaataaaccatgaacatttttggaagatgattcaagtgcgtaatgaggtgcagtcaggaaaaaaagtacatttttttttttaaattgcatgctcaatattagacataatgaaaaatattagaaaaagtggttaaacataaacaaaaaataagtcgaattcacaagtacatgtaaggggttgtattaggaagttggtattaaatcataagatttcatttcggtctctattggggggtgtgtgtttatagatataggcacgaggttgaattgggaagttgatattaaatcataagatttcaaggaaagggtggtgtgtgtgtgtgtttataggtataggcacaaggttgaattgggaagttgacattaaattataagatttcaaagaaatggtgtgtgtgtgttttataggtataggcatggggttgaattgggaagtcgatatcaaatcttaagatttcaagcaaagggtgtccggggccttccaatttctcttttctgaaacaaggggttgaagacctagtatcattgggatggcctttgaaatattatgaagtgatgatgttaggatgttggaggtttctttctcggaagatggagttttttttgccttgtgtagcttgtgtaaagataaagctccattgctagatggttttattgtaggaaggcgtagagctagagtgtcccatttgcaatttgcatatgacaccatcttcttttctatatcttgttcggaagaattgcaaactcttaagattattttgttaatgtttgggcagatatctggacttaagtcaaccttgacaagagtatcctctttggcatcaacattgattaggtttagctcactagattgacattgttacttgattgtaaggcttttgactagcctcttccctatctggatctcccattggacttaaaagacttttgttttttgggattatgtggttgagaggatttcgtgaagattagatgggtggaaaaaagcctatttttctttaggtggaaggataactcttattaaatcatgtctatcctagatttctagctatttcctctccttgttcaagatcccttcttcaatggctagaaaaattgagaaattgcaaagagattttctttcattaggggctgtggagggcaagagagaccatcttattagttgagatttagtgtgtaagtctaaggtagaaggggttctagggtttaggaagatctccttaaggaattgagctctattagggaaatggttgtggaggtttcctaaggaaagtttttttatgggattaggttattctaagcattaatgagacacatactaatgggtgagatgccaacattatagttacgtggtcacaacattgctcatggaaggccattacataggtctttcaagattttaccaagtacactcggtttgtgttgggagatgagttgagaatccatcttttggaagacttgtggtggggggattaatgtttgggttttcaaagtctatttaaaattgtcacaattaaaaaccttcctatttcatcaatccttgggtattcatatccttctcttggaactttaacttccattgtaacctctctgattttgagatagaagatctagaaagactaatgtcccctcttacttatttgcccttatcttcatccactccagatgctagagcttggtctttaccttcttcaggtttattttcatcaacgtctttctttgtagccttgtctaatcattatcacccagttcctttccttcctactaatttagtttggaaatcttaagttcctcttaaggtcaagtcccttatttggttagtggcacacaagaagataaacaccaatgacttgttacaaccgagaagattctacaaagctctcagttctgatgtttgtatgttgtgtatggaggatagagtcggtagatcatctttctttacattgttcattgacttcggggctatagcatatattatttagattgactaagctggactgagttcctcctatgagtatttgtgacatgatgaccattgcatataagggattaggaagctccattagaggcttggtattgtggcaaacagcttgtctagctttgatatgggttttgtggtaggaaagaaatgctaggattttttaggataaggtgagaattttagaggttctttggtataccatttatttccttgcttccttttgggctttttgcacaacttttaaggacattccccttaatgtggtttagcttcattggttgttggtgtgtaggtccaaaggtgtgggctggcaaggagaggttgttttgtgtactttcgatgtggtgtattgggtgttttgggggtttcaattgtttagttctttatttttaagatgatttcatatccttcttttgtactttttaaatccttatttaatatattaaattgttatttctcataaaaaattactttatggtttcatcgagtaaaaaccaaggtgataggcttctttaaggatttttttgacaataactccttcaagaaaagttcaaatgtgttcttagtcttgattccagaaaaatgtgaagctaaggacttgaaagatttctaacccattattaggccattgtctaactttttggaaaatgttttggctaactggctcaaaaaagttgtgggcaaggtggttttagttaccaacaagcttttgtggagggtagacacattttagatgcagttgtcattgcaaacgagaccttagattccatcctaaagggcactaatagcgggtcatttgtaagttagacattgaaaaagcatgtgatcatgtaaattgagacttcttgaagcgatcgtagagaaaatgggctttggccaaaaatgggtgagatggatgaaatgatgtatttccataaaaaaattctttgtgttagtcaatgggatcccatctagttttttccaaagcctaagggggttgaggtagggagaccctctcttcccctatctctttaatttggctatggtggctcttaattgaaatttaaggagagttaatgaagggggtttcatctcatgattcaaagtggaaggaagaggtgggaagggaatagaagtgtcccatttgttgtctattgatgacatcttatttatttatttattttatactaagagcaatgagaatatttaagttggggtttcatgtggtttgaagtaatataaggttttaagggtgaatatggagaaaaaatgagttataggggaagtcgcaaatgtggaaggtttagctttaatgttgggatatagagctaggagcctacttattatatacttgggcttgccttttggttcttttcacaaattagtgatgacatgagatttaatgaaggagaatttatgtcaacaagagaaagcttatcttgttgaagagacaatatctattgaaaagggggagactcaaccttgatcaaaaacacattgtcaagtctactaatttattttttctctttttgtcattctcattagagtgagcttaagattagagtatatttgaaggaatttcctttagggtgaagagccgctcgagagaaaaccccattttgttaactggtctatcatgtgtttggacacgaaggattgaggatttggcaatagaaatctccatgctatttaacaaggctcttcttggtaaatggagctggagatttgcttccgagtgtgagtatcttctggaacgtgccatttcagggaagtgtgagacaaaaaaaaggggttggtgcttgaggttggtgaggaatggctatagtgtgtgggttgtggaggactatcaaaaatggttgggaagtttttaaaagttgaactctcctcattgtgggtaatggaagaaggataaaatagtgaaagttatttgtaaaagtctttctcaatgttattttctttagtagtaataaagactcttggatataaaaatatgggaataggctagagaggggtgccagtggagtcctcgctttcacagatagttcaatgattgggaattggaaggagtagaggtcttcatctgaagactactatcagtttcaattagaagggatgatgaggatagattgggttagaaggaaactaagattgacaagttcttaattaaatccttctatgcttcctcaatctagagaagaagtgaaccttttccctcaagcatagtatggaacctatgagtgccaagaagataggtttatgtagttgggaagctatttggggaaagattttaactcttgatcaaattaggagaggttggagcattctgaatagatgctatatgtgcaaatgcgatgaagggtcgaccaattacttgctactccactgttctaaagcaataaccctatggtaattggttttctctatttggagtggcttgggtgatgcactcttgtatgggaaagaagaggaagaaagtttgaagggcctctcttctatctgttttgatattatggaggaaacgaaatagtggatctttcaaaggaggtgaacaattatatcaagtaatcaaaccttcacttatgtatatctttttagagtgtgctagggtataaaaagatgatcatcctatgtctatgatagaccttgtagcttgattgagcactaaggagagggaggttgctttttgtgttctctctttctttctttttttttcatttgcttttggcactaattgtatacactatgtgtaccttgtactctctctcttccccactctgccctagcacgtgtgaatcttgttggcatcaatggagaagattatgtctgataattttattgcctagaaatggctaattcctagttggagaacgttcaggtctctctctctctctccctccctctcccctagtttgtctggcaacattggagaagattcttatgattgataaaaatggacaattccttgttggtagagtttgaaaatttgatcaagagatggaaaatcagtttatttatttgttgttagtttgcccatcccctagtgagggattttttttggtgaggtcaagtaaaatgtgggattttgctgtcattttactagatttgatgatttctaggcactcctggaaattaactatgaaaacagccaatcctgattgggtttgcccaaagtgaggaattgatgaacatatggcccatcagcgaggaagaaaaattaagaattagggaacatatgaagacttagagaatttcatgaatgtgattagtggagggatctggctaccttgttttatgggctttcatgccagtgatttttggatggttttgttacctggctattgaaatctttgctctttatttatttatttatttattttcctttaaaagagatttgatccttgatcaagaagcatggtgtatctatttctatccatctggcttgtcatccacattttcaattttagaatttgatttccattgctcctgtatcctggtgccttctagatttttctttaaagtcctatagtctggtagtttaaacccagcctacctcctttattttttgcttccttatgaactctagaccattgcttatcctaaaccaatcttccatttgctgctttatgggacagtgttatttatctgtgattttcctaaatgaactgcaatgtgatccaatggtagttgcatcttatattagataattaaccttcctcctgaccagacccttctccatgcagtttctaatctaatttcattctttatgcattttcttccctgttcatatttgctatggtatttctctgctgcgccacacaatcttgaattgtatagggatgcttttggatgtcgactttattctgaatttttgatacatatttgcttgcctctgttaaaaatgtattttataattataatacgtacctaattttttgatctctcttcatttcagatctctcgtttgtcaaggaaaa

SEQ ID NO: 10361 - DNA, 4601 bp, Vitis vinifera
  Intron number 12 from transcript GSVIVT01027584001 (locus GSVIVG01027584001) derived from phytozome v7.0 (chr-ID chr 15; pos 15330592 to 15335192 reverse strand)
gagaagccatagacacattgtgaggagtcctattgtgatttataaaccatgaggatgaaggagacggcttaaaaaatggaggatatatacacgctaatgtgatgtaaaatttaatttctgtgttgataatcatgtgttgtgtaacactgaaattaattaccgcattatgaattaaataaaagtcattcttttatcatacaaactatttagcttaattttgtaattgatcattgtttttaaagctttcctttattagtggactcaaacccaacttgggttattcttgttggttgagttatataattcaaaattcatcaataatatttttgaaaaaacttttttctatgtatttacatgaaaatttaaatatgaaataaaacaagattttgagacaactataaaaaaaacccatatatttatatttttttctacaaaaaattgagaaagtataatataataaaatttgatatttttttgttaaaaatataaaaataaaatgaataatattattatatatgataagatgcattataaatattataaaatattaaatcgggtttaagttaaggttgggttgtttgaaccctagtccaaacccaatctaaattaagttcatcaagttgaaaagtctaactcaaacccaacttaagcattgaaaatgattatccaaacttgcccaaatattaggctaggtcgagccgacacggccaagttacacccctatgtttagtcgattaaggtagagccttgattaatcaaacttgttgagagtttgaacctcgatgatcacttgtcagtgcattaaatgcacaacaagtgaatcgattaaacccctttggcctttgaagtcttcaaattggaaaattataaattgaagagttttagatcatttattaataaaataacaattgtattcaattgaaaaacattttttattctcattcaaaactgttttacaaatacattgaatccttagcttgcaaatatttttatgcaccttcaaatccattctagtttcttattgcattgaaagcttaacttgttactaggtttgaaatctttaaaaactttcttatctactcattgtgagagaaatcattcaaatgagttgagcacatgaaaaggttgtaacgaagattcatacgaatcttagaatctaaggttgtgtttggttcccaaaaactactaaggaaagaaaaaaaatgcaaaagattttttttttttcgtgttttgttgtcttatgaaaaatattaaagaaaatcaaatataattaaaactattttaaaatttatgtatttttaaattattttatttttatatcgattagttaaaataaataaatgagtttaaagtatcaaataaaaataatttattggctcttaatctattttttatttttattcactttttctttccttctatttttcttttatattttattttcaatacatttttccttaaatttttcaggaactaaacatagcctaagtataaagagtttgaaaactttggttataaaagtcttaaaaatcatcaaactctcactctatcagaagtttaggtagagttgtcttagatagcttatcgaaccattatgaacgagtttgcatttctcttttctcaatttctttaaattatccttgttttgttatttattatttatttttgcttaacatttctcttctttcaaatgtaacaaagaattaaaatccaagaaagtattaaaaaaaaatacaaaatagatagggtcaaggtttttttccccatagtgttgacaactttagtccaatagtacaattaagttttacttacggactttacacattcacttccaaatcttattaatatagaaaaaatagagccactcatgttaaattctatgtacaataagttaagggtgaggttgggagcttttccatgcatatattaattgcatttgtcataatttagaagtgttaaaatatgatttttattgatatttgaattgaatattgttcacaaaggaggtggttaatttttaaaatacaaatttaaactaacttaattagtcaattgagctatcatagtctatttacccatactagtaatttcttaggaaaaaagtgtttcaaaatataagaatgttcaaaccgtattataagtataaaaaacacataggttttgtttggtaattattttcaaaagtagttttgaaaaacggttttttagaacagtttttaaaaattgttttatgatgttttgtaaaataaaagtccgttttgaaaactgtaatgtttttaacctatctttaatattttaaaataatttttatatccaatattttatttttaatcattttatatatttgtataattattttctaaagcaatccttagaaaacaagttaaaataataaaaaaataattaagaaatatttttcaaaaataccttattttctattcttaaaaataaaaaataggaaacaatttcttattattaaatgtattttcttatttttttattctaaaaaataaaaaattattctcgaaaatagttatcatagtttttagataacccaaaaactagaattcatctcaaataacacccaaatgaggcggaaatctcttgttgaagcatggttatagtctccaagggcattttttatgtcttggtttgattgtttatcattcttgttgaagtatagtcggttcttcacatcatcatctgccaattaatggcaaggagtggctatccttgggactagtagtaagtgggcgacttacagataaaaagcccattagcatgagtcggtcccaagcgccgttatatttgattttgttcagccacaaaacccaccacaattggtgagaaaaatggcatgaagcacatgccatggatttgtggaccaaattaaaccttcggcgcctctcttacgtggttacactctattaataaaacccactcatcatctctgagtactgcatgccatgtctcaggaaaaatgattcaagcttttgaattgaataccatttcttctgtgaagataaatcataaaaatgagaactcagtatggaaaaaatgggattaattggcgaccatatggctatccaattggttagtgattggtgaccaagaaaaactcatcggacattagcactacaaaagtgggaaatgatcatatgaacttctattggctagcaatattgggaattttttatccctttagtcactactaaccactaacaagttcccactaagtaaaggtgaatctggaagaagtaatgggtcttcttgccttcacatttgctgatgatggaagaaaaagttccatggaaaacctggagaaaaaggctttctctatcattttctcgagagataatgattcaagaaacattttttagttgttgtagcaaaaaatgtcaaaatgcccattaagaataatgaatatgataattaggcttatagatatgataatgatgaagaatgcatcggaaagcatttttagtggagcggtttttaattgaagtactttttctaaaagcattttttaaagaagtgtgttcatcaccctcttcttaaacaagcaatataaatgatttttaaaaaatattttatatacaactaatttattcaattaacctaaaaaaaaagggattacttctttaacattttctctagacacaagatataaaaaaaaatttctactccattttagcttaattgctatagcaaaaaaaaaaaaaaaaaagtgattaagagtatatttaaaaaaaattattaaaaatatttatggttgaagtgttttatttaaaaatatttttagaataaccacttatctaatcaaaacgttataagtgatttttatactttttaaaaagtttttaaattttatcaaatatatatatatttacaaaaataataatgttttatagtagaagtattttcttaaaaatgctcacagagattctaacaccaatacaatcgaaagcattttccctccaaaagattctttcctccttgcatgctacaatgacattgtgccgtacataatataaaaatggtggccacttgaagccgcaaacttggaaattgaagtcatcaactgtcaccaccatcaacgtgctaacattctccactcaacgatataacttgtctctcattctctaagacatgatctaagaaaaattttctattcctttctaggttaattattttagcaaaaattgttacaaaatacccattaaaaactatgaatataacaatttataagctcgaaaaaaaaggattaagaatgtatttaaaagtatttccattgaaagtatttataaaggataatcgcttatctaatgaaaacatctaagtgattttttaacttttttaaaatgtttaaaattttcttcaaaaatgtttttatattagaaatttttactacaaacggttgatgaaactccaatatcaatgatatgaaaagcattttctccacggaacattctctccaatgtcagtgccattgtgccatacattatttaaaaatggtggtcccttgcagacgcaaacttggacttcacaaacgaaaagcttctaaagataattaaagtaatcggttgtcaacaacatcaacg

SEQ ID NO: 10362 - DNA, 18260 bp, Vitis vinifera
  Intron number 1 from transcript GSVIVT01021280001 (locus G SVIVG01021280001) derived from phytozome v7.0 (chr-ID chr1 0; pos 3340369 to 3358628)
cggttttgttcactccaagctgccccaaagcgaaggtacgctcatttctggctttgtttggttgccttgaaaatggggcaattggaacaaggaattgtgtgttttgggtgttgttgtgctttctttgtttgtgttggttgaggaaacttttggattttttctacttttgttgctgagggaacaggggaggggaaggggaaagggaaaggtactacgactgttgttttttgttttcagaaaaaggaaagggaatggttcattggaaaccaaaccacgtgaagcgatgagaacgaattttgtttttcttttttaaaaattggaattttcctatcttttctaggcaaccaaacagaggattagggcattttcaccttttaggggtgtcatgttctacctcacacctcatggtttcttggatttatcaacggttacggagcagcagaaactaaattactagaatgccctcggtccttgcttttgtggtggattgagaagagaaccgttgaatctggagcaaggaggattgttaggtggaggaaagtgtagtacaaatagtgaactgcctagtgcctactaatcaaatagttttatctgttgaagtttaagggtatggaaacgaaagattacccaaaagacacaaacaaagaatagaatgaataaaaagaaaaacttatcagttaaggcgtgacaaatattgtccttaatccaccctcctcgaagacgaactcggtgccctatggtaccagtggtctacttccaggattcaacaactagcattaggtgcactctaaaagtgagatgtgtacaactcaggtttttgaataaattcttccaaatagatgtatgaaaatactctttgaaaaactctctggaaaattatctgaaaaattggtattcatattcatgttaagagagtgaggggtgacctgcttttataggtcactaacacagtcccaaaaggaatctacttgtaattaggagatgacacaaagtggaaggcgaatctacttataaaaagaatgagactccactaacacaatctcaataggactcttcccaaaaatataacactaatagaataaaataaaataaaaataataaataattctcaatagaacacttcccaaaaatataagactcataggataaaataaattaaaattaaaaataattccaaaaaataaaaatagaaattatttacactcttcctacaatcccccacagagagtaaacgtaatttttttatttttttatttttttttatttggaggaaaaaagaatccaatgcatcagtactggtactcaaaggctatgaaccagtcttaggacaaataggtattgaattacaaaacatggtgaaaataaatttctatgaaccagtgtttctttatgtaactcaagggacttttatccacattggttttctcgactacactacgagctgtacaaaataggttggcacaaataggtcatgtgccttgcctggatattcatgagagctctagagaacttgcttaagttctcataggaagtggccccacctctactctcatataggtgaatccatcaagtatgttctgcatttaaacataccatccataaggaatatggtattcattaagagtaaacactcaactttagtcaatgcagaatacactctatctacaccatagggatgaactctcatacaattagagttgatagagcacctcaagtcaacaagtgatttgttattacccatatgaacctacttcatggaattttcattctaatagattgggttaccaccactcttgacttttataataggcataagccacattcccctcgatgtttctcttactagtttcttatttagtggtttggtcaaaggatcggccaaattcaactctgacctcacaaattctagggatataacccctgtttcaaggggttgccgcacaatattgtgccttaggcgtatatgcctgttcttcccattaaatattttactcttaaccttagcaattacaacttggctatcacaacgcatagacacaaacagggttggtcttgtccataaagggatatctgctaagaggtttctaagccacttagcttcagaacttgccttttctaaggcaataaactcagtcttcatagtagaccgagtaatgcaagtttgcttggcagacttccaagaaactgcactcccaccaaggatgaaagcatatccactagtagatttcatctcatctgaatccgagatccaatttgcatcattaaatccttaaaggacacttgaaaatccactaaagcacaaaccatagttaatggtgcctctcaaatacttaaggactctatgaacaacagtccaatggtcctgattaggactttgggtgtaccgactcaatctacctactgcataagcaatgttaggtttggtacaattcattaagtacattagactccctatgatctgagcatactctatttgggcaacactatgttctctatttttcttcagctgtgagctaggatcataaggagttgatactggtttataatccaagtgttcaaacttccttaggatcttttcaacatagtgctcttgagaaagtttaagcccattaggcgttctagttattttaattcctagaatcgcctctgcctctcctaggtctttcatatcaaacttagaacctaggaatttcttggtctcacacacaaccttttggttagtttcaaagatcagcatgtcattaacataaaggcagatgattacacatgtgttatcctcatatttgttgtagatacacttatcagcatcattaatgaaatatccattagttactaacacatgatcaaacttgttgtgccattgtttgggagcttgttttaacccatatagtgatttaaccaacttacacacctttttctcgtaaggtattctattttgaatatgacatgtggatagaataacttccccccacaagttcaagggtgctcttgaacttaccaacattgcatcaaaggttttaagtaagtcaaaatgtgtcccaagttcactacatcaattgtagagaaaaccctttcctgccatctcttaaagaatgtcccattgaagggatcaattttagaggtgtcaagatgagtatgaactagggaagcttccatttggaaatatttcaagattgttggagtttaagggtatggaaacaaaagactagcccaaaagacacaaacaaagaacagaatgaataaaaagaaaaacttatcggctaaggcatgacaaacattgtccttgaaatagatccaccctcctcgaagatgaactcggtgcactagggtaccagtggtctatctctaggattcaacagccagatctcgcattaggtgcactctgtaagcaagatgtgtacaactcaagttttttttgaataaattcctccaaatagatgtatgaaaatgctccctgaaaaactccttgaaaaaactctttgaaaaattggtattttagtgtaaagaggggtgacctgtttttataggccactaagtcccaatgggaatctacttgtaattagcagatgacacaaagtggaaggggaatctacttataaaaggaatgagactccactagcacaatcccaataggactcttcctaaaaatataacactaatagaataaaataaaataaaataaaaataataaataattctcaatagaacacttcccaaaaatctaagactcatagaataaaataaattaaaattaaaaataattcccaaaaataaaaatagaaattatttacactcttcctacattatcatcctatcttatgcaaagatttgctggttctacctcatttatcgaaaatttcatattttggtaactgttgttttctttctggtcgaggagtgctttctacacaagaaagtatgggctcaatgagttatttgtcatcagtcaatagcaactaacattgctgcctggtttgtggtatttattagtatatgatagctgtctcaccaacttaaaaagaaagggatttgagtttcagtttgggaatgttttactgtttcaatgtgttctatactttaatttgcttgacagtattttcttgtctgttttcttttttccatgtaagagaagctctttgaatttgtttcccttgaagagatttttttagtaaatgtgctgaaaaattttcttcgacaccaatcaaatggctactttttgcaatgtctatgatttggttagatgtggatgacacaattgggtatatgtaaaaatcctaaagaatgtttctaactactatggaaacaataggacttaggggaattagtataatggttccaaaattaaaagaaaacactttattaaaaaatttgattactcttacattccttgtggagtattaacataagtctacacaaatttgggagattcatatatatcaccgactatttgtaagttcaaaaactccctaagttttcttaatccacatctaagctatttctaggattaacattagggtcattacttacggttggtgggcagggctaaggttttatgatgacccatccttgtatgctttaaacttcaatcagcccttaattatcttaaaaccctttttttcttctctttttttgatgttaaatttttgtccttgttaggacttgaacctcaaacctccaccttttatcacttaagttaggcctcaagggcaacaattgccctaaaactggccatctaagattcactccaacagtatcacttccatacccgctactcatggccttgacatgcgagaagccttccaaaaatgctaaaatctctacttcatcaaccaaattatttcccattgattttgaaaaggctctaaataatggttaaagcttaattttttcttacctgtataggggtttaaaataatttttatgtcttgacatgaaattacctggaagaaggggggaaggtagtccaagtgattatcctcaacgctaaaatttttatttcaagagttcaattatgatcaataagttaataatctcatgcacaagatttccaattatacaataagacacatcattttaatgttgaaaaaccccctagaaaacattgaggtgtaaaaaaaccatagtttgtttctcaacccttaaataatccactaaatatgagaaaattgtctacaattttacctgagaccttctcctagggtcttatattgtcaacacctatactcctcttccttgtccttgatgcaacactccctcatgctccttagtttatggtcaatagatactttcaagagcgattttgaaagttttgagagatggagactcaagcttaatgaatgaatatattctctagtgtcacaaatttcaacaaaattatcctttttattcttggaaaaaacctagagctagttttgggaacaatcaaacctttaattttaccaaatctcccctaaaaacatgaagtcggaatgaaactacacataaaatgaattgacattcttttttttttttattggaaacgacacagagatatattgatagataaaaagtacaataagaaggatgagaaatcctcccgccaaagaaaactaaactacaagaaaattacactgtaaaacaagcgaactctctataatggaccattccttatggagtacacaccgctaaccaatcaagttgtaacacattaaggggagtccccttaaaaaccttggaacagaaagcccaaagagaagcaaggaaaacaatagagtcccaaaaatactctgaattccttgctttatcctaaaaaatccttgcgtttctttcccaccacacaacccgaattagagcgatgctcgcagcttaccacaaaactacccccctcttagatgaaccaaaaccattaaatttgatggacatcatgtcaaagatgctccttggggggacccaatccgtcttagctaactgaaataatctgtgccacaacccaatcatcaaggaagaatgaaggaaaatgtgatctgctgattccccatgcttcatgcacagaatacaaatgaattgacattctccttaatccttttttggcgcatatggtatacattgtgtatactcttatgcgacctttttcaaacacgtgtgaaggaagaaaaacaaagaaccaatattcgaatgccctgtagggagtgcttgaacattgggttgaacatttgatgtcgattgtcttgttggacgtttgatgtttgactgtcatgctacacatttgaatgcttcttattacctatataagaaaaaacatttgaatgctccttattgggcatttaaacgttcccactaaaaaccaatccgaacattgtttctcatgcatttcctccaaaatttccaccataatttcttgttttagtcattccataagttttacctatcttaaatacgtagctatcttgaaggtgacaactttgacgtagtccaaaatcaagcttgatgaaattcaaagttgttttgtaagaactcgtttggcaatgcttctggtcgaagtgtttttactagaagtgttttcttctatagcacttttgtgaaaaacacttttgtgaaaatctagaaaaatgattctaatagtgtttttaataatatgtcatataagtacaaaaacacttttaataataataaattactaaaaaggacatttattacaaaaagaaaaatattataattgaagaatttctgaattccttttttgatttttttaggtacacaccatacacatatatatacacaaatgactgaataagaaaatatcaatctagcttgattctctcctaaaattaggaaactgaatcatcctaaatgatctctccttttttattcctaaaatactttcctaaattaaaaccctaactttgaatgccgaatttcaacactccccctcaagctggagaatatatatcatataatcccagcttgcaagttaagtcttcgaagttaggcctaggtaaagctttggtgaggatgtctgcggtttggtgcttggtaggaacatagttcaatttaaccgtctcactagtcaccttctctgtgatgaagtgtctgtcaatctcaacatgcttggtcctatcatgatgcacggggttctttgctatgcttatagctgcctgattatcacacatcatcagaattggagatgaactcgtttgtcccagttcactaagaatcctttttatccaaatcccttcacaaattccctgtgcaagagctttgtactcagcttctgcactacttctggctacaactgattgcttcttactcctccaagtaacaagatttccccagacaaaagaacaatatccagaagtggaccgcctgtcaatgatgtttcctgcccaatccgcatctgagtatacttcagtgtcacggttctctgtctttctgaagaatagacctttccctggtgtcatttttaaatatctaagaatcctgtagactgcttccatgtgttccttagtggggctgtgcatgaattgacttacagcactcactgcaaagccaatatctggccgagtgtgtgagagataaatcaagcgcccgacaagccactgatatctccccctgtctaccggtgtactttctttctcgataccaagtttcttctgactatccataggagtatcaattggtttgcatccaagcataccggtctccttaagaagatcgagtatgtattttctttgagagactacaattcccttccttgatctagccacttccataccaaggaaatatttcaaatttccaaggtctttaacttcaaactcttctgacaaatacttcttcaaattctgtaattcctccatatcattcccagatagaataatatcatcgacatagattatcaatatggccattttcccggcatgagacttcttgacaaatagagtatgatcagcctgaccttgtttgtagcccagcttcaggactgcttttgtgaatctatcaaaccaggctcggggagattgtttaaggccgtacaaggatttttggagtttgcaaacctgattctttgccatactttcttagaaaccaggtggtatttccatgtagacttcctcttctaggtcaccattcagaaacgcattttttatgtccagttgttgcaagcaccaatcttgattgacagccaatgagagaagaatcctgatagtgttcagttttgcaataggagcaaaagtctcctgatagtctatcccataggattgtgtaaaccctctagctaccaaacgagccttgaatctctcgactgatccatctgctttgtattttatggtgaaaatccacttgcaccccacgggcctcccaaccggcaaatctatgatagtccacgtcccattcttctcaagtgcatcaatctcatcttgtactgccttcttccattctgaaatttttaatgcctcttgtattgtgttgggaacctgagtatcatcaagagaagtagcaaatgctctgtaagatggtgatagcccttcatacgtaacataattcccaattggatgatctgtacatctcctaacacccttcctcaatgcaatcggcagagtagaatcatcaatgttgggaattaacacctctccagccctatcctcacctatgttctcttcaggaagacttgaattggagtcaatatattggccacatgttgactgtgatccgtgctctaattcctgtcttttcctcctcctgatgtaaacttgtaagttctcattagcaagttgtggggctataggttgaataggcatgggagactggatggtcatgggagaaggaacatttgtgtgctgggctagctggactgatgacggcatgggtgtggacaactcagtgggcgcgaattgggaaggatttggtgactctgagtgaaaagaaggtacaccctcaagaagagacttccaaacttgatgttcattcatgctctccccctgaacatgagatttgggatagaagaagacatgttgaaagaaagagacgtccatggtggtgtaaaatcttttgttggttggagaatagcatttgtaccctttttgggttggagaataccctaggaaaatgcacttattttctcgaggagcaaatttgctacgattttgaggatacacatgaatgaatgccgtgcaaccaaatactttgagtggtaaattagaagaggctgcacgggtgtgaggaaattgttttaagaaaagttgacgtggggattgaaaggtaagcactctggatggcatacggttaaacaaataggtagctgtgagaatagcttccccccagaaatggtttggaacattagaggaaaacataaggcaccgggcaacctccaagagatgtctattcttgcgttcagccaccccattttgttgtggggtgtcaacgcaagaacttatgtggataatgccgtgattttgaagataagtactgagactactagtaaagtattcctttgcattatctgacttgaggacttgaattttggaattgaattgattttgaaccataagattgaaggtttgaaaaatgtgcccgacctctgacttttctttcataaggaaaacccatgttacccgtgtatgatcatcaacgaatgtcacaaaccatcgagtgccagaaatattttttattcgggagggaccccacacatcactatgtactagagagaaaacagtcgaaggtttgtatgggatttgaggatatactgttcgagtatgctttgcaaactgacaaatttcacaatgataagatgttggatttttattgataaataatttgggaaacaattttgctaggtaaacaaagctaggatgaccaaggcgatagtgtaacattataatctcactatctttattgatcttagaatttgacacagaattgaaggactctaacatactctgagactgtatgcaacttgcttgagagacttagtttgagaattggccacatgagaggaggtagagcccaaaacacagttcagcactgccaatcatcttccccgatttcaagtcctgaaaaacatacgagtttggatagaatttagtaacacattggagatcacaggccaatttgctaatggacaaaagattacaatccaagtttggaacatggaggacagagtcaagatataagtctttagtaagttttatagaacctgtcccgacaatttttgactttgaaccatcagcaatatggacagatgaatgaccattacttggcttgtaattttgaagaatgacagcatctcctgtcatgtgatcagaagcacctgtgtccactatccacgactttattcctcctcgattagcagtgaaggctacaccggtagtactgccactgccaacttggcttaatagtttctgtagcatctccatctgctctttgttgaatggactcggctcgggaacagatgtgctctcagagttggtagccacgtgtgctctgccatctctgtcaacccgtggctttggtttccaatcagccggtttgccatgaagcttccagcaagtctccttataatggcctggtttcttacaataatcacaccaaggcctatcccgtttctgacgatctccaccactactattaaatgaccgagcagcaagggcagagacatccaatgttggggcaggttgctctttggatcccatcatcactttctttctactttcttcacgcctaacctctgaaaaagcctccctgagacttggaaggggtttaatgcccatgattcggcctctaacatcatccaattccctgtttagtcctaggaaaaacttgaacagtctcttttgttccacaattttcctgtatgttgctgcatcatcagaacattttcatgagtgagtctcgaataagtcaaggtgctgccaataccttgtgagtgtgttataatactgagtaactgtctgctctccttggcggaagtcatgtagggctgattcaacctgaaaaagttttgaaatattttcagaacttgagtaagtttctttggctgcatcccaaatgtcctttgcagtcccaaacagcaagaaattttcacctatgtcattgttcatggaattgataagccatgacatgatcatgctgttttcaatcttccacttcctgaaacccggttctgtagtttctggcatggctgtttctccagtgaggtactcatcctttcctttcctgcaaatgaacagcaacacagattgtgaccactgtaaatagttatggccatttaatttgtgtcctgtgatgagaataggagaggaatcactgccaccaaggtttggaatttcagatctgccccctgattctggtgacgtgacgctggatacttgtgatgatgccattccgtattttgtcatggaccggaaaggtagaagaacacttcccaaggcaggtgcagggattagagttgagaaaaaatagtcagaggacgccggaaaaactgatcggagggcccgcggaggcaaaagaaccccaaaagaggcacgtgcagggctcggatggcaaaaacaggtaagaagggtggttggtcggcgtcaggcgagcctggaggaggaagtgcgtcgccggaaagtggctcacgcgctggcgcgtgagatgcagtcgccggccggaaaaacgcgcgtggacggcgcgtggatggttttctggctcctgtagtttgggaaaaattggagatctcctccaggcgctccttgcggtgtagaaaaaatcgtcgtcggaaaagttcgccggaaaaattgtcggcggtgaatgttttctgacgacgattcgaccgtccggaaaacgttttctcccttggctctgagaacagggactgatgaccggaatgagagatggccagagagagagatggtcggattgagatatggccagagagatttggccggaatgaatgatggcctgaataagaggtggccagaagggattagggtttcagaaaactggctctgataccatgaagaatttctgaattccttttttgatttttttaggtacacaccatacacatatatatacacaaatgattgaataagaaaatatcaatctagcttgattctctcctaaaattaggaaactgaatcatcctaaatgatctctccttttttattcctaaaatactttcctaaattaaaaccctatctttgaatgccgaatttcaacaataataaatcaaaaacttttattataaaaaatatataaacatttatattgttaaaaaactcaaaaaattatttttatgattataagaaaatttttaaaaatatttacaaaaaattggattaataaataaacatcaatcatcatataacatcatataacattttttttagaataaaacaaattatgattaaggtgttcgacaaattcacttttgactcaatggaggtgtttggcacgaaaccattaggaactgaatggagctatttagatgattttaatttttcagacccatattttttcatatcttgttctccttttgttcgacgcttggaaaatggaggatagcgagaaagggtattttaagaatatttgaaattttttgaagtgtttttttttaaagaaacacctcctaagtgcttctctaaaaaacacttggaagtgtttttttaaagtttcaaaagtgtttttcaaaatattgccaaacacctaatttttaccttaaaaacactttcaagtgtttttaggactagaaacacttttaaaaagcattgccaaataggctttaactaataagacacaaggaagtatgtcacatcctaatcaataagaaagaaaacaaaattgtccatctaaactagtatatcaataggggctaagtgcctttaagcgggtggctacaccattggttatgcaatggtggtccttatgagctaattgttctacactttttacttggtgcagcttgttacatgggatgtgagtgggaacttggtttccattttggtatgcgcccttaaattattgttgcatattcatcttgttgtagttgctactgctgttttttttatcttcctaattaatcaaggaagcatggtatgctcctaggaatctatggtactttccacattgagcccaacatcctaatgcacccatgccacatgttaggtgtagttggtgtgaatgctagtccatatttagtactatggatggttccttggtaacctctagtttgattagggaaaccacatagaatgaatttactaatgaaggttacagattcactcaaagaggaaggaacttagaatggtgtagttgcctaaaaatctttgtcctttcacttaaccaaaaagttctcaaaagaatagaataaatcatactttcatagttatcttaattgaatcatatgtagtataaatgcaatttaattctatgtctacacatatcaaaatcctagcaacaatgtaatctattccatagatatcgggattggaattggccaacaattaataacaacattagtgttgaataaatatctaaatgtgttgtgtccaagtggtaaggcaacaagctttggtcccactattcggatgtttcctataattatatgaccatgtcatcatccattcatttgtcatcatttatatgattagctttgtcaacacaaaaatggctcatcttcttattatatagttggtgattttgttttttaaatagtcctattattggaagatttgccaaattttgtccataatttgtttgtaaatattgtaattgatttgtatgattgtatttctttccttatttcttccttagaaatttgcttgtaattaggttcccatatttagtcctaaattagctacagtcgacccaaccttttatctatatttttttgataagtaaaagtaattgtattaaaaagaaaagtatacacgatgtatacaaggaaacaaaaaacaaaaaggcacagatacacaaaaacaaccgcaccttacggagcttctaaccaatttacaaaatcaaacatcgacaaggagccctccccaatgtacaatcttacccaatcccaaaataaatacaaaaaaaaaagaactttttaaagaatgatctgaacattcacaattttcaaaagctctcctatttctttccctccaaatagaccaaaaaaggcataatggagtaaccttccaagccttttttctttttctaccaatagaaaagcctccccaactcaagagtaaacctctcactgaagagttcattacccattgaacatcgaacaaagcaaaaataagctgccacaatatacgagcttttgggcaatgaagaagaatataaacactcgtttcttctttctctttactcatgtagcatctattaggcatcttccaccccctctttttgagctgatctagagtcaatatgttagcccaagttgcctcccaagcaaagaagctaactctaacaagacgcaggagttctagattatactatgagggaaatgatccactcccctactagccaaggaggaatagaaggacctaacagaaaaaatactactctttgtgtcaacccactccactgaatcctcaatatccatagaaatagcatgatcatacaacctctcaaagaagatgtctaccttctctagctcccaatcattcgattgtctaataaacctaggattccaactaccaccatcccaagcatcagtcacccgagcatctttagagaaagctatagaaaaaaggtatgggaaagcatcccttaacggcacatccccacattatctatccttccagaacttcaccctgtttctagaaccaaccttgaaacgcattctaattttgaggtcctcccaaccatttctgagtgccttccaaacccccactccatacctctctctctcctcattcgtgcaccaaccctcatcttcttgcccatacttgccaacaattacctgtttccaaagagggtttcttttagttgcaaatctccaagaccacttccccaaaagggccttattaaaggtaaaggttccaagacttctaaatcccaactctcctttcactttttccaaacaaacaactgaccaactcaatagatggggtttgttaactagagccctcccaccccaaaggaaatccctttgaatttttgccaatctagctactaccctcttaggaatgacaaaaagggacatataatatatcggtaagctagataaggtgctcttaatcaaggtttgtcttctgccttttgagaggtactatcgcttccaccaagctagccttttctggaacctctcctccatcccttcccaaaccttagaaaacttaatagggagctccaagtgggaggccaagataggtggatgggagggctcccaccttgcatcctaaaacctctacaagctcctccaaatttgggacattccctattggaatcatctcacttttccccaaattgatcttcagccatgaacaagcctcaaaccacataaaaacccaacttagatactcaaggttttccttactagcatcacacaagattagagtgtcgtttgcaaacaacaagtgtgacacctccactcccacaccgttcttccctttgactaaaaagccattaatgaaactaccttcatttgccttagagagcaaataggaaagagtctccatttccaagatgaaaaattaggagacaagggatctccttgtctcaaccctctagagttatggaaaaaacctaaaggggagccatttaccaaaatagagaagcacattgttgaaatacaccatctgatccattctatctacttggagccaaaccccattttcttcgttattgccaagacaaaattccaattaacatggtcataaaccttttcgatgtccagtttgcataagacacttctcaaattattcttaattctagagtcaatggccttatttgcaatcaacacaacatctagaatttgtctccctgccacaaaggcatgctgaaaatctgaaactaagaagtcggtgacctttttaagcctatttgctagaaccttagtcaaaagcttgtagagttctccaaccaaactgataggtctaaagtcctttaggtcgtctacccccctttcttaggcaccaagactaagagcatagcattcaaactcctctcaaaagaccccaaaccatataattcagcaaaaaaagcccattacctcaggtttcacaaagtcccaatagtgccgctaaaacatcaaggtaaaaccatccggacccggggccttattattgcccaaattggataaagcttcaaggacctctttttcaaagaaagtagcctccaaaccttcagaatttgcacgctgcagacagtcaaaggctagaccatctaagctcggtcgccactcccttgtttttgccataattctttgaaaggcatttgtgactgcttctttgatactatcctccccatctaacaaaacaccatctacccttagcttggccataaagttccttcttctatgagcattggccattttgtggaagaaactagtgtttttatcccatttttttagccacaactctctagacttttgcctccacaacatttcctccatctctgcccatttctttaagtcttccaccacaccccttctaaccttagtttcctccacagtgggggctctttccctttcctttgcatcccaaaaccctaactgagccaaggcctccagtttcttggtggtcacatttccgagaacctccttattccaaattttagagtcctaataggttattagagtctaggtagactttgaatttcttagagaagcctataaataggctaatcaatgtaaatcaaagggatgaattgatatgaataatattatattttctttcattgcaaggttgcaactctcaatggtaagactccattgattttcttctaggtgagactcctagaaggccttagtgagactctaaggttttccatcttttcttcattgtttcttttttctctctatttcttgtcttataattttctccaccatataatttattctttgttcctctccttataccccaaaaaataaaaccctagtccacctacctttgagtgtaggcaaccatcctagggttgtcctacatgaaaacaacccctctctacatttttttagacaatttggtaggaacacaatcaacgagtttttgaagataaggaatagaatgatcaaaagataaagactctcgttttgtaatctttcagcttgggttagtatgtacattagtgaaggttcaatgccttagtttgattttgtagggtgggtggggtcttatcgaatatcaaggtgttttttgtgttctattttcaaggccttgcttaaggttttccttgtatacatcttgtgtactctagtgtacctttttcttttactaatttatacatacctatcaaaaaatttctaagaggaaatttagttctttagagaagcagaaaataacatattatggctagatctagtgcaaaaactaagtttagatatgatttagggtatttgtgagctattatggctcaaaattatattcatagatcttaagattaagattaaagagccaaagatgttatactgtgacaacaaggtggttatacatatagctcataacccaatctatcatgattgcaccaaacatgttgaagtggattgacactccatcaaagagaaagtggattccgaacaaatttgtacaccatgtctcctcaactatgcagttgatagacatcctctttgaaggtttaccaaatctggttttccatcaaatcttggacaagctaggaatgcaagacatctttgcacttgctcgagggggagtgttggaagatttgacaaattatgttcagatctgaataactataatttgtttataaatattgtaattaatttgtatggttgtatttctttcctaatttcttccttggaaatctgcctataattatgtttcctgatttagtcttaaattagctatatcttagtcaaccttgtatctatataagttgtactcatcctttttgagaagaaagagtaaaaaattattcattccttcacatgttattttttattagaaactacaattcattaatataaatttgaaaaagtacaagaatgaagaaccatcctaaaaaaaattatataccaaaataagtggacaaagcaaaaactaaatagtcatattcacaccattattttttgtgagttctcatcttacaacatttatttatcttctgatgcttactaattaatgaatgtcatgtagtgg

SEQ ID NO: 10363 - DNA, 2340 bp, Vitis vinifera
  Intron number 8 from transcript GSVIVT01033615001 (locus G SVIVG01033615001) derived from phytozome v7.0 (chr-ID chr8 ; pos 19261865 to 19264204)
gctgttggaagtagttcaggaaaggtacaatatcactcatatcagttattaatataagatcatgttaggaatataaaattgcattatgtcactctctctctctctgtgaacatcacaaacttttctttggatcttgatcatattatatgcagcatcttgaacattgtatatgcagcagtttcttgatcatatgtagcaatggagcacactgtagaggccaaccatgtagaaaattgtcattttccttccctacagcaaggagctatctgcataacaatgtgtgcttgttcaacatgggctatttcttctctgtatgtgtttagtgataaaagtggaaaattgacaccattgaaccttttggagttggaaatagtttctttaatagatgaggcatttgcaggagtcattttcagtgggaaggagcaaagattttcttctattttagatgtgggagtttggtatttaacattctcattttctctggctcctttcttagagcgttgtctgcttctgttaatttgatctgttttattcccgaccatttattttggaattcaaaagccccttctaaagataaggccttcttgtggcttgtttgcaaataagaaagttgatatcaagaacatgcctcataagaggcggcctttcaaagccctttttcatggtcattgtgttatgtgcttggctaatagggagacaattgaccaatttttcttcttgtttctagcataagctgttcagatttgttgaaattgagtgtctcaagaagtgtgattttccttaaccaggttctatggcatatagctagcctcactatgatttggactatttggtgaaagaggactgtcaaggatttttagggcaaatacagttctatggaggctctttgggacttcgtttatttctagcttctttgtggacctttgccacatgaatgtctttgttggtatccctttgagtttgttaatgttagattgggatcacatttgtagatcaaggaagttaggcgggaagattcaacctaagtggttacccaacccaccccctccccccgtcctcccccttttttgttaggcaacctaagtgtcttccacccccagagggctctatataatttgattatgatggatcttttgtagataattcaagatagcttagtattggagagtgtccaaagatcattgtgatataatggtcaatgcatttctaaataggcaagagagggtataactattggagtagagactcaagctcttttaaagagttattgcaagccaaaactttgatattttcaggtttattgattgatggtgactttgctattgtcattctgtaaaattccaagttgaagcatatcctgctgttgtttcatgggtttccctagggagagaaaggtagtatgagatggaataagtggattcaggagacctgaaggatatgaattgttacttctttttgggtgactgagtagctcagttgctaagagaggagtttccatgcttgtgatgtttgttgggaatttattacccccttggttttaattaggtcctttatgtctggttattatttaggatgtttaatttcagacttatgttggtggtgttgggaccattgtttgtgattccatttttgtttttggattgaagaatagctcatcctctttgtagcttttttcttattgcttttggatgaaatggatgtttctattatgcgagaaaaaatagggcaagggaatagagaacctgcttaatgctggaattctcaagggagatgacttgctgaccagagtttttgaaagacaaagtgattaaacaacatctgaaggaaatgcctaaagtcctcctgccacactgaagaggggttgaagccttgagaatgaataatgaattctatgcagaggttgatttggagactctttgactgatgggtgttccaggtggttctgttgaatttggctaacacttaccaaagaatgattgaagttttaaaagatatgattaatggtatgaagaaaaggatctatttacctaaacatcaacaagttaagaggaggtgatgacaatgaggatcaggaatcagggacaagatttttcttctcttaacctcttggacgaatattttcagatttatgcacaatcttctcagcataaggcatttcttattgtggaacctcatattaatttttcagttgtcaccttgtaatttaattgttagtgtatggttttaactttatgatcacatattcagatttttaaatctacaaccttttgctgtcatctctattttgaaactgcatttgacagactcattcttgctattgaaatatgcaggttctgatat

SEQ ID NO: 10364 - DNA, 2794 bp, Vitis vinifera
  Intron number 18 from transcript GSVIVT01021648001 (locus GSVIVG01021648001) derived from phytozome v7.0 (chr-ID chr 10; pos 8715045 to 8717838)
gttgaactcaagaagatcagaatcaacctgttgatgtaaagattacttcaaaagataggatgaattcttacacaacagttcatgtcaatagctcaaaggaagtcaaaagtcaaagtcagagctagttaagagtacacaaagcaacattcctggcactgttaggtatatgtcatgggtttattatatatttgatattctttggtattttctataagacaacttaaagtgaaaaaatcatttttcttagtatttttttctttctttaatgtttcttgagaaccaaacataacctaagagattcatagtaatagattatctaagcataactaccagttgattgaatgaacatgaaaatcaaggtatcaatcttgagtaatatcttctatagaaacatagtttccaaatacatgcagttttaatgagatatgtgtgttaaagcttgttgtgtcctcaagtaatttagcatatggatttcctcttcttgccttgatagtccatagtacaattttagttgatatacatttaatttgtacgtgggattagttttccttaaatataaaacgaagacataattgtttgttaacttgagtaaattcttcacaatttcattaaatttttagaaacaactgagacattgaaaaaaaatgaattaaccgaaatctaatcattcaaataaatccatatttataatggacatccaagttgttaatgactctgcaacttgaaaacatactacacaaataacaatatgaatagtaattacaaattatgtacagacctaaactagactcgaagatagaattgtatgaggtgactttggagcaagaaaactagattatgaaaaataattttcatcggtactcaaatttcaaataagcaacaaatcaaatccttgaaaatatgactacaatcatatttttaatccttccacaatttcaaaaatggatggaaaaaaaaggaaaataagactcgatctataaaaattttcttttgtaaaatcatattttattatatcaataattggattatacgaatatattaggatatattgaaaaatattgattttcacaagtatattggtagttgaggtcattagtggctttgacctataagtgagaccctaacatggttatatatttcctatggattaggttactattgattaagacaagtgacaacaggtattttcaagacatgcatcatgatatctcataggtttgagatagtgtccccttgggtgatcctaaggatttgtgattatgaaatctatagtcataataatttctttagtggaatatatttatttacattgatttgagtattcaactaatatctcttacattgtacatgacttgggtgcattaggagttacacaaaggatacaagttatgggatccttataagtagataagttatccatggtgtagtacaccacctcctaattggaggcttgtcttagcaatcgaaatggatttcccatggtgaatacactaatggaatatcctttgtaaataaatttgtaaaattcaattttctaaacaaaattataaaaaatattttttaaaaaaaaataatccgttttctaaataaaagttataacaaaaattgttcttaaataaattaaattggattacttttgtaaataaaattgtaaaaatttatctttattaagagtaaatcaagattcaactttttagataagctcataattgtattattataactgttattatttttaaaaaattttagacaaagtcacctttttaaataaaaaaaattaaaaaaaaatccttaggtaaagtaaaaattccgttttaataaaagtcaaagaaaatttcctttttcttagataaaattcttttttttaagtaaattccttttctaaactatttgtaaacatcttctttttttaataataaaagtaactcaaattcttttccttttagataaaatttgtcaagatgtaaattccttctttaaagcaaataaagtccttttcaaagaaaataaaaatcaaattgcaatgctttcaaaattttgaaaaatatttttcttaaagtaaaattggataaaatccttttttaataaattcaaaacctttaaagacaaacaataaatttgaaatttctttctataaaatcaaagataattttttttaagttctaataaaattgtaaaactttttcttgaaccaagatataatgtttttgtaataattttttttagaaaataaaaagaattatttttggaaaataaaaaaggattgtagtactttttaaataatcttgtaaaaatcatttttgttataaaatatgagactttgtacctctatggtaacttgtagatgatcattcatatatatcttttgtaactccttgtaaaaaggagagacttctaatgaaaatttattttcattttcttcctacattctatcctacttttcttatgaagatttctatttattctctctgctttctttttctcattcttttattttacaacatgttatcagcacgacactttgagtatgtagaagagaataatgttcgagatagaaaacaagaagaattcatctataaagtttcttataggtatgtagtcttattttctttaaacggaatatgaaaaacagtatgcattatattatattattataatttttatttactttatctcatacctagaagctatgtaaatcatatttaatataatcaagccaaaagcttgtaattgtagatattttaattatttaataactagaaattatatagaaaaaatttcataactagaagtt

SEQ ID NO: 10365 - DNA, 2035 bp, Vitis vinifera
  Intron number 3 from transcript GSVIVT01006023001 (locus G SVIVG01006023001) derived from phytozome v7.0 (chr-ID chrU n; pos 23209640 to 23211674)
tttctgttctggtaattcccttcttccttaatatctgatggtaaatcaaataagcatgccagttatgaaatttttttagatattggattccatatgacattattgtctaagcttttatagctaacatgaatcaaaacaaaattcagataccccagaaatagcaggtcagtagtagtaattactcaatagagaattatttttttcatttcccatatggatagttgtttatggctgttaactttgctcctttttactagtagaattcaggcagtaagctaatccagtagaagtagtcctttctaatgtttcttttccttccacttggttggatgtgatccatactaggctaacctttttctcttgtgaaatactccatttgctggttgctggtttgctgtttgtgattctctttgtaactctcagaattataaatcttggatttagatgtttggactgtgtctttgatgaacctttaagtggcttctttcttgtttgattgtcaaatattaaacatttctctgtcaccctctctaaaaataccctttcgagttgagggataaatagagggggtgaatgggtctaacttaaaatttacaaggggatcgagtcaaaattagtgattggaatcaaattctttaaattttttgcctattcagcttcaagatttgtgcagatatgaaagtgttgtcacaatcaaaacacagagaatcaagaagggaacaaggcttttacatggaaaaaacccaaaacaggggagaaaactaggtgatttttgtccacaagcacctagaagagtaggaaaagtacaggagtaccaatatgtgcatgttgtttccaatacacaaatcctttccaaacttataggatacagcatagagttaatagagttactaaaacctgtatgaagtactcaaaggatttgtgcaccttaagagagatgaggaaagaaagatattgcatgattgatcttggatatacatggtttttgagtctacagtaggttaagtgatttaaaaggaatgatctgaataagtaagttatataaagcatggagctactaaaacctgtataaagtactccaaggatttgtgcaccttaagagagtctaaagcaggttaagtgattaaaaaaaaggcatggtctgaataagcaagcaagactttctaataaactgtccgatttagtaatctaataagttatatacatatgtgtatatatatatatattgaattactgatttcccatttgattaatccaatctctctcttggttaatcaatgagtgaacttttggcttgataaatcaaatcgagacaggttggtcaaagaagaaatttcttgctttccagacccagtttttacaaattccaaccagctgcgctcacccccttttttttgtgtatgcgttgtgtaagagagatgggaagtgagatgaatatcaaaatatctaatagtaacaaaatattattgaaaaattgaataggaccaagttgacattgaaaattcagaattatggttgatgtactcatcaaattaagcactgaatccctgttctagttccaccagttgctaaattacagcctggatctagtctccctttcaatttctagaagttcttcaaacatcaccaaatttatagttttagaacatgagttatttactttcattaatttatgcacaatggtgtttggtgcatgtgaattctgtatttttagagccttgccaccgagtcaatttgaacatcaatttccatggaagacctcattctgtaaaaattaaattgctcttattgttattatttttctgtcatctcactttatgcaagcaaaagcacattgacagaatcctttctgccaatggggatatctaatgtaatggtatttggtagcaaaccaacagtttggtgtggaaagcctccctccatttggagaagtgacttctgttgtagtggttaatgattgttttctttttgagcttcttaaaagttaaatgaagctaatgcctttcatcatgtttttttttataataaatatagc

SEQ ID NO: 10366 - DNA, 3913 bp, Vitis vinifera
  Intron number 4 from transcript GSVIVT01004809001 (locus G SVIVG01004809001) derived from phytozome v7.0 (chr-ID chr1 0_random; pos 77405 to 81317 reverse strand)
catttcctacatcgccgacagctgacaccaaggtaagacttctttttgcacttggagaagtgagtttggtgtctttgtttaccccattaaacttggtgtcaaatcttgtgcatgatgatccattgtttgcttgctttcttggaaaattcatttgtgagatgggtgcatacttgcaccacatttgtaacattggcttcatattatgggcccatattgttgcacaaatatgaagaacttactaatagttgtgtcattgggctattgctttttccgtttaaacagccataatttctcttgcttgatggttattattatttatatgattatgcatgtatctctgatcttcaaattcgtataggtttgatacaaatctctgattttataatgcctactgagaggtggaactgagtatcctttttggtggcattttccaaacagtctttcaagatgagaaacatatttggaggatgttttgtgcttcgagatatgcgataatttgtttctttctacatccctggccagttatgtggatggaagaaacatttatcctgattacttgctatttttattgttattatttttgttaagactcgtgtgattgttgtgtgattctgaaattgttatgctctattctttggtgtgccttctcttgttttccatttttaattctatttcattttgttaccttgtattttgttcagttggtctttgaagtagctagatattactgttatgctacttcaccttggaaagttattccttgccattgccttggtctagatttctgcttttggaatagcattccctttctttcttgaatgcatttgatgccatgatcatcaatctaattgtttttgacaaaagattgctattttgatttactgtttacagtgtggttctcatgctgtcatttggagtctatataaagagtggaataatagatttttgaagatatcaacacccaatcacaaagttgaaactcaggagaaatattatttctgatcttttggtttctcactctttttgagttggtttttttttctttgtgtgcatgacttatgtttaggcagttttcatctttttgtttccttctctaataaaattttaatttttcttatagtaggaaaaataaataatttctataaggcatgagtgtttgggccagttggaattcagaatttaatatttggactttgtgggtttcttatatgcttgtcttgtgattttagggtattcatagatggtgaaaaaatattgatgcttagaaattaaaggaatttgttggacaattctgtattggtaagaacttggaatatgaactccctgctaaacatactaaactgcattcactagttatgtttagaataacatcatatgccatgctagcaaatggtaggttttacaaacttgtaagacagtgggcttcagagagatcaattttttttaattcttagtctgtctatgaaccctttttaacctaatatgatgtgtttttctctgatattgttcatactattaaataaaccaaggcatggttattggaattttatagtaactagaattatctgttttattaactgtaggcaatacttaaataataatttcaaaatgtttcaacatctgtgggggactgatagccctgtagcacagagaacggaagtctgctcattataacttatatcatgtggactgaatgttaggcagatagtgtgtttctcaagtggtgcttgctttggtttattctgtgtgtactgcctatatacgtagggcgtgccccctctttttggcgttttttaatacatgcttttgaagtctatcaaaaaaaagatagcgtgttttccaaaacataaattcctttgcgcacattacttcttttactgttgtattgtgcttgaaatttaacattgattgtttgttaacatttgactaatgtgtcctacttaggaatgtgtctaatccatcagcaaactatttatttataactgaaaatattgtttggagtggattgttaaaagttgacatttctttcataattttagagtttttttttttttttaatgataggtgaaggaaaataaaatatagatagagggggcccaagaagggggccacctcccaaatacatgggagctatacaagtacttctgagaagaggtaaaacattgacgacatatgcatccctctaactggaggatcccttcatatcattgaaatcttaaatagataatatcctcccatcatgaattctattttccggtcatcaagggacaacctctttgatcttctgaattggtgcatccgccccctcaaagacccttctgacaagttcccttcctatcacttcatgaccaaaaatttgaaatatttattagttgagtacataaacttattggaaggatgattgcaaatattggaaataatttcatatagaagttgtatgtgtttaattattggaaggatgatagcaagcatattaattttgtgccaactaatatcgttttctttatttattattgttgttgttggtggtggtggtggtggtggagtgtgtgtgtgcgaattacactttttttctaatgaaatgacataatgaactttaaaaggcctcaatatttataaaaataagctgtgaattcctagtgccatgataagttcttaacaccttggcaatcatcagatattgtaccgcctaggaagactgatccactcttttgaataatggagtaagttactcagcttcaaaattattgtccagattgtttgttctactggaagggataattctaatgaaaccaggcgattcaatttctctgtttgctggctcatgctcttggatccatgttaacagtctaacctgccatgtctgcttctaaaacttgcagctaaacttaggtataccaaagctaactccagtagattgtaaaagaacttataaatatactttatattcagtgtattgcccatagagattaatgcatccatatgttctgaatggccattgaaccaaaatagcaggtatgcctctagttgatttactggattttgtagttaacaacctcaaatatttagttatcaatgaaataaaaactccaaacagtttgaaatcaagtgtttatatgagagtgttgttttgggtgggatgagttctccgtccaaagtcttctgtgtcatggggaaaggttgtttcaattgaataaatttacccattattttcgttcctatatgttttagtttaaggtggagatgcatttataattgtacctcctatgtatgtaaatttgttctaattgaagcttttagtttacatttgtgttaaccttcttagtcagtccccccgagatttccaacctcctgtaatgttcaggttatgaagtgtaatagataacctcccatgcaatgcttctaccatgtacccatttaatgactgctttagagttcctacactgccagaccagaactcattacaatggtgtttgaattatgaggatgaatagttggattaaaaaaatttcatttgtcctttccataagcattccatgagccactaacttgtaacaggttcctttaagttctggatatactgatatacagtcaaattagatctgtgttcacaactttgcctggggaatggtacttggggcaaacattgggtagtcttgatcatgacattgtgctaaaagttttggagttccaaattttgaaatggttgggttagggttcaagaaggcaatcctactagaattcaaatgagattcatttacatattatttgcttgtctgtgtcaatctttttgttcaatgttttctgtttacatcaatcttttcttgtatttctacaagtgcaatccttggaatattttgatttatcaaccatgttgtgatcttccacaggtggagccaaagcgtaggaagag

SEQ ID NO: 10367 - DNA, 9370 bp, Vitis vinifera
  Intron number 2 from transcript GSVIVT01030516001 (locus G SVIVG01030516001) derived from phytozome v7.0 (chr-ID chr1 2; pos 6406666 to 6416035)
ggctggtgagttctgcttgaattcatcgttttttttttggtcatttcatctcttttggttatgtttgtcaatggtttaaattaatctatattcgaaatttatgatttaatgtgatgtgggctcttgggatagatactaattaaaatgatatcttactgaaaattctcatgaaagtgtcatagggacttggtgatttgtagaaattatgttgttggtgttgagccaattgaaatcaggttcgtctagctttactggagtcagacggacttcttcctttatagatggatgtctagacatgtggtccgggcacgcccctccgaagcttaagttagaaatcaatgaggataactctcactattttttgtgggagagaatgagcgtgtgtacgttgttcgtgcttcttaaggggtttatatagagctgatgacaccgtcattaaagcgccgcctcctttcttgtaatgatgactgcccttagggcggaaatcgagccttgataggacagtcaacgtcgtcattgttggactgagcaatcacatcaagtaagggctactgactggtgccatttgtcgactgtcgtgccaaaatctcggatcgtgtagttgactgttcatttagcttgccaatgtttgggattgtgtgtaacaatagagggacattgacttttgggtgttaatgacgcctaattcgttgtttagacgtcaggcgtctagtccgacgctcagacatcaggcgtggttaaccacgcatgtcagaaatcctaaggactgaactgaattgatttgtccgtctgaaatgtctaatcggcttggtctatccattctgtttgacattgtgagcctgtctgaaaggtcatccgacttggtctgctcatttcgtctgacattgtggaagaaggaaaacttcacttctggtgctaggcggagcttattttggtctaggcggagtgatcccaaacaagttatatgtttgccctggtcggccaaagggtcttgagtatgggaaggacgtggagggaagctcccacaatgccccctaattcgtctgcctttattcgacagggtagttgttgggttgaggcaggacaaattatccgttttcaagtttttgggcgccaaggggcaatttttgagacaatagaagtggtaagccgtctccccattttccgcttactttgccttagtctctcattttataacgatatctctgttaccccccaggtggtaactggagtccaaaaccttatgcggcagcgcgctcaccttttccaccggttggaagcaatcgagaccatgagggcatatgttgcccataacgtggatgagaatgaggatctccttgccaacttggagacaacgaagagtgaggctgctgttgcctaggagctagctgaagaagaggttgtctggctgaggcaggaactgcaagattcccgggcaaggtttgattctttgtatttctttactctagccggttgaagcattttcttccatacttgtaataagcaattttattgataatattgctttaggttggtcacattcaatgggcggagtaggggtactttgtctagagtctagaggtggtatacccttgagtgtcctgccttagttacaacatatgaccctttccaattacattgtagctttctggctcctacttcagttgtattcttgaagacttttctaaggactaaagatcctggccggaaaaaccgtggtcgtgcccttttgttgtactgagcaattgccctttgatggtatgaagctattcggatagccgcgtcttctcgcaatttgtctgtcaaatccaattgtcttatgagttcttcattattgtccctttggtcttgcacgattgttttgacagtaggcataccaatcttagttggaataatggcctccatcccataagcaagggcgaaaggagtggcccccgttggccgtctggatgttgttcggtaagcccataagactccgggtagatcgttcacccactttccttttgccccttccaaccttttctttagtgcattcaatagagttttgtttgttgcctccgtttgtccgttgttttgtggatagtgaggtgttgagtataggttcttaatgtttaactctgagcagaatattcagaagacaatactgtcaaactgtggcccattatctgtaacaatcgcttgcggaactctgaattggcatacaatgtttttccagacgaacttgaaaacatctttatctttgatgttggcataggcttctgcctccacccacttgctgaaatagtcggttgcaaccagtaaaaacttcttttgtgctgctgtaatgggcaagggcccgactatgtccatcccccactgtgcaaatgactaaggatttgtgatcgggttgagagcttcagaaggtacacggggaatgggagtgtgtctttgacgccgatcacacctcttaacataactttcagcatcttgcttcatggtgtgtcaatagtacccttgcgtgtaagcgcaatgtgtcaaagtatgtccgcctgggtgattgtcacatacgccttaatggagttcggccataatatatttggcccctggctcgctcaaacactttaggtatgaacctccaaatgaccgtctatatagttggtcattaattagagtgaagcgtgttgcttgtatgtggagtttgtgcgcttgcttctcgtctcttggtacctcccttgtctgaaggtatttcatgatgttaagcatccaacctgagtctgtgtgactagtgttgcacactggctcaggtgtgattgagggggcaactttgaggtaaacgggtagcatcactgcctcttttatgggaagagtgacagttattccggctagtgcatctgctttctcgttctcttcacgcggcacccgtctaatgacccaatagtccaacttttttagatggctttccaccacggcgaggtaacgagccatgcgttcatcatttgtttcatactctcgttgaatttgttcgacaattaggtgagagtcactcctgatttccaacttggttccttctaatactagggcaagatcttgctcggctaggacaacttcatattctgcttcgttattggaggcagaaaagctgagacggatagcttgctctattagtttccctgttggtgattataggattaggcctattccagatccagacactctagacgctctatctacgtgaagtgtccaccattgctctccagggcgattagtcgaatgtgcttgtttttgagggagttcagttataacttgtcctttcaacgataaccttagttgatacttgattccgtactcattcaactcgatgactcattttaacattcattcggatagatctggtttgtgcagggtaacttggagtggctgatttgtaagtacaatcacttgatgagcctggaagtatgggcggagcttttaagcgacattctttaaggctagggccgtctgctccattctggagtaccgagtctcaacgtttaccattgctttgctcacatagtagatgagcctctactatttgtcttgtatgtgctgaaacaggacgacactaacaacatagttagatacaaccaaatacatataaagttgttcgtcggacttggggctgcttagaataggtggttcagtgaggtagcgttaactacttcaaatgcttgcctgcattcatccgtctagccgaacatgcttgctcccctgagtgtgaggaagaaaggtctcagcttgtctgtgaaacgggctactgctagacgacctgtgaggcgttgcaacttctttttgctacttgggacgggtgtttcgaggacaacttttatttgagccggattaacttcaattcttctttgggtcaccataaaccctagaaatgtttctgcactgacaccaaatacgcacttagctggattgaacttcatgttgtatgctcgcataagacataatgtttcttccaggtgctggacgtgctcagctcaggttttgcttttcataacaatgtcgtcaatgtagacttccatggtttggctgatcaggggcttgaagattttcgttattagtctctgataagtagcaccagcattcctaagcccgaacgacatgactttgtagtagtacaacccatgtggtgtaacaaaggttgtcttctcctcatccggctggaacatagggatctaatgatattcgaagaaggtgtccaggaaggagagcatcccatgattggcgatggaatcgactatctgatatatctagggtaagagaaagctatcctttgggcagatgtcattcaagttggtgtaatgaacacaaacttgccacttcccatccttctttggaacgatcaccacgtttgccaaccagtccaggtatttgacttctctgataaatccgattgccaatagtttgtcaatttttgtctggatgatttttatcttatccggatgaaaacgtcagacttttttccggacaggatgcgaggagggagtgacgttaagtttgtgggaggcctcagatggatgaattcccgacatatttgagtgagtctaggcgaagatgtccttgtttcgctgaagcacacttcctagtagttccaattcatcctgtgtaagtagagagttggtagaagtgatttgatatgtgccatgtgagagacacagtggctggagtggatcagctgtagatggatctttctctaccgggctcagtaattgctattgctcccttatatttgatgattccaaatgtgcctcatcgccgactggatgtctggagtctagcgccacttgatagcattggcgtgcgagtagctggctgctaaggagatcaacttgttcctcctccatgaggtagctcaccatctgatggtacgtagagggaacgactttcattatgtgaagccatgcacgtcccataatggcattgtatgaggacaaatcgtcgaccactgagaattgaacgttcagggtgattgggccagcttggacgggtagtacaacgtcacttagagaaggcttcgtagctccattgaatccggacaacaaatgccttgggttctcttgggcggatggtgagtagtccatctgcttttagactgacatttgcaagaggtcagttgagctaccgggatcaactagaacccttctcacgtcgaatccgcctacccttagtgttaggactagggcattttcatgcggttgcaatattcggttagcgcctactggagggaaggtaattgtgccgtcaatggggcgcacactcccttccgaaaagttgtgctgaatggaattaacccactctcttacagaggctgcatggagcaaccttcgcctttgccacttagaactgtctatcgtctacgaagcctccgtgtatgtagttgatgacagctctgggagttgctggagatgcagggtcttggatggctagctcttgcgccgtctttttttgcccaccggttgtgtggacatagtattttaggtgccctactttgattagtttctctaccaagtaatggagactcttgcattgctctgtggtatggccgtgatccttatgaaaggagcaccttctgtttcgatcccgtctagctggatctgtcttgatcggctctagccatttgaagttgacagattgcggatcgtcgagaggagtctctcatgtgatatattgagaggggccagtctcgcttgattctgttgctgttggccagcccgccttttgctagcttgcctcgattggttcgagggcttagaacttcatgcctcgtcgtccttggtcggacgattggtgaccaagacctgttgagtagctgacaggacatcatcttcaagtacggggtatttgtctgctagcttaaataggttatccatcgttgcaggcgacttctttgcgagagactaaaaaaatggcgtgcccgggccgatgcttcgcttaaagatctgcaggatgacattcatactacaggactccacttggagcacgacttgcccgatccgcttcatgaagtctctgagcgactcgttttcctgcagcttgatgttctgcagggtgcttatgttctgcttatggcgaacgaaacatgagtagtggcccacaaaggcttccgatatatctcggaaagtgttcacggaattctgcgagagacggtggaaccaagaaaaagcttggccgtataggctggccgaaaagactttgcataatagtgcatcattccttatattgcgggtcatgaactgcttgaagtgcatgatgtgatcgaacgaattgcttgttgcgtcgtatgtcgtgaattttggcattatgaacctcctagacaactcataattaataatatgagggtcgaacggcatggagagcatgtcatccagccgtcgactgacaaagccgagcggagctcggatagccagggccacaactagctgctaccttggcggctaagagggccattccgacataactactgcagatgggggacctagacgagcctttggggtttctgatatgcatggttgcttctccattcctggtgcttgaggtcccaatcgagctcacatcgcatctgacaaatgcgaccttctgccatgcctactcttcattgatgtccgggtagagtcggcgccttcgttcagttgcgtttggcgagttggcgaaacctcctcttcagatcgtctcgtgtagttgtcagaggagaactctgtgttctcagggaaagatgcctcatcagtccgtcttgctgctgtttgttggatttgagggtgccgactttgagaggggcccgattgacatttgtgccgacaactcttcattctcttgtttgagttgctttgtttggcggagcaaaaactatatttgccgatcattttctcgttggcatctcaccatcctttcacaccaggcatagtagtcttcgccacccatagttgatgatcgacttttagagggtgttgacagccttagtcattcccacagacagcgccaatgttggtgtcgagccaattggaatcaggtctgtctagcttcgctggagtcgagcagacttcttccctgcacagaaggatgtctggacaagtggttcgagcacgctcctccgaagcttaagttagaaatcaatgaggataactctcactattttttgtgggagagaatagcgtgtataccttgttcgtgctttttgaggggtttatatagagctgatggcatcgtcattaaagtgccgcctcctttcttgtaatgatgactgcccttagggcggaaatcgagtcttgataggacagtcaatgccgtcactactggactggacaatcacatcaagtaagggctattgattggtgccatttgccgactgtcgtgccaaaatctcgaactgtgtagctgactgtcgattaagcttgccaatgtctgggattgtatgtaacaattgagtgacattgacttttgagtgtaaatggcgtctagtccgcagttcagacatcaagcatctagtctggcgctcagacatcaggcatggttaaccgcgtatgtaaaaaatcctgaggattggattggatttatttgctcgtctaaaaggtccaaccgacttggtctgtccattctgtctgacatcgtgagcccgtttgaaaggtcaactgacttggtctgctcattccgtttgacattgtggaagaaggaaaacttctcacttctggtgctagacggagcttatcttggtccagacggagtgatcgcagacgagttatatgtttgccctggtcagccaaagggtcttgagtctgggaaggacacatggagggaagccccccacatgtgacaatgttctctgcaactgccataaatacacgataatgtgcttggtatttaactatattgttttgggtttcattcaaaagaaaatgaatcatggaaggtgagacttggggagattaaccatgtgttcttgagagtggtcattgcgtctgtttagaagtgatctgtggaatgcctttctgaagccagatgtaggctttctcgaggaccccatgtttggtaataagcccttgaaaatgccgatggttcaaatgacaatttgagcaatggtatatatatatttgttgcgcaaacactatagcttcggagtggattgctcattaaattctgtttaatccatgtgaacatgggatcaaattttctttggagagtggctgaatttttccaggacatgggtttattgaaagggtttttaaattctatgcttttttagaactcaaatggacttttcccctttcagtttaactcgccttctcatggtcaggataattttgtgtatccagagcattaaactattggggtggctacaaattttatttctctgcattcttatctattttgagtgtagatttcttgttaaatcatgtcccagttctcctttcaccacaacctcgttaattttccttcttcagcttaccctattcttgtagacctttaaatataggccatattgttcatgtctgttgtagtcaagagccaaaatgcctcttttcactactagtagttttcttgtgatttaaatttctgctgaccttgatgaaacgatttcccttatcaaattcttgaaatttaactgaaggcatatttcgaaaccatgtatgataaagcctaaaattcaattgaaaaaaaagagaacctgatttgtgattaatgatatagctctttacttaattttgtgccttttgttgcaatatcatgttgaacttggtttttatgtgatattttttcttgcatccctgaatcaatcatccattcttccccaaaattctatagcatatctaataatgcacttctaggaaaaaatgtgtctgttgaacttgcgcttatgtgtttaatgttgtgatagatggctttttgatttgatagaaagagagcctagatttaagctatttgcaactactctggccactaaatgagaatatggtatctaccaaatgatcctataaaggtggggaccctatagaaaaggagttttgaaaaataaatatgaggtttggttatacctctcataattcaaatagtccacgtgagaacaaatcaaataatatttggagaactaattcacttttcagtttgggttgaaagtgcctaacatgaaacaatctaaactgatgtataatgggtttttagtggagaaaaaaatggaaacccatgcattgttcaagcattttgcaaagtgtttgtgtaaatgcttttaagaggtagtgtttgctcattgatttatttctcttgactgcttcaactaaggcttaggatggaacttttaaccatattcattaatgatggtgcaggttattctatccgttatcttcatcaggaaaaagtt

SEQ ID NO: 10368 - DNA, 6808 bp, Vitis vinifera
  Intron number 9 from transcript GSVIVT01021590001 (locus G SVIVG01021590001) derived from phytozome v7.0 (chr-ID chr1 0; pos 7622811 to 7629618)
tgttctataggttctggttgggagggttttacaaggtaatgtgttcatcacccttatttttgctgttggaagttaatttcatctagagttgtgtggttccttcagttttaaaaataagaaccacttgcatgcatttctggggagttttttttttcttttgttttttcattactgctggatctcctttaggaaatttccagttgatgaaaccagggttgtacaggaatggcattattgtgatatgtacactggggttgttttatcatctcttctaagaactgtcttggccactgtatgacctgctagttcatcatgtggaatcattcaagtttcactttttggcactggtttactttcatttcatctagaaaagaaaaaataaaatgattgtgctggctgatatcaaatggttcaaataagttcaaattcaggcaattgcattctatgttatgtcacttcctcaaatatgctaccagtatccattttattagtctatgaagagaatattcttatctcgtcttctaataatattgatatcactgattactccagcttagtttttggcaaattaaatatttcaatgtagcatttgcacaatattttctcgtcattggctcttgcactattccaataacacaaaaagttactgctctattagaattttaccatatactaaattatttggcatttctttgatgaatttttttatctattttgtggttagaattttaagttttgaagaaatgtccaaaggtatcttcccttttttgtaatatacacaaaaatttagttatatttcaatataagttgcacaatacttatttgttgcgttagacatattctcttgttacaaatattcctttacactgtttcagtacccatgtttagttcatcctctccctatctgtctttctacaacctgtggtttacatttcctcctatctttcggctgagttagtacaaaggatgtagatttagggtttgggggtaattagacagctgatttagtacaaattttgtagatctaggctttgggggttattagacagctgatttagtacaaattacgtagagtttagggttttgtggaaggaatagtgatacaaacaaagtgttatagaatgttggtggcagattgctgacctctcgtacaaaatgcagctgtagaggtgctggaagatgccataaagttgactcctcaaacttaaatcttttcataactgaacaattcttctcttaaagaggaatctggaaaagttttcttctattctaaaataaaaactgataacattcccctctctgttcctccatagtctcttatttcaactgcctagttatgtttcctagagcttttgtaataatctttgcattcccttgaatgatttaatgcttttaaatcttgattgactctttgactcctcagtttctaacacctaattccaaaaagaaaactttaaagggcacatatgcttccatcatcctccaccaaataaagaaattttgtctccaagtgagttgtcatatttgcagcttgacacttatcaacatctatcttcataaactcatcttcatctaactaagattttgggcaatctggtttccctacccattggaaaagatacctaaagtatgaacctactcttgtattagatttttgtacacggattaccctttcaacaacatcaacttttttataggggggtttggccctttgctccttccgcatcatatgtttcacttgataaatctccatgaaagtataaagatcttccacaataatatgggatatatgtttaaaccttgtgaagtgtcacctcataggcattttctccaaacttgtgcaatattttgcaaggcctatctttttgctccttaacttacgatgagtgctatcaaggaacctttcttttcgtaagaacactagaggtactgagtattgaatgggggtagttggagtcaagttaccgggtgtcgggcctagtaccgaaggccgaatggcatcgggctattaggatcaaatgttgtaatattcggatagtactcgagacatttcattttgacctaatgtttttaaaatcggactagtcattaaatcagaaaagttagcaattcacgattcaataatcagaccaatggttgaaccgtggtcgaactaatgacgtcataaatatataatttttatatttttaatttttaaaaatataaaaattacaattttaaacatatttcatcattttatcattaatattgagattaaattatgataagaataacatgaatatttattaagattttagtatttctaattttattaaatgtatttaacttataattattcttataaaataagattttattatttaaatatttttagattttaatagttatatattttattattttcaaaattattagttgttttatttatattattttgatatttattatctaataatattagataaatcattaatctttatatttatttttaagttatggaattatattatatatattctaaaagcttttagatacaaagacgttgagacatcatacttcacattgtgcacccttggttttttcccgataaagacccagattaaatcctcatcgttccatgccctttaaatgacttttagcccttttaaaaaaagcccctttgaatcctatattggaaaatgagtgatccaaaagtcctaaactaccttataaaaagccattcaagagtacattagttaactcaattcaaagagttgtgaaagggcatcacttttggcctactaattcggtgggctttaagaaaaaagctaaaagtttgttggacattgggcttgtgaacaagacattcaaaagtgggcttttgaaagaaaacaaaaaagttgagttgaaccgaccaagctagctcacctatctagcagttaaaccaccaaattgactggttcaatgttggttcaactttattttggcctaattagaccaaactgaatcaaggttcagtcgatgatctgatcggttgaatcggccggtccagtctgatttttaaaacattgtttggactaaccgaccataaatttaggacctgcatctagccacctatgtctgcttgcctccctaggaattatcaatagcggataggttggatctaagtgttcacatcgcttggcacattgaataaccttagtcgagaacatgctaagtggtagcacataggaatctagtaagggtcaattaggccacttatggattcacaaggtcggaatcccaagagctttcttcaaacacatatgaggaacagagcccgaggtagaatttgtcctgtcccatcaatagaaaacccttctactggtctaccacacgacacctaacatggattagaccgaccgatgataaactcgatgtgatccccaatgcttgacccttcgacttaccgtttcccaaagtggaggttgactccctttattattcaaaatctagcaaggaaaaactatataaatggtactagcattgaggaaaatgggctagagaagaaagagagagagagagagagagagagagagagagagagaaaagggactacaagaaggatccaataggcttccaatcactcatcccgtctgctcccctagcaggctccctgtggccaccgttcgattcaagatttgacaacttatactcgctaaccctcgaagggtcgcatgacaacaattggcctcgtttgtgggaagtatcaaaagccagaagctgactatggtgactgctcgagcacccaaccatgttgatgatggacacactcccgtaacttttgaagaacaatctctagctagctccacaacaagtgctcaagtttgaattgactgaatgtaagatgcggttagatgggttgagaagaaccactaacttgcttagacaagaaaatgagatcatggtggcacaacttagtgcagtggtactgacacactcagctaactaggagatacgacaaaggctggtaaagaagcattatttgggcttgccaaatgtaccatgctagccgaggactagggcccccgcctctagcggtgaaattgtgaagttgtgggataccaaggaaaccccacactcattgtggggaagcatgcaaactaagtgaagccaccaaccaaggttgtccaagaaaaagccaagcaatactgactggaagagccaacccaagcccgggtattccctgcaccattttagcatgacaatcccggacgggcaacccttaggattgcttcttgaatacttgatgacatgttcaagaagcctttgagtaataaaagaggtaatatttctttctctattattcactctgatgtttggggaacccttttggattcattgtttatctagtactaagtggtttgtaagttttgtggatgattgcagtaggacaacgtggatttatctcttgaaagaaaaagctgggataataaatatactcaagctatcttacaaaatgattcaaacagaattttcaagtttgtgcacacataaaggtgattagatctaaaaataggggagaatacttccactaaaaatttagagatttttttgcacaaaatggcattgttcaccaatctagttgtgttggaacacttgaagagaacaaagtggtagaaataaaaaattgacacttacttgaggtggctttaatgtctacaagaaatgtccctaaaattttttgtggtgatgctaacccccaactgcttacttgatatatcctaaaaaactcttaactttgatgagtcatttctcccacattctagatcttggttttctttctcccaaagtctttggttgtagtgtatatgttcatgttcctagcaattccaatcaaaaaaatgttcctagcaaggatagatataaacttcattctaaagctaccagatgcattttcctaggatacccacctacaggaaaaaggatataaatgtttggatcctccatctaggaagaaatttgttactatgaatgtggtttttttttaaaaccagtcatactatcagaaaactgctctttaggaggagaaaacacaagatgaagatcagtcactatcattttttattctattagctatgcctacttgggaaaatgaaagaaatgaggagaatcaaacaatctaaggaggaaaagatgctgaaaaagatgttgaactacttttttactccaaaaaacctcaggaatctagattggtacaagatttcattatccctatgcatgacccatcatccacttaagaagaagatgcaacttccaactctaatccttcaaattctacactctatccttctaactccactcttatttttaatgtcaacaaagacattcctatagcaacctgaaagggtgtaacgagttgtaacaagcatcctttgtccaattttatgtcttatgataagataaataacaaatacaaagcctttacaaatcaattagctacaaattcaatcttgaagaatgtggaggaagctcttccggatcctaaatggaaacgagcaataaataaagaaatgaaggcactaaacaagaatcaaatttgatagatttctaattttcctaaagggaaatgtttagttggatataagtggctgtccaccatcaagtatagggcagatgacaccatagaaaggtataaggcatgcttagtaactaagggatgcccatagacttttagaattgattctggaaaaacgtttgctccaatggcaaggatgaattccattcgaatcctactatctttagcaacaaatcatgactggctactctaacaattcaaagtgaagaacgcatttctacatgacaacttagaaaaagtcttaatggattctccacctggttttgaagaccaattcaataagggaaagtacatctacttaaaaaaaggttgtatgggtaaaaaaaatctctaagtgcatggttgggagatttactcaatctcttctcaagtttggttaccggcgaagtcaaagtgacaatattcattaagcagtctttgaagaaaagattaatcatatttattgtctatgttgatgatattagtgtgacaagtgatgactttgaagatatttattaattgaagagcaagttggctaaggaatttgaaactaaagatctgagaaatcttaggtattttcttggcattgaagtagctagatcaaataatgggatctacatctcttaaaggaaatgcaggaaagcttagaattgaaggagtgtttaggaatcattatggtttagtgttgagcgctttttctacactggtggaagagtggtatagctattgaggtagagataccagatttcttagagggttttcaacaagccaaatctttaggcctttcaaatatgtgagttgagggtgactatttttttcatttctttggttttacaagaacaaaagagattcaatgaaatatggtaggtggatccatcagattattaatgttgctatgcgcttgagataatttttagggctccttgatgttccttttcttaggttctgtgtttagctagctaagtagtggattagtttggccatgtgttaggttaagttgttggtttcctatgtaagagactttttaaaccctcctcccccctcccattcacttttcttcttcagcttgagttgtgcaacacagttctggattctattttcccctcctttacactaactaaattcaatgtaatatatatatatatataaactcttatcattttatggaactaattgaactttctttcacttcttgcagattggtgaagatctttgtgagtttgtggggccaat

SEQ ID NO: 10369 - DNA, 4559 bp, Vitis vinifera
  Intron number 2 from transcript GSVIVT01008592001 (locus G SVIVG01008592001) derived from phytozome v7.0 (chr-ID chr1 7; pos 569977 to 574535)
agccaaactcaatagctcacaaaagagcatagagagtatccttataactgattattatggatgcatgttaaaatttggtgaaagcatatgatattcttcttatactatttcatccttttacttgttgcttaagttttctgatatatggattccctgctattaatggttattgttggtattgccaatcatggttattgtcttcctggatccattgcttgtgatgattatattttctgaatgtggaataatattgaatctgtatcaaaattccaaaacatccaggcttaaacaccaaataaaagaatcattgcatttttctttcttcatattggcaacttctcagcttaaaatatatttgggagcccattttgcctacagttgttgagaaagttaatgggcctttaaggaggaggaattgggccaatctttgggccaaggttgagaacgcaaaggctagaaatttgagagagcccaaacagattggacctagatttggatcctctagccctcaccttgaggtagtcctctgtgggatgtgcacaaggtggttgagaagtcgaggctcccttttaggaagtggagaagggggtaccatggagcaaaaggtaaatgaagccaagctcgttgtttttgtgattcaagggcaatagtgtgacattccacattggatagaggggaaagttcctgacaccatataagtatggactcctcataaccgtgtagacgtgttttaaagccgtgaaaacctctttgggtccaaagtggacaatatctacatggttgggagcagattgttacaaatggtatcagagtcaatcctcgacttcggtgtgggctttgtttggccccataagggtgtttatttgtttgaccccacaatcctatgagatacaacaaggacgttgtgtttgcatggaggggtggggaggagggtggtgtttgtgacatcctacatcggatagggggaaattttatggcattatataaatatggacttctcttaaccctgtagatgtgtttttaagttgtgatgacccctttgggtcaaaagcggacaatatctacacagttgagagcaggtcattacaaatgatatcagagatattgtccgctcccaatcgtgtagatattgtccgctttaaacccaaagggaccctcacaactttaaaatgcgtctacagggttaagagaagtctatacttatacagcgctagaaactttctcccctatccgatgtggaatgttacaaacacctaccccatgcaaacacaacgtcctcgttgtgtcccacgggattgtggggtcaaacagacaaatacccttatggggccaaacaaaacccacaccgaagttggggatcaattctgataccatttgtaacaacccgctcccaacggtgtagatattgtccgctttggacccaaaggggtcctcacggctttaaaacgcatctataaggttacgaggagtccatacttatatagcgtcaataacttttccccctatccgatgtaggatgtcacaaatagagctagccatgttggcattatctctttcaatgggaagcaaccttgcttcaacgccaagtaagtctttgattcctctctctttggcggatgggtcttgagatgataggagcctctattgcttcctttgctctttttggtctagtgagtcttaatggggatttcttttttatgaatgattctctaggatggtcactcagtggaattctacgaaaacattttgaacaattcctctagtatggaggttgaagctagcaagaataagggatttttggcatgtatggatcccttagacgaggctttgttgttaggatcaagggatttagagtgtttggcaaagtctttagaagtcaaaaattggaatggagaggttggggtggtcctatacccatggattaatagaaaatacctttggttttgtaaaaatgtgggcatatcagttgataggcataaaaatcatatccatagcattttggatggatattgaggtaagaagtagcacccaaagtttaattagtttagatatgccttttgtatacctcttgtgtacataggtcacacctccttttgtgaggttgaaaagaaaggggctttgggaggaatttgcatgccattcgagggctatggaaggaaccttggtgcataggaggggatatcagcgtgatctaattcttagggaaaagaacttgtagccatgtttcctcctttatgagagacttttcatagtttattgaagagtttcaattggaggatgcgcctttatcaggatggcctttcacttggtgcaagggacaagatgatcttcaaatgtattgattggatcattttcttgtcttgtgggattagaggatcccttctctaatgcaacccaatcaatactttgaaggcctgttttgaaggactaaaatattttttagtttgtaatctttgcacttggtctaggttctatttaaactttggtcctccttctatagtagattttgtggactggttgagttcctctatttgatgtatagtggatgatgcactcttttgtgaaaggggtgctcttgagttggagtggttcattagttggctaaaagaggaaaaaagcttggaaaattgcccatttatgccttttttggtccatttggagggaaagaaataggaaagcttttgagaataatgaaagtttggaccaaacaattaaaagttcttttttgtatctattttgggattgagttagattgtacattggggttggtggtatgtcattgttagattttgtgcattggttaggttccccgtagggtgcggttgcttatttttgtgtattcaccttgactggcttttgtcattttgtacatcgtgtatacttttatttaatacaatacccttttacctataaaaaaacttagttttttgttggtccctattttttgttagtgcttttaagcattcgtagtatatttcttgtgtacttcaaagcgctattttggtgcaagccttcaaaggcttgttttagatcatgctcctatccttttagaatgtggggaataaggagaggtaaaagcctatttagattcgaaatacgtggttgaaagtggagggatttggtgactttttgaaggcttgttggtctaatcatgttcttaagggctcccctagtttcattcttacaaaaaaattgaaagctttaaaagatgatttgcagcttggagtatagagctttttgacatcatggcctttcgagatgatcctgtattttgagaaaattatatttggggatgaaaagaaaaaggaagatgttctcttagtaggggagagagaggtgtgacgatcatttttggacgagtttaatgacaattttattggaaagaacttttagaggcaaaattcagcatgcaattggttgcattaatatctgttctatgacatgcataaaagtggtgaggcatgattattttgacagaataagtgcacaacttcactgatgtatgaacttggagcttaaattgactggaaagataaattgaaccaaaataaaatacttagaagtaaaacctattacatatatccatgctgcagatgccagtcaatatatatatatatatatatatatatatatatatatatatattcacacacacaggtgattatatgggtaccttctaagatatacagattaaaatttaagtaaaatattattgaaaaaccatgtaatattttatttgttatatttttaagaccaaggataagaaaaactgttcctattttattttccttaacaatctctctatgtgggttagggtgtatataggcggtgggtataggaatatggttgacttcttagattggttggggcttggatgagggagggagtattttttgcgtattccctttttcctattttttgccaagcgtactttgtatacgtcctgtgtacttttgtgcgcttttagcaccttttaatacattctcttacttgcaaaaaaaaaaaaggataagaaaaactggagctaggttataaaagaattactcctgtattgctagagtaaggttctgatgtgggagcagccccaggcacaggatcttctaggtggtgaaacctttattggtcaagcaaggcaatcttcatgctttcaatggaaagaatttggcagattctttttagcaaaaatgttaggaagcttattttcttgaacatctttaatcctagttggagcacttaattttatgctaatctttttgtttttttgataggtaaataagcagagtaaattaaaggggacttaattttatgctaatctttcttcatagttacaaataaattgaaagtcaagaggtcaactaacagacaatttcatcttcattttctgttttttctttttctttttgacaaatttttcattttttttacgtctacttgtagttcatttcatatatttttctttgggattaaacttgttaattttgctcgtcttctcataattttgatgtgaaccttaacgtcatcaagctttatcacactggtgcattttccataggaagaga

SEQ ID NO: 10370 - DNA, 7337 bp, Vitis vinifera
  Intron number 3 from transcript GSVIVT01037014001 (locus G SVIVG01037014001) derived from phytozome v7.0 (chr-ID chr3 ; pos 8916791 to 8924127 reverse strand)
actaccttaccgcccacaacgccgcgcgggcagaggttggagtccagcccatgacatgggacaaaaagttagctaactacgcatcgcaatatgttagtgagaagctgattggtgactgcaatcttgaacactcaggagggccttatggtgagaacctggctgcagggggtgctactgactttgatggcgctgatgcagtgaagatgtgggtgtctgagaagccttattataactacgactctaactcatgcgttggaggagagtgtggacactacactcaggttgtgtagaacacttcagtgaatgtggggtgtgcaagattgttgtgcaagaatggggaatggtggattgtttgctgcaactaagacccaccaggcaactattttggagaacgtccttatattaagaaaggttctacatgaactttgattaaagacttgttggagtggtccctaataaaatcacttctgtattagaagattataatgaaataaagtgaaatgtttatgcttttatacggtagatcattttgtttgagttgtgtaacaagccccacccaagcaaccacaattttgtacttcatatcttttgtccaccggaggagaaaatgtaccacgtcttcgtatttctattgaaacttatacgtgcaaagtaacaattgaaatatgaattttttttttttctaaaatttcttttgatacatataaggaaaaaatttaatgtccataatcacagtgaataccaacctaagatctcggtagatttgtaaattaagtattaatataaatactttttttcttgtttgggctcagccacaagagttttgttttaagcaatgatgaaaatatccaaaaattttgatgaaatttggtttgtcaaaggtagcaaacacaacacatggagaaatatccacgatgccctttcaatcaattttcacgatttgttgaatttttttttaataatttcggatttgttgggattttcgagtgatatttggagggaagctaatttccttccatacatatggagggtttagttggttggagggtaatatttaaaacatgcgcaaaagttaatactttaatgcatgaaaatgacttttttgagttttaaattcatccatattttatacataatatatgtttatataattagtaaaggataaaaatgttttatttttcttcacacctattaaaccaagccttgaccctagttaggagcggttgagttcagttctttcgctatgcattcattgttttgttttctagttaattgattgagtttttttttttaacatgaattaagttggagttcaccttaccttgttttggtaattgtccaaaaacttaatccaaacctaaattaatatttataattcatattattatgtaatttataatataaattaagtttaaattggcctcaagctaaagttttgatgatttttaggaaatttaattcaaacccaatttaattaatttaatttatatatttctaaaacaattttaagaaaaatggcttcatattataattgttatactatgtactatttcattttgtccaaaagatactattaatattttaaaaatatcatcacatttattatttagatcctcttacaaatctataaaaattgaagtaagagaaaccattataaatggtttgaattcaatctaatgtcacttaattcaaatttgatctttacaaaaaataaggtagtatgaagcttaaataaagcattttaagggtctgtttggtagtaagtttaagaaatatttttagtttttaattttttttatgaattttatctttcaagttttaaaaatgctaaaaactatatttaaaatcaacgcattctaaaactcgagaattagttttatttgaatgtatacccattaatagaaaacccaacacaactcaaccaattgcgctccaaatagaaataatggttgacatttgtaaaagggtcttaattgatccgagcacaatcctttatgggtaagaaaaaagtctcatttctatatgaactattacaatggagtaacttccaagtaaaatcgaaaccatcaacaataatgaattactatatactcctgatgaaactaatctaacacctcataatttaaaccttaatcatagtagaaagggtgcctacattacaaaaactctaactagagtgttttgataatgtgttccgtaataaaaagtaattattttggaagaaattgataggttaggtttattctgtcatgaaaagtttttcaagcccatatttagactcttttttttaagctaaaatataaggtgcaagtagggtttcttttgtggatgcccaaaaaactgagaagtgtcatatgatatggaaaaaaaatggagaaaacaataagggttgtttttctaggattattctagggttgtgaatgtgagagttccttcatcaatctttttgggaaagtttcattattaaatctcttcactcttttttattgaagtgaaagaaattttttcggtggggtcatatgtgttaactattcctattttattgagttattatttataaatcaaaccacacaaataagtagaaaaataaatgaaaaacactagagttttaatgtggtttaacgatcaatgtgatcctacgttcataaaatgtatcaacactaaaaaaatccactaattaaataaaaaagaaaagttacaacgataaaacttccacacacctttcaattgtaatcacattgtctaaaaaatctctaaatcataataaggttaaatatacaataaagataaattcatcattcatcacataaaaaaaaaatttctaggagatgttgtctctttcaacctcagtgagctgacagggtggttcaatctctacaaacttagtgaggatcctataaaaagcataacaaaattgattcaaattttacaatccaataatctttatctattatttaccccttataaaaatatttctcaagcatccattcaaaaatcatttcaaggaattgtcaaatctttagagctcatttggcaataattttagaaagcatttctaatatttttaacacttgaaaaatgttatcatccaagtattataaaaactagaaacgttttatagaataagtaccaaacacactcttaattattgcaatacaaacatttttaaaccttaaaaatctcatctagttttactaaaattactcctacacactttttattgaacagtgaaatacttttttatttttgacatatggaaaaaaaaaagacaaaattgactactgtttaacatcaaattttcaaagttataacttataagctactcccaagctggcacaatagatcgaagagattagaaactaaaactaaacaatttttctaagctgtccaatcaagcggagtcacaaattagaaaactactccacaccatgtgagctctgaaaattctttagcaaaatccttagtccaatgatattattcctacagcattaatctccggtcaagtgaattttccatcacaagcttatgtttgtcccgtgattgacgcctaccaccagtgaccataatgtcatttttccttatatgtaggccaaacttcatctagattcatccaagaaattcatcatattgacttttccaagcattataattggatacgtaattcccaagttgggctctctcaagacttctacataaccatttgaccaatttgttttgtatttttcttaaagtctaccaagacccaattaatttggcaaagcttttaatccgtctagacaacttagattgttataatatatacgttaactttgagcatatggctggttgtgaaaagtttgaaggaaaaaaagaaaaagaaaagacaaagataaagaaaattataatttattttgttcttggattccttgatatttttcacacgtttttttccatattatttaaacataggaaaatatatatatatatatattgagtttttgttttcctccttctaaacttcttaaccaaataaaaaatccgcttgataataattctagaaaatatttttaacctaaaaagtgtttttaaaacaacattagttatttgataaaatttatgaaatatttttttaaaatttgaaaaatcacttgtagcattaaaatattatttgtaatgtttttttagaaataaaacacttccactaaaaacacatctaagaagaaacaatcccaaacacacttctaatatcccatcttaatatttttaaaacaaagaagtttaggattttgaggtttttggtattatgggaagttaaatgcttacaatatttttaaatttaaaagtagttttacaaagccctactatttttatttttatttattttcaatcttttcaatataatttattttttaagttaaattttatttttagatattttatctaaataaaaagagtttaacttttatttgaattttaaatgatatttttatattaatttctatcaagaattgtataaataaaaacaaaatcaaattaaataaataccacagagtttttcgtttagacttaaattatgttggttagttattataattggataaagaatagaaaaacatgttttatttcatatttgattagggatgaatagaattaattatctcaatgctctttgtatctcatatttaatcatacatacaataggataactcatccaacctcatatttatatcatgagatataataattctaagttgagacatgatatatacagattccatgtttcgtcaatttattcatgtcatacatttttttatttttaaaatttctttatatatcgtattttataaaattaaattaaattaaattagaaaaattaaaattttattttgaaaaaataattaaaaaatatggatactacaacttaaatatactaatagtagacattatgtgatatttaaatattaattttattcataaatgttataacaaataaataaaaataattacacaaataataaattatagaatgattttcaaatagtaataataaacaaataaacgattttatatttgtttaaaaacaagcaattaaatgcaatatatttttattttagaaaaaaataattaactttaaaatgtagtatatttttcagttcatttattcattctataaatcaaacatgagcatgatttaatatctaattagatataaatataatattcaaagatgttatatttcattagaagtcatgatattctcctattctagcataacatatataaccttacaatagaaaagaactaagtctaataccatggaaattttcactcaaaatcatcatgattttgtcaatgtgctcgggggcaattcttgtaaaagcacttttaaatttttgttgataatacttctatcataaaaacttaatcgagatttagttaatgtttgaatctaatttaaaagataaatttgaaaacatttctagtaatggaatggaatacataacaaaaaataataataatttttggaataaatatcatatcaagtgataattccaaatttcttaaatttttaatgcttatcaaatacttaatttctataaagaaaaaatttctaaatgttaaaaaatgtttctagtctttcaagaataactctacatcctcaataatttttgttaaattaggagctaaaagtccttgtaacttttgtcttcctttgctaccattagtccgccaatcgtgatgtcacgataatagccaagaataagaataaggaataaaatcatattgtatcaccatttcaaactcataaaaattaaatcacataatgtgtaacacattacttgcttgctcaaataatgtgttacacgataaattattcaactttcatggcctacccacaagtgtctcttaagtcgtaaccaactttccacggaatctcgaaatctaacattaaaagaccaaacaccttgttttagtcaagcattcaaaccggttaggataatttgtatcatgtatttgcagaatctgaagaaccacgtgtaaattcgtccgtgatcaaaggttttaaaagggctgtttttttcttgttttttaatataagaaaaatattggctgatcagtgtcaagaatttcagcatctaaagacatgaacaatttgaatgcatgcattcactgcctttttattaatatggggggttgatgcagatgctacttgacgacctagttaaaatgattgttctgggaggagccctacatttttctttgaatttagatcaactctccatgaagtactcctcacaatgcatgtttggtaagggttttcaaaaataataaattcatatgggaataaaaaataggaaacatttttctatttttaaaaataaaaaaataatacagttttaaaaattaaatatataaatataaaaaatgattaaaaataaaacactaaatgtaaaaattatttctaaaatataaaaaataagttaaaaaatggtagatttttaaatgaacttttgctttacaaaatattaaaaaattatttttcaaaattcttttagaaaataccttccaaacatggtattagttccttcttttctttcccttcaattcaaatttgatttgataaattgggccatcattaaaggcaaatctctcttctgacttctaggcctccatttaacaaaaaaatttccaaaaatctccactaaaaactgattgaatgaaagaatcaccccaatattatctccaaaaaaaaaaaaaaaatcattttttttttgggttgtaattgagataaatatcctcctaaaaaatttgatcagatcccatatgcatattaatgaaattcactgaaatctatctactttggagttaaacatcagtggtattagttttgatttcacatcagcactattttcccttttaattctttgtacatgtccttttagaagaaagttcgctagtcttgatcaaactggtctggccgccaggtttaaccctagaagatttccaaaacatagaagaattttcaatattgttgattattccttaggaaaaaattgaacatgaatggaagtcatttcgatcttagtgctaattaactattttttcagttgttgatcttttaagtgtgaaggcgaccacaacgacagtgtccaattgcaaggggtaagtttgggagggcatgacttagagattatgatgcttctatatatctcccctataaatacccttcaaaccaagcctcatttctcatcaataacctcacttctcatcatagaaactaaaaaagatggggttgtgtaagatttcattgccactccttgttggtctcatggggttagctctagctcacacctgct

SEQ ID NO: 10371 - DNA, 15138 bp, Vitis vinifera
  Intron number 15 from transcript GSVIVT01011573001 (locus GSVIVG01011573001) derived from phytozome v7.0 (chr-ID chr 1; pos 6355944 to 6371081)
aaatttgaaagatatacgcatacgccttttgagtaagtatatttttgcagtttcttctagtcttggtattctatttctgatgattgttgcatcggtcctctttccatttcaagttactttggccaaagcaatgatgcagcattaagaagctcccctagcttctttaatttttccttttttttttgtttctatttatcaggatactctccaggttaagtttttcctatttaaggtgggaaattcaaaattgagggctttgtctcttttttactttcattgttatttccatatggcctacaatgttatgctaacattatgctgtttcttacgtttccttttgtgcttgcatgattcttgaagtttttgcatgaggagttcatttaatatttcataagtacaaattcttgaagcttttcaatcattttttttctatgattatttgaagcagaagcatgtcccaatctgtgcaatagggcatgaataaaagataggccattttattgcatgtggtatggacactagatgcagaccataaagcaaatatgtcctttcatagacagtgtgggggtttaaagcattaggaagaatcacatatgatcaagtgatgaataaggcaagatggttggtgcaaacatcaaatagtttcaatgcataggcatctcacaccaactgcatttactactaatatagtttgcatatatttaaattttcaaggaaatctaggaacaaatatgcaaagcaacattggagatggatcaaaaatgcaaaaatttttagtgatcaacactagaaatagtaggaatagtagattggagattggacaaagttgatgggttctaattatttaattaatcctattggattccaattaattaattatcctagttcaaaaagaccatttatatgatctagtgcaacatcacatttttactaaattgcaaatatgcacacatatgaattaaaaatctaaaattacactcaaaaccatgtcaccatgaatcaagagtttgaatgggaaccacagggacctacaagaaaatcatggcattcttagaatcaaatttttaagttgactcaacatcctattacgaagagtcaactgcattctagtatcttatgaaattataatgagatacaactcagatctacgacctactattcactacatgtagactccccatgaattggtgtcgtgatctaacgaggtacatattaaccttttaagattacctctccaatccttgaattacagatctttctattatttgatcatttgacatactctagctcataagaacatatgtcaaattccacttaaaaaattactgcaacaataaattttataatcacatgtccttaggatgactcaggaggacatatcgtcttaattttcatgaaatatcatggtgtctttattgaaaatacctattgccaccgacctctatcaatagtgaccaaatccgtagggaatatataaccaccttagagtctcacccgtaggttaaagtctcttgatgactttaacacagactcaatgtcctctcaaggttgagagtttatgtggcataggagcttggtgaattatgactacccgatagctaatgtcatgattcaccatagttccattccaatgtgtaaatgatacacaatagtacactcaccatgggaaactcatcctgatgaccaagaccaatcatccctcaaattaggaagtagtgcactatagcctcaaatagattgcccaagtctattaactaattgtgaacaaaacatctacttgcgaagaactcatgacttagatctttcgtgtaacttttaattcacttaagtcatatacaatgcaagagatgtcagacttgaatgcttaacatatataatgcataaatgagataaaaaaaaggagaactagaatcataatataaatattaatgaattccatttatccttatatcatatcatgcttttaaaggctccatcccaactaatgcaaactaaccccacgcttaatttcacttctcaaaccatttacaaacctagtaacaatgactcaatagtccttgtgaatgccacaacataacattggttccttaaattggccatatacttagtaatagaggaagtagcttgtctgaggtttaataattgatctaacaagtgatttctatgattggctactaaatacttttttgttagtcttaacttcacctcttcccacaatataatagggtcttgacttagatagttgatgtcatgcaagtctgactgccaataacacttagtagatcctatgagttttatcttagcacaacaaactcgttgagtgtcaatcatgctataccaatcaaagtaatcttctaattggctaactaatccaaaaacacatctagctctaacgtaccatcaaactataacacctttatgtttaatctcatagtgttttcatctacctccttgtggatatacctcgattagtcataatggtttagtagagataaaggttttttttgtcaacaatggtatctatcctagggtgatgcctaaaggtattcctaacaccctcatttagaaattgtggcatagattctcctatcaccgagaatagacattaggggactaaaagcttcatcctcatctacatcatcatcctcgtttctatgtttgcttttgggtgactttccctaaggtgtaggtagcaaagtcacttgagaatctcttagtcctttatgatttagggattgataagagttttttcctatagtagactcatctattgtttctcccttgtggaactttccagtatctttcaataaatgatccaagtctacaagaagtttgatgactctatcttttacttctttcatatggacttgtatgattgtcacaatggttgtgaggtgttgtgcatccccttgaagagtcaaatgagattgttctaattttatgaccttcatgtttggtgaaaacaaagattaggcaaaaaaaggaaaccaagaaaaatgatgaaaaaagggataatgttgagacaaacttgaattattttaattaatatcaaatcacttctagattggatgaatgaaatgaataatgactcaaacgacggaccatacaatgactcaaaagaaagttaaaaagtacaaaacaagtaagaaataagctaaggttaaaaaaaaaaaaggtgaaataaatggttcacattttttttattaaggtgatagcaaaaagggaaataagaaaatgaaggcaagaatacttacacattacttgttaaatcaaagaactaaactaatagcatatatttccaagtagtgaaaaaaaaaaaaaatacctcatgagacttgatggaggaattgagcccttagattgataagaagattccaatgatacaaaacacatctaaaaatcaaccttggctgtagtttagcgcctgtagtttagtagtgaacattccatgttgcaaaacacatccaaaaatcaagcttggctatgttttagtgcttgtaatttagcagtgagaattgcacattgcaaaacacgtctagaaattgaccttcctctgatattcattgatgtaggacagtagaggaaaaacaatatagaggaataaaatggaagtaggagagagaaattataaaggatcttggtcctttgatatattttctaagcatggaggcagcacattctagcaaaggtattgcaatcttatatagaaagtacacatttgatttgttaaaagaaatgggcatactaggattaaaatcttgtgatgttcccattgatgccaatcacaaaattagactatctgagaaaggtaaagcaattgatagagaacgttaccaaaaggttatttggtaagttaatctatttgtcacatagtaggccaaatacagctttttgagttggtgttgtgagccaatatatgcaattatctagtgaaaacacatggaagtagtatacaagatcctaaagtacttaaagaggacactgaggagggggtttttattcaaaagaagtgaacaattactactaaaagccttcacgaacactaactgtgcagtttctatcatggcaggagatcaacttcaagtttttgcacatttgttaagggaaaccttgtaacttggagaagtaagaagcaagtggtttttgctataatagtgcagaagaagctgagtttagagttgtggcacatgggatgtgtgaacttcattggctaaatatttcttagaaaagttgaagtcatggatagaggctgctatgagattgtattgtgtcaacatggcagtaataaacatagctcagaatccagtacaacactaccagacaaaacatgttgagattgatcaacacttcataaaggaaaagctagaaaatagactaaattgcatgcctttcattctaacagaggaacaactggctgacatattcaccaaaggactgcctaaaccaaaatttaagtctttaacgcacatgttgggtttgattgatatcttagaaccaacttgataggaagtgtaaaaatgtttgattggtttaggagctattttctaggagaaatagttgcgataagtctgattggtaggggtacaaatcaaggataattatctcctatattaaattaacttcctattcaaattaggataactataataacaaatcttagtcttatatgtagttatatatatgtatatataactgtggaagtccatcccgttgtacattttttggacgatttggaagggggtgggggggtgttagcaattcagaagttaaaaacttcttttgtgtgtaatttatagggttgggctaaattgtatattggaaaggagccgctctcccttataggcttcttggagtggttagcctccatttaggggtgcgtgatttttgttcttttttggttgggaggccttagtcgcctcatatactccttgtatgctttgcggctcttttgccttctgttaatatattatgcgtttacttatcaaaatatatatatatatatatataatgattttaaaaagttttatataagcgtgataaatggtaatattcgaaaaaaaatttcaatattcttaaattttttaagcaaaaatgacaattatatgatattgattaataataatcaaataacaattgttgaatataatgtatttatagtatcttatctttccttgttaatataggtcacatgtatggtagttaggactcctagccttgtatggtagttaggactcctagccttgtatatatatatctctcaattgtaagtagatattacatgaatgagaattaaggtttttcttctttctctctctcaacatggtatcagagctagggaagaaaacctaattctttcctgtttcccgtgtcatcaactccgggcaacctttcggtgaccgtgtttcattccggtcaccttccccatctgccaatactttccggtcagtcggaacgtcgttagaaaccactcaccgccggcgaaatttgccggcgaactttccggcgaacttttccggcgacctatttttccgacaccgaccataccagaaggagcgcctggaggagatctccaacttttgtgaaggcaccggcaccaaaagaggatccacgcgccggccacgcgccattttccagccggcgactgcatctcacgcgccggcgcgtgagggcgcgtgaggccttttccggcgacgcgcctcctcctccagcctcgtctgccgccgaccagcatccctacctacctggttctcccatccgagccctgcacgtacctcttttggggatttttgtctccgtcagccctccaaacagcctttccggcgaagttccggctactttctctccaccccaatccctgcacgtgccttgggaagtgttcttctacctttctggtggtaccacgtcgcgatctgaggccgtctccctttttcggtggtgccacgccgcaatctgaagccgtattagggctctcttcgatccaaatacgtgaatatgaccaccaaaaatcagatctttacctctgttatctctggatctcctatgattacctcagagaaattggttggcagtgaaaattatctttcctggtctgtctctgttgaactttggtttatgggtcaaggatatgaggatcacttggttacccaggaggcagatatccctgaggttgaccgcgtacagtggaggaagatagatgcacagttatgtagtgtattatggcaatcggttgatccccggattcttcttcatcttcaggcctataaaacttgttttaaattttggactcaggccaaaggattatacacgaatgatatccagcgtctttataaggtggcttctgctattgtccatctcagccaacaggacttggatctatctacttatattggtcagattgcctctcttaaagagcagttcttgactgtgatgcctcttactcctgatgttggggctcaacaaacacagcttgacaagttcttcatggtccttactcttattggcctccgtccggatcttgagcctattcgtgatcagattcttggtagttcatcagttccgtccttggatgatgtgtttgctcgcctcctccgtatctcgtccactcagactttgccatctgatagcgcttcagattcttctgtgttagtttctcaaactacctctcgaggaggacgcagtggtacccgaggtagaggccaacgtcctcattgcacctattgcaataaacttggccacactcgcgatcgttgctatcagttacatggaagacctcctcgcactgcccatatggcccagtcctctgattctccgctgcctcagcctccgagctcctccgcatctcagacatctcaggcttctattgcctctgttgcccagcctggtaatgcctctgcctgccttacccacacatcttctcttggaccctggattctagattctggagcatctgatcacctatctggtaataaggatcttttctcctctattactactacctctgatttacctactgttaccttagctaatggttctcaaactgtggctaaaggtattggtttgacccttcctctgccttctctacctctcacttctgtcctttatactcctgaatgtccttttaatcttatttccatcagcaaaatcactcgtactcttaattgttctattaccttttctgataaatttgtgaccttgcaggaccggagtacggggaagacgattggcataggacgtgagtctcaaggcctctatcacctcacctcagattcatctcctgcagtttgcatttccactgatgctcctctcctcattcacaatcgtctgggccaccctagtctctccaagttccagaagatggttcctcgtttttccactttgtcgtcgcttccgtgtgagtcatgtcagcttgggaaacatactcgtgtctcgttcccaaagcgtttgaataatcgggcaaagtctccttttgagcttgtccacactgatgtttggggtccttgtcggactgcatctactttaggatttcagtattttgtcactttcattgatgactattctcgatgtacttggttgtttttaatgaaaaatcgagctgagttattctctattttccagaaattttatactgaaatccaaacccagttcaatatttctattcgtgtgttacgcagtgacaatgccagagaatatttttcagcccaatttacttcgtttatgtctcatcatgggattcttcatcagtcttcttgtgctcatactcctcaacaaaatggggtagctgaacgcaagaatcgacatcttgttgagacagctcgtactctcctcctccatagtcacgttccttttcgtttttggggggacgctgttcttaccgcttgttatttgattaatcgtatgccctcctctgtcttacacgatcagattcctcactcccttcttttccctgaccaaccactttatttccttcgccctcgtgtctttggttgtacttgctttgttcatattctcactcctggacaggacaagctttccgccaaagccatgaagtgccttttcttgggatattccagacttcagaagggttatcgttgttattcccttgagactcatcgatactttatctccgctgatgtcaccttctttgaggactcaccattcttttccaccacttctgagtctcttcctgtttctgaagtcttgcccattcccattgtctccccacctgatgctatgccccctcgaccacttcaggtttatcatcgtcgccctcgtgtcgttgctcctctcccttttcctgaggcacctgctgactcacttcctatcccttcggcttcacctgccccggctctgccttctcctaatgacttacccattgctgttcggaaaggtactcgctctactcgtaatcctcatcctatttacaattttttgagttatcatcgattatcttcaccctattctgcttttgtttctgctatatcctctgtttctcttccaaagagcacccatgaagctctttcccatccaggctggcgacaggcaatggtggatgaaatggctgctctgcactctaatggcacttgggatcttgttgttttaccctctggtaaatctacagttggttgtcgttgggtctatgcagttaaggttggtcctgatggtcaggttgatcgccttaaggcccgcttagttgctaaaggctatactcaagtttatggttctgattatggtgacacattctcacctgttgccaagattgcttctgtccgcttgcttctctccatggctgctatgtgttcttggcctctttatcagttggatattaaaaatgccttccttcatggtgatcttgccgaggaagtttatatggagcaacctcctggttttgttgctcagggggagtctggtttagtgtgcaggttacgccgttctctatatggcttgaaacaatctcctcgagcatggtttagccgttttagttctgttgttcaagagtttggcatgcttcgcagtacagcagaccattcagttttttatcatcataactctttggggcagtgtatttatctggttgtttatgtggacgacatcgtcattacaggcagtgatcaggatggtattcagaaactaaagcaacatctttttacccactttcagaccaaagacttggggaaactcaagtatttcttgggaattgagatagctcaatccagttctggtgtggtcctttcccaaaggaagtatgctttagacatcctggaagaaaccggtatgttagactgtaaaccggtagacacacctatggatccgaatgtcaaacttgtaccaggacagggggagcctttaggagaccccgggagatatcgacggctcgtaggtaaattgaactatctcaccattactcgtccagacatttcttttcctgtgagtgttgttagtcaattcctacagtcaccatgtgatagccattgggatgccgtaatccgtattcttcgatatatcaaaagtagaccaggccaaggtgtattgtaccagaatagaggtcatactcaagttgttggttacacagatgcagattgggctggctcacccacagatagacgttccacttcagggtactgtgtttttattggaggtaatctaatatcttggaagagtaagaaacaagatgtagtggccagatctagcgctgaagccgagtatcgagctatggctttggcaacatgtgaactcatatggttgagacatcttcttcaggagttgagatttggaaaggatgaacagatgaaactcatctgtgataaccaggccgcattacatattgcatccaatccagtctttcatgaaaggaccaagcatattgaagttgactgtcattttattagagagaagatcgcatcaggatgtattgctacaagttttgtcaattcaaatgatcaactagcagacatcttcactaaatctctcagaggtcctaggattaaatatatttgtaacaagcttggtgcatatgacgtatatgctccagcttgagggggagtgttgaatataatgtatttatagtatcttatctttccttgttaatataggtcacatgtatggtagttaggactcctagccttgtatggtagttaggactcctagccttgtatatatatatctctcaattgtaagtagatattacatgaatgagaattaaggtttttcttctttctctctctcaacaacaatgaaaataaataatattaataatttgatacagattctaggtataaaaaaatgcatattaacaaccttgatgtagtttctgttaagtacaaaaaatgttgattttttttttgtcttcatcacttttagttataaataacaataattacatagcttttaactatgtctaattttgttggaatatttggattaattcattccaagcccaagatcgtgatatatatatactctgtattagttgtattcatttatttgtatcaatataagttaagtttttcccaatctatcagaacccaacgtcgaggttgtcccaacatgggtcttaatagtttcgcaaaataggaagaaaacaacattcttatcccgtgtccacttccaaaatggcttgtcatgcaagttgaattgttaatcacaatttttatgtttcaatcaaggttagagtagtgaaaattgtggttctaactacccaactagagttcatagtaacctatatataggtaattgagaattcaagtggaataagatataaaaactgaatagaaactctgccaaatctctcctttctacttacttcttcgtcattctcttaacttatccatcaaagaagatgctctgaaggcaactctaatcatcttggttgtaagtattgctaggaaatcacctcaatagtattgttcactaaaaggaggttgttggaatccaccaacagcaatgtccaaaaggaaatttgcaacttgatacttagatcgaagagacattagcgcatgataataataatacagggaatgatgcctccaacaatattgggttcccaaatgttgatttttaagaagcagttgaggattatttttgttttttttttttcacttgtcaatcatatgctagttgcacaagagcaataaagtgaaaagtgaaagtgaatttctatattccaaaccatgtcatgttgtaggaatgaagctcataaattaattactaaaggaggtaacccatatgaatatagcatttgaagctaccactataaagttgaagttgccaattgactaactcctcaaccacacaaggtagcatggatcaataggtcttatatttcagtaacaaaatgatatttggtttctttttttcgtcattattataatgattatacttggtgtaatgttttcctgtgaaagtccaatcatggaaaaactaatacatattcttttatattcaataaagataacattgtttttaaaatgtattgtgaagctaccaattgaactaaaagtttaagttgttagataatagactagcaaagaatatcaagctactttggactaaagtcctaacaatcaacctcactagccttctagacttgtgagtaggctcaataaaaaaacatgtgcaaggaggggaacaaacaagttgtaaggttcaaattcgttacatacgaacaaccaaagctctaataccatattaaacttccaatttgaaaaaaaaacttaagtgttagttgatagacaaacaatgaatctcaagttaatttggccttaagccctaacacccattgattcatgaaagtacattttttcaaattaatgtaaaatttttcagccctaagagtgcgcattacttacttcaagtgttcctcatgatcttcacaagatcgactatagataaaaatatcatcaaaatggacaacaacaaaccgtccaataaaaggtttcaatacctacatcataacccgcatgaaggtacttggagcattggttagtccaaacgacatgactaaccactcatacaatccatccttagttttgaaagatgtcttccattcatcccctggtctaatacgtatttgatgatatccacttcttagatcaatctttgagaagattactgatccaaccatcatatctagcatgtcatcaagtcttggaattggaaatcgatacttgattgtaattttgttgattgcacaactatccacacgcatccgccatgatccatccttctttggtgttagtagggcaagaactccgcaaggacttaggctttcacgaataaagcctttagtaagtaattcatcaacttgccttttcaattcagcatgctttgttggattcattctgtaggctggtaaatttggtaatgatgcatcgggaatcaaatcaatggcatgttgtacttcacacataggagggagttgattagataactctgcatgccacaagttagaaaagtcatcaaggattttacgtacgtttgctggatattccttatcttattctttaaattcttccattttccaagccattaaagcaaaaataactttagtttccttgctctcattttcaaattgacacattgtaagtaccttttttggttgtgcctcctcctctgacttcttaattggagggacttctttcattggacaaaggatcttcttacgcccgttgtgtatgagagcatatgtattttcataaccgtcgtgtcgaactcttctatcaaagagttaaggtcttccaagtaaaatatgacttacttttatctataggacctcacacaatacagactcttcaaagtccttaccaaaaaggaatgttactaagcaacgaaaacttaccgagatagaggtgtcattaacctgtgctactttgaatggatttggatgtctctctgttttaaggtttagcttctcaacaagttcttgcgaaactatgttcaaactgttacctccatcaatgatcatggtgcataatctcccttggcaaaaaatacgtgtttggaaaatgctagtacgtcgccaatcttcttcttcttttacctttgggatagctaataaaggtcgtactacaagactatgcccttccgtcataccatcatagtagtcacattcttcactaacttcatcttcattgtaagtctcttcttcctttgggtaactctccaattcagattctggttcttcaacacaaaagtgtaattggttgggcatacaacaacataatgaccatgcccaccacacttaaagcataaaggagtcacgtctacttttctatctccaatactcattgaagttttacccttattaccattcttatgagccacattcgaagtttgttgagtgttgcccccaccattcacatgattagaagttttgaagtttgatgtgcttaaaggtttgcttactgtcctgttggagaaagtgctcccaatttgtgaacttggacgcttggaaacccgaaatttgaggccttcttctattttgagggttagttgataaacatcatctacggtagaagtgtgtgcaactatcatctcaagttgaatctccattcgaagtccagctttgtagcgggctgcaagttgagcatcactttcccgcacttgattccgaatgctcaatttatggaattcttctgtatattcttcaacggacttggttccttgtttaagggaaaacaattttgtatacataagttgttcataatcagttgggagaaagtgctccttcatcttcaacttcatctcgtcccatgtgtcaataggtggttggccagttctatgaacttgattctcaatattatgccaccatagatgtgctgttccttttaactttgccttcacaaaacgaacttttctattttcgggcattgcataccaatcaaagtaatcttccattgacataatccaatcaagaaaagctgttggatttagttttccataaaattcagcaacttcaagacgtacctttttagtcacatcatcatctagctcaaaaagtccggcccttctttgagtccccatcataaaatggtcttgttcttcgcatgatcgacttggcgattgtctaaattgatgacttgcaatctcctcttcaattggtcgtttttcttgactcttttctaataacttcattatctcatcaagtttgctatttagttgtattatagcatcttgatgggattgttgtgtggctgaaatttcctccaagcgtattgtagcggcatcttgattgctagaagtttttttggaactcatgcttgcataagttgctccgctccttaattgcatatgccttccatccaagaactttggctttgataccaaaattgatgtaggacaaccctaggatggttgcctacactcaagggtaggtggactagggtttattttttagggtgtaaggagaggaacaaagaataaattttatggtagataaaattataagataagaaatagagagaaagaagaaacaatgaagaaaagatggaaaaccttagagttttactaaggccttctaggagtctcacctagaagaaaatcaatggaatctcaccattgagggttgcaaccttacaatgaaagaaaatataatattattcatatcaattcatctatttgatttacattgattagcctatttataggcttctctaagaaattcaaagtctactaggactctaataacctattatgattctaattctaattataacatccaaaatctactagaactctaataacctatcatgactcaaattctaattatattataactcaactagctaatcttaattagactctaacaaataccaatctcaagtcaattctaaataatattagtcgtacttaaagtttacttagatcttccttttcttccttgaataaactttaaaaggctttcccccatcacccatgaagatggaatagatgaccaacatgtttcatataaaacacccacgttttatattatagggtcttattatttttattaaacatagttctaaactaacatgaccagctctaaaagcatttttatttcaagacagaaactcctacattcaaaattgatttttttttttttttaaattttgctaatttgagctaaaaaattttataccaggtgttcaagctgcgtactggagg

SEQ ID NO: 10372 - DNA, 4588 bp, Vitis vinifera
  Intron number 23 from transcript GSVIVT01015912001 (locus GSVIVG01015912001) derived from phytozome v7.0 (chr-ID chr 3; pos 19274942 to 19279529 reverse strand)
ggaaacacttgagctatatcttgtctctctctctctctctctctctctctcataagtatgcaaacatgcatagatgtgcacacacacacatccttattactatatattgtggtacacagacactaattttagtcaaaataccatgttgacacgatacaacatggggtgtggttgtaagatccatgtcggatacacttacattccattggatacaactatttaactcgtgcctactttatctctttttttttaattatgcttatattgtatcaaatacaattatttcactctttatttctttcttaattgtttttatattatatcaaatgagagtataaaataaattgcaattaaaaaaataaagatttttttttttaatttctaactcttataactaaagaagtgctttatatcttctttttaaaaaaagaaaaaaaattataattgataaaatttgaagataaatataataattaatattatataaaattttaaaataagtatataatagttaatagcataaaaagtttgaatataaatattaagattaatatcctaagaaatctagagataaattataataattaatataaaaaatcaaaatttttgcatgaatctaataaatataataatttatataaatacatatttaatttacattgaatctttatctaatatattgggaaatttttattacaaaatcaatataaatttaaaaaaaaataaactaatcaaagtttactaataatgtggtataatattttattaaagtttttttttcaacatcctattaaaataaaagacctataataaatagattctttatgtacaattagtcataacatcaaagtaaaataatatttagcatcttattaaaatagaaaagatacaataaataaattttctatctacaattaacaatgtagtattatagattatttatcttattgtgtttatatttagtgttaatttatttttcattaatggtgtatccccatatttgcacccatagtttagatcatttttagctaaattcctatgtgttaagattttgggatgcaaaagatctgacacctagatatgtacctgcacataacactcgtacataaacccatatagcatggattatatgcatgacacaatgctaaagtggctgaagttggagtttattccatgaaaaaatgtaccaataaagtttctagtagactccatattgtcaagaacttaaaatgaagtcatttgaagaaaaaccaaccctttaagggttttaattggctaaactagcattcaccttctatattttcttaaacagttttttcatattattaacaaggtattgcttataaaattgtaaaatgtttcaaaggctatttaaattatatagaatatttttcataaaagatacctaaaggccatgggtttagtagtgtttgtggtatttggttgatagattatgttcttgacttagatgtctaaagattttacattcataagtatgtttatatgcttataatctagggtgatgttatctatcaaaataataataatgataataataatctagggtgatgttcttggagaactatgtaaaggtttggcaagaaaaaatgaaaattcaactcaactaagccaaatagttgtattaggtgaagtgattgtcaatttagtttgcttggttcatcaataacttcctaaatttctcaacaatcagatcctttttttaaataattatagtgaattaagtcagatcctaaatttatcttccccttttgggtggaactttaactttctttaaaacctcattgattcggaaattgaggatctcaaaagcctcattgtccattctttattgggtgaacctatcactgtccttcctagatgtgaaagtttaatcatcattatcatcatccccatacacacaatcaaagcatttttcctaaccttatgcaatcaatcaattccaatccttttctctccaacaaacttcctttggacttcaaaaaccccatcaatgggtcaacacatttgcttggttagtgaccaataatagagttcacacaaatgacttgcttcaagtgagatgacctttcatagcccttagtcctactcattgcattttgtgtttgaaaagtatatagttaattgataatctttttttactttgtccactaaccttggagctatgacataagttatttaggctagctagattggattgagtttctcatagaagtgtcagtaacataatgaccatttcttttaggggattgaggaactccattagaggctaagttctatgacatattgtttgccttacattgatttggatagtataatgggaaagaaatgcaagaatctttgaggatatgtggaggacttttgagatgatatgggacctaatttatttctattcctccttttggacttctactactcccactttttaggcataccactcaaaatcattcaacttgattggtttttgatatgtggatcaaaagggtaaatgagtaaagaaaggatcattaccaatgtatttttatagaaggattcttttcctatgttttgatcaaattttgtaattgtgagaaggatttctcatccttctaatccattttaatgagaatgttgtgtttcaaattaaatatatatatatatatatatatatatcagacaacttgctctgtatcccagtattcacactcatagtttagatcagttttagttgaattcctatgtcttaagattttgggatgcaaaaattccagcacctagatacgtacatgcacacaaccatgcccaaacccatataacatggactatatacatgacacaattctaaagtgattgaagttggagtttattccatgaaaaaaatgtaccaataaagtttctagtagactccatattgttaagaacttaaaatgaagagccatttgaagaaaagccaaccttttaaagtttttgagtcgctgaactagtattcaccttctgtattttctttaacagatttttcatgtcattaacaaggtatggccttacaacatcataaaatgtttgaaaggctattaaacttatacagaatattattcataaaagtcttttgccttgggtttaagaagtaccattggtttggattagtatttctggtatttggttgatagattgtgttctcgacttagatgtttaaagattttacatttatatatatctatttatatgcttattatttagggggatgttttcaaagagcaatttaaagttttgaccagaaaaaataaaaattcaactcaactaagccaaatagttgtgttaagtaggcaattgtcgatttagtttgcttggtttgccaataactttccgaaatttcttgaaatctagatcatatttttaaataattatagtgaattaagtcaagtcttaaatttctcttccccatttggttggaactttaccttttgtcaaaacctcattgatttggagattgaggatctcaaaagcctcatgtccattccaaattgtgtgaacctatcactgtcctttctagatttgagagtttggtcattattatcctcaggcttattcatagtgaagctatttctcctagccttatgcaatcaatcaattccaacccttttctctctagcaagattcatttggaagtcaaagcctcatcaaaaggttgaggcatttgcttgattaatagcaaattagagagttaacacaaatgacttgcttcaggtgagaagacctttcatggccctcagtcctcattgttgcattttgtgtttgaacaacggacagtcgattgatcacctttttttacattgtctactgaatatggaactatggcataaattatttaaactagccgaattggattgagtttctcctaaaagtatcaatgacataatgaccatttcttttaggggattggggaattctattagaggcaaagttttatggcatattgcttgctttacgttgatttgaatagtatggtggaaaagaaatgcaaggatctttgagaataaatggacttctgagttgatatgggacctaatttatttttattcctccttttgggcttctactactttcgctttttaagggcataacactcaatttcattcaacttgattggttttcgatatgtaaatcaaaagggtaaattagcaaagaaaggaacatttgccaatgtatttttgtagaaggattctcttcctctgctttaatcagattttgtaattgtgggaagaatttctcatccttcttttgtacttattaatccattttaatgaaaatgttgtgtttctaatataaaaaataaaagttaaattaaaaatgtcagacagcttgttggtatgtccagcttgtcagtatgtccatagatcatagaatatgcagtggcttttacattcatccacctgtgacttgttcctttttccattgcaaattttagatataattgttttcacacttcattttggataagcaatcatgaaagttttcccttttctgcactcaattgatttcctcactaattgtcatagaatacattaattgcaggaaaaatataaaggattta

SEQ ID NO: 10373 - DNA, 5922 bp, Vitis vinifera
  Intron number 29 from transcript GSVIVT01021613001 (locus GSVIVG01021613001) derived from phytozome v7.0 (chr-ID chr 10; pos 8032337 to 8038258 reverse strand)
acagattccgattataattgccgtttattgttcgggtaactgttctgtctctctcttttactgttattctaaatggtgtcaattaaaagacagtgattacaacacctcttattttctgacattttaagctctataagtacaaatcagtattgctgtacccttacataggttgtataattgtgttagaaagttctttgagaaattcaggaatacttgtgtagtaattagtacaatttctagtttattaaaatctcatgaaaatattaaaaggttctctagaaatgtttgtgatataaatatttcatcacttttcatgactaattttcaaatattacacttataaaattatgtgtgaaaaatatgtggggaaatttgaatttcattaatacaaatattgagattatagcaaggaaatatatacatctgtataaaattattttaggaaactatcaaatcagtctagccaccgttctaggagaatttacagcctacatattaacctgcatatttacaacaataagataattagggaagaactgtcagtctgcatatatacaacctacacaacagcctgcatatttttattcttgaatatgtcacctttattctaaggaaatatttaagccttcctaaatccttgatttcaaattcagaagccaaatattgccttaaattttttatttcttcttgattatttcctgtcacaattatatcatttacatagatgattagaacaactactttattttgaggtctctgtttaataaaaaagtgcatgatcacgttgactttgtttgtatccaaacctcatcacgacctttgtaaatttatcaaacaaggccctaggggattgcttaaggctatataatgaccttttgagccaacacactttcctttcaaacctatctatgaaaccaggtggaatttccatgtaaacctcctcatctagatctcgatgcaaaaaacatttttttatatcaaattgccgcaagatccaatttagattattagcaagagaaattaaaattctaatgttattcattttagccattgaggcaaaagtttcatggtaatctatcctactagtgtgagtggattctgaataccaacctagcattatatctctctaaagatccttcaactttatgtttgattgtgaagatccatttacaacttacaagcttcctccctttagacaaatctattatctcccaaatttcattcttcttcaaggctctcatttcttccaacataacttctttctagtttggattacaaaaggcctctttgacacttttaggaatctatgataggcaattgggagacaaaagaattgaaagtatgagaatggggtattgaatacatgttcttttcccttttctaagtgcaataggaagaaacaaatcatcattgtaagcacttgattcaattgaaatagaattgatattacttggttttagttccaatagttgagcatgctttggatctatgataggctttttcttccttgagtaaaccctcagtggagatggcttatcttgctctttagatggcgagtcctcctttggaacaataagatcaggttcaatttctacagtaggagatgaaatgggagattcttgtatgggtggtgacttggatgtaatgggaggcttgggggaaatgagttaaatgagtggctgtcaaaatagcttcaccccaatctaattttgttactttcatttggaaaagtagagttctagtagccacaagcaaatgtttatttttcctctcagtgaccccattttgttggggagtatgagtacatgaaaaactattgaatgatcccttctttttgacaaatggaaaacaactcattattgaaaaattgccttccatcactatatcaatatattttcaacatgtggagaaatagcagcctgcatattttcatcaatatatcatgaaaaatatactctgtcctttggacaaaatcatttttgtttctatctgccctaacaatcagactctaaaagggatcactctttttctttttctttttttcacttttgagtatagaaacatgaaagggatcttctatcaatgaattggtgaaataaaatattgttgttgtttggtcttaacaagtggctttcatgttatttattgaactctgctagtgacttgtttataaaatgctagttttttttttgcgaaatctgaaatattgtgcaatgggttgattcaaggataagtttagctatttatttatttatttgtttattgttttggtatttatggttcatttgattgtattaccatttcttgttttctcccctttcttgaatggtaacacttgtgaaaacatattcacctacatttatacatttcttcaaacatttttcaagttttcaagaaacaccattttaaaaaaaatgaaaagctctcataattcttttaaatgtacgagtttagcaatttatggagacagacaagaaattttattttattgtttcatatttttgtactatgtcttatactactttcaatcatcctcactgctgccattttccccactatccaacaactgtatccactgcaatcttgacaatattagacatcccacttactccgtcaccaccaccaccactaactattaccaacaacccatactaattttattctctattataagcaaaagctaatttattgtggtcattgcacttggcttctatatagaaccaaagtcacatggatccactttacaatgcaacaaacagtttgacacttagatgcttcttaaataagggttattgtcattttactgacacatgtcaaatttagcccttgtgtatttgccttttatgtcctggtactactcacatgcaaaaccattttcttccagaagagaagcatattgtcacggacttagtcgttcactaagctcgtgcggcacttaggcaagtcaagatgcttgatcttgctaagtcagccttgctcctaatgcttagcttgctaggctaagacgctcacaactcgaaagcttaagaagcttagtaggcaactctttaaagaatggaagctcttattaactcaagaaagcttttacaagtgcttggaagctcacttgcttggtgccttggccaaatgaggccctcacctatttataggcaccaatggaactttctggaaccttggagggttccttacaactcaagtatattctagaatgtcctacatcattctaggtacaaggctatgtacaaggatatacaagagacttctggaattctctagaaagccctggactcctcttatgccttccaccatagtgtagaattgtgtggattcctccaggcttctctagaacgtttcacactcttcccactctaggagtctccaaaagcttcctgactctatataagcccatggggaggctcatttgaatcattctgtgacaatatgttgtagttgattttattggggatctcatgcctacttttataattttatttttaaattttttataatctatttttttagggatgaaagtgaaggcctttgactatgagaaatttgttgttgtatgtctgggacttttttgttgtctcttttgaaggatttctcatcctttttcttttagaaaattcacttttgcatgcagtacaaatatacgccaatactagctttagtgtggtcatccacctgggctgctttattgcaccagggtgccatggatcccctttacaatgcaacaaactgtttgaaacttagatttttctcgagtatgagttattgtcattttacagacacatgtcaaagttagcccatgtgtatttaccttatatgccttggtactatacacaagaaaaaacattttcttccaacagaggagcatcatccctagttgattttattgggaatctcatgccccctttgttttttatttaaaattttttatcttatattttttagggatgaaaatgaaggcttttgactcttgaggattttgttgctgatctcttggactttttctctttctctttgaaggatttctcagtcttttgcttttaaaaaaattctcttttgcatgcagcacaaatgtattgttttattaaaaacaaaaaaagtaaatgatgcaacaatatagtcatgttttggcccaaaaccttctgttcaacatggagttaacttgcatgaacaaaatctgggaactgagattgtccccataaaccaacttaacctctaaaaccaaaatgaccactgaaacaagccataggaatctcccacctttgagaagaatctaagctctaagacgtttcaaaattgatatctcaattttttgtgcttcaatgaaaactaaaagaaaaaaggaaccgttggttattcttccatttatctctattaactaagagtgtatagaagttcaacataattttactgaaccaaccctgatttggtaaaagtagaatacttaaataattcaaaatgaattgggtagagaatgaattagtgcctcaaataagggaaagtgtagaagagagattgaataataaaagttagaaaattctttttcttaattcttctgtactaagacacatacacatatttatatacaaaagtcctagaactcaaattagggactttcttaaatcaattacaacaaaatccctttgattatgggttggctaattctccattaagaatcacatctttcctaatttcaatcttccacactccccctcaggctggtgaatagatgttttccattcccaacttagatatgcttgtttgaaactttgtactgcttaaatgttttgtgtgtatatctgcaagttggtggtcagttgatacatatgggttacagatcaatccactatctagtttttctttgataaaatgcctgtcaatttccatctatttccttcgatcgtgttgcattggattatgtgcaatattgattgctgatttattgttgcagtaaattctcattggcccatcccatttaatcttcaaatcttccaaaataatcttcaaccatggtagttcacagactccttgggccattgcttaaaattccgcttctacactggaccttgctaccaaactttgttttcaccaaattcccacccatgtagaagagagattgaagaataaaaggtgtaaaattcttctgtatagagacacatacacacacacacacatatatatatatatatacaaaaatcctagaacccaaattagggactttcctagctcaattacaacaaaatccctttgattacgagattgcctaattctttattcagaatcacatctttcctaatttcaatctttcacagaaagacattcagttctagaaaaattctaatcctctctcttttctcccttttctccataattatctgcctctctctctaggttgacttttttttctagcattgtctcttaaatttggttgatgtatgaatgaagatcttatgtgtgatatattggccctaagtactacaatatgcctttgcataggggcagaaggtggcaacactagaagctggcacattgcattcaaagtttgcctatttgcaaattttatgaattttctggatttttacctactgacactaaattctccctaacccactttactaccatgcttgatgcttgcaaaattacatccaatgatcacattaaggccttcaacatgtcaattttgagttctaatgtatagaggtataattcttttttatttattttttaatcatcattttcccagtaacgtaaagtccatatttttattgcttagggcacatgatatgattcttaaattttgtttctctatcagcatttatttatttattttgcttaatatgtttctattccaacaaacctgtttaaatgcttctcacaggtatactccagttcgctcagattctattgttggag

SEQ ID NO: 10374 - DNA, 2274 bp, Vitis vinifera
  Intron number 2 from transcript GSVIVT01012792001 (locus G SVIVG01012792001) derived from phytozome v7.0 (chr-ID chr1 8; pos 23203208 to 23205481 reverse strand)
caagctgacacccgagcaggtttcgcaaatctcaagtgagtgtcttgtgttgctactgcttatggaattgttcaattcggctggattcttgaatgatttagggctttttttgttcatttctgatgattttttttttgaataatttggggcttgtttttaattcttggcgaattgatgaaattcattcatatattgtgttaattttgaaaatatttagcaatccaaaagcatagatacacatgttcctacctgtttttcagaatttttttttggggaaaaactttcctttatgagatactgttcaatgaagttggacaaatccgaggccatgatttctgataaaattaactgataaaaattctcattatgataagaatttttcaggttgagtgagatttggtggtttggactggtgtttggcttgaattctgaaaacatgttactgcattttccaaaactttgaaaatggaagggcctaaaattttcagaattttgtctctgttgtttcctttttcttataaacaaaaaatagaaatgaaattgcatagaatctgaaattccaatccatcctttctcccttttgtactatggtgcatgatccttatttctcatacttatgttgtcccctcttcctctctcttttgtcttttacaaagtttgttctcatcagatcatgaaaacaaccccctccccaaggaaataattcataccagaattcctcagccttcttaaattcagtttttatagtattagtttggttggtagtttaaatttccttggatgattcaaaaaaaaaaaaaaattctttggtttaccatcttatactgatatgcatgattctgccttggttatgcatatattatgaaagggttcttgaggtgaaatcctcatcaggaaggactttgcttcttggaaaatgaaggaatttgtaatgcttgtattttcaaatttcaattctacccacatttgcaggagaattgttccttggaatctatgttcttttactaattgctggttgtttggggttggaacaattttttcttgtaaatccctgctagtagaagtaatgagatatttctatttgaatttttttctatcagtatcaactattgcattttaaggagctattaaccctataaggtacacctatttgttggttgaattaaagggattgtgcatatagcttttctgataattgaattccaacgcctaaaacatatacgagttcggtaatttgcccttttattgctgacagtgcttttgcaggacaatattcctttttatcaattcctcttttctaaatgctaacccttgtaccagaatccagatgcataggtcaaatttggaaactcttccttgaaacagttttctattttagaagataaaatagttttccaactcataaaattgatatgcttttgacagaaaacaaaattttgaggatttgttttaaaaataggttgtttttttttatgattttaggtgttttgaggtatttttgtggaatgttttgagcaataattgaaaaatatgggaagtactttgaaaatttttgcattgcacttaagtgtataggactttgatagagaataaatcaaaaactatttttcattgttgagtttttaaatagaaatttgttcctgaaaataatttagatttgttttcaagaactgatcttaaaaactattttttcaaaacagtttttgaaaacgctcataaataggcccataatctgtgctatgacatttccaaagaaaagagaaccatagtggtgtcatgcaattacaaattggcaggaagccctctaacttaattttctgccaaatatcattcaagcctgaactcaacgccctaggacttgtgtgtccggcccatcagttgaagtgatatctgattcaaaaagagcatgctttttaaacaaaatggttgtacagtttattttgacgtgcatgatcttacctaataaacgagccttaggcgtatctcaagcggtaaggaatggggtggggacgtgggtgtttacaggttgaagtaccagacagaccccattgctgtgaatgatgaagtgttgtttcgatccttgccagtatattgttgtaactgttgaagcttgattctaaatcatctgttaacatttttcggggatctcatccacattatattacctgggactgttttacatattttgattgcaataattcttctatctcatccactaatgattcttctattatggcagcactacctggtgttcttcaggttgttccaagcagg

SEQ ID NO: 10375 - DNA, 1003 bp, Vitis vinifera
  Intron number 3 from transcript GSVIVT01033297001 (locus G SVIVG01033297001) derived from phytozome v7.0 (chr-ID chr8 ; pos 21728535 to 21729537 reverse strand)
gagatcggaggagtaggggttagtatttcagttgcttcttttctattctaattcattgccgcatttggttctgattttccgttctcgtttaaattttatatttgcattagtagtctttttaaaaaattattattagaatggcacactggtttagcacttactaatttatttttatctgtgagcccgtctctgtcatatgaatcgcacagaaaatctgttccttgtagcttagggtgtatttttggtgataaagtgcatggagggggattgggagcttatcagatccgatttctttgtttgaatgaaaaaatactgatggtggaaatggttttgagaaatcatgggaaaaagcactttgttctctggatttgccagaattcaacatctttgtatgatatgtacaatgtggatctgaatttaggatagctctttagataggtgtttcattccaatctcctcataagggaattcgagggaaggatttttttatttcagatcctaactttaattccctatggggtatgcttttcttaagttctcattgcaccagccgccatgatagtttcactgcagaaactactatattcattctccacctcctaccatcattatcaacatctgcacctctatgaattcaatgaaactctaatattctcaaaattcaaactttaaaattctgttgatttcaaataacatgccttctgatttttgggataactatatgattacaaatcctttatccatacatatcccagcgctattgttcctattctacttttagtgcatattttgcttctttggttatttgcttttcagaacatatttttcattttattttattttagttcaatcttttgttaaattgatatttccctgtcccacccagattacattttaactgcaccaattcattctcttcccttgagtttttttaataaaaaatcaaagttgtgttgtgcattattcagccaaagccttcaaaacacacgggagatcaggtttg

SEQ ID NO: 10376 - DNA, 3890 bp, Vitis vinifera
  Intron number 4 from transcript GSVIVT01003960001 (locus G SVIVG01003960001) derived from phytozome v7.0 (chr-ID chrU n; pos 14065733 to 14069622)
gtaagcgattttgtagaatatctacaaaaacacaggccttgtgtccaaggacgattgatttgaacatgtattttggtttttaagaatgagaaacacctcttccttctcaaatcacaaaaatttcaacaaagccgaagtcttaagttatattcaaaccattatttcacatccagatcgttaaacccgtgtgggatgaaatctataccattaaataggagcccgaacaaatagaatacaccactagatcaggtaggagtccaattaaatatgatattataaaaagataaaaataaatataattacaaacaaataagaccttataatgttacatggcatcatttgattgataatgttcatatgatattgaaaaaggactattcttgatattttaatcaaacccagaattcattgttgtaacatccccactcaccaattattggaagagttcagcctcacttattggcccaactatgcccgtgtcccagcatgcaaatacaaaaactattaatttccatctttaattgcatcatggggctttttccttggccctgatcggtgtccctactcaagcaggatcatctccatagatattgctattatcacgattcactttactttagggccaaagataccttacaaaagtaggtttttccgctccgataggtactactaataggtccctctagattcctcatatttgcagcacaagaagcacccattgccttctgctttatttcacgtgcaactccaaatctctaaactttgttcgacttgatctctagagtttaagttactgttcccatttaaacattgacttattggtttgctacaattgttcggatgctgagaaaataatgagaaaaagaagaaaaaattttgaaccataaatttttctttaaggcttgagaatacagaaaatgcactttacctgcaactcatgatacatgacttaattgatctgactttatttttgtaattttttttttggattttttttcatgcaatttgtatattttaaattcaaaaaaatatttgtgaaaaattgttatgtatacttgaaaataatttataattatttaattagttgctaaaaaactaggacaggaaaaatggaaaacctagaaagaccccctaaatgttcgagaaaccaatttggccaatcaaattccatgattagctattttcaacaaaaaacataaagagccaaagattattcttccttttctttgattttatcataaaccaaacaatagagatttgagccaggattggagaaggaagaaatattaacaacctccactaactttttatggagcatgagttgagtcgttgacatcaacaaagctatgtttgttccaaaaatttgggagaaaatgtgagcagataagaaaagtagaataaaagaaaataaaataaatctaaaattaatagattgtttttatgttctaatttaaatttacttaacttatttaactcttctatataaaaattaaataatttaaaaatagaagtttttcactaattttaattatattcaatttttttcatggatttttcataataaaaccaaatatggaaaaatccatttttcttaatattcttttatttctttaatacttctagaaatcaaacatatcctaaatcttttatcaaattggccttctctctccgatctttgtattaattatattcttattccaaaatcataaatctggtgttgttttgataatagtatgattgcttatttagaatgtcataatttgtcatgtgattgtaatttagtaatataaaaattttagatttctagtctactttctaaactttgttgcctagtttaatcatttcctatcgggttaattttattgagattccctaaggtttggtgtaaatacactcaatcatcattagtttcaaattttgttagttagcaccctaaaaatttatttcatttataaaatttaatttcttaaaggattttaggtaaagatattttagataggagtgtttaaaaattctctaaaaactaaatcttattttctgaagaataaaatttatacacgaaatacatctatatatggtcatactaattaacaaactttaaagacattggtgacttaatgtatttaaattaaactttaatgaaattaacccattttttcctaataatttaagactgttttatatatttaagcaatcacccatatttaacggtgatttaattttttattattagcatcagaatacaagggtgggtgcatgtattgcatattcccatataccaaaagagcaccaaaaaaaatgatgataaaagcgataaatgtattttcattgattatggtgatgtaattaaatgttataaactgtatgattcagaaacaggaaagttgattgtgagtagagatgttcaatttctagagaatgagagttggacatggaccacatagtgaggaaaaaagagttgtccttaaaagaagactttgtggaagacaataagaacagaggaattctacaatagatgtttctacttcaaatacaccttcttctattagaagttttcttatgcaaacaataaaaggataagagtttgaatcacaaggttgcccaaaacattctcatattatgcccacacatctaaaggattacaaagtcatgaaagatattgaaatcactaatgaaggtttagttaacttttgtctatttgcaaattgtgatcctatttcatatgaagaagtagcaagtgataaaaagtggattcaagtaataaatgaagaaattcaatcgatagtaaagaacaatacatgagaggtaactattcttccacttggaaaaaagcctataaacagtaaatgagtttataagacaaaatataaacctaatggtaatgctaattgatttaatgcaagattggttgcaaaaggctacaaacaaaagtcaagtattgattattttaaagtttttgcatcaattgttagatagataccattcgcatgataattgcacttgcaactcaacaaatgtgaaaaatttaccaaatgaatgtgaagtcaacttttctaatggtgtacttgaagaaaaggtttttgttggacaatcaccatggtattttaaggaaaggcaagagaaacaggtctataaactcaataaggtattatatgggttaaagtaggcaccacgtgcttggtacacacaaattgatacctatttatagcgggatggatttcaaaagagtccttttgagcatacactttacatcaagtcaaattctaatggtgatgtaattattgtatatctctatgtggatgatttagtttttaaataaaattatcaacaaaagtttgaagatttcaaagaggcaataaaacaacaatttgagatgacagatttgggattaatattctattttcttgaaattgaagtccaacaaacaaatgattgtttattctacaaaagaaatatattacaggcgttttaaagcaattcaagatgaaatcattataattcgtattcctattgcaaagcaattagagataaaaaaaaaaaaaaaaaaggaagacactgaagaattaaccacatatttcaatggacataagtatttattcttcaaaattccatccatgtgttgtttattacacgttcgaagaaatcaagtcatactcttgtatgatttaaatacttccacacacataaaccaacctctagatcatgtgaacaagtgaatttatttcttattgttgtattgtttggcaacttacacatgcattgtccaaattaaaaattgaaaccaaattcgagggcagggcctttcctttgaaaaaaaaaaaaagacgaaaagtgagctagggttgagatgcaaaggctcacccactgtgaccacgtagtcgtgcatcctt

SEQ ID NO: 10377 - DNA, 18201 bp, Vitis vinifera
  Intron number 10 from transcript GSVIVT01029211001 (locus GSVIVG01029211001) derived from phytozome v7.0 (chr-ID chr 11; pos 18498405 to 18516605)
caggtatgcatcaactattctactgtttttgtttacttgtgctctgagtgcatttttatatgtttagttcttctctgttccacaattgaatattgacatttgatcattgttggtttcataatgcaattgtattgaggaattgaggaaatgagttttttttatgtccaaattgttacacttccattaaatttggtgatatatttattgtctccaatggtccaaatccaacatttggaacttcggatggaaatgcttctaatgatgaatgacataattccactcagagagaataagattaatatgttgagccattacctccaagatatgtgtattaaactagtagttttctaagagagcaatcttcagtgctggaaactatcaagttatgcatatgcagaatgaaagctaaatcatacgattttgtttggttaatttagaacttgatgatgttgttgatcatgtctctgttgtgatacactcatagataattattcttactaagcttgattttgtagttccttaaatgtataagagtcacaatatgatatggaaaaccttactcatacgtcatagtatttgttttatgtttctatgtggaaggtgtctttttggagacattttctttgatttgatattttggtttgttttaattttgagtcatatttttaaaaaattatttttccataagcaaaaaaagaaaaagaaaagaaaagagacgagccaaaaaattgttgatgatggatcagaataagattttggattatctttgttaaatttcaaatattttctatgtttatggtgttgaaggctcatcacatctaatatcatgataaaaactagcacctaaatcatgcttcaaaacagtcaaactggtttctatctctcactcgctcgctcactcacacgtgtgctcatgcacacacacacacacacacacataccaacaaaatttcttggccattttttatacagatctcaaactgtgtaaagtgtcttaaactctctccatttcatcaaagtctcatcttttggtggatagacttcatattggtcttcatgttatgactgtatcatctcacttttatttctgttttcatgctcttttgatggtggaaaattgctggaaacatcctttaaaaacttaagcaagaatgggaaagactagtctcaatgtccaagccataatttaggacgtgaatgatgattaatccctgttggaacttactacatttagctttggttaagtcaagtcttgtgttaggtttctattttggttagtgtttactctttgtcaagtttctatttctttttgttgcctagttttccttgcatattaggaaagtttatatttcattgagtctttaaataacattcctttcctatatctattcttttttttattaggaaagataagaaattaagaaaattgttcctaatattctttcatagaggagaatacgaatcttaataaaagttttcagtatctattatgtttcctttgagggtgttattggcttctccataagtgtgattgcttagaaaactcttggtgtgaatacctaggaaccttgatgtgatgctaatgatttcttttctttattttcttctgtgttcttttgtctttgatattattctataacttatgaaacttctatatttctagaaatctaaagatcctgcaacatcctttctagcagcacctgtcattttttttttcatttacactcctatgagtaagggttccttcaaacgaacaatatgtacttagcaaatagctataacatagattatgattcatgctgtctaacttagtgcagttatgagaatcaatataatatttttttttatggtggtgctgtaaggataaacatatgattaatgagaatgctaatgataaaggatgcctggtttaggttttggttagacctgaaaccaaggtgtaggaatctccaaggtgttggttggctcttctgctttggaaccatgatagggatgctggcattcatagctgccaatcacctgctctgcacgctgtgatgtgcataacaaatatgcattgcatcttgactgtaactaacagtatgcaacatgagcatgtgaaatgatctgtgctttatggtttatttatttttttagttttcagaaaaaagagctttactttatttttttcattattgcgttattgtttcaaagacaccttgtggttaaaagaagcatttaaaaactatcttctcttgccttctctaaaaataattgtcctttttgtactaagaatctaatgccatttatttatgtgaacttcaataaatgaaacttaattattgtacttgtactgttgatataattaaaggcatgatgaaatttctggtcagaggtgaaagattggaatttttatgtgaaaaatatgaaacctaaactaatgcttcaacacatcacactgacacaacctatagctgcaattggcatatttgattctgtaaatcttttttgggtggtgactcacatctttatatgctattgttaatacaaaccttaccgagatattgcaggtgaagtttgaaattggattgcacatttttgtttacaaatgtacatgctctaactatggtatgagttagagcatgagtttgaacacttttggattatgcaaccatctacatggttggctattccaatttccatatctaccagtaataaaaatttaaccttgttttgatgtctgatgctgtctctgctgtaggcagcactgcaacgtaagcagtgaaatatccagcaataatcagaaatacaacacattttttatctctaattttttttggtttgttgtctagccatgcttgtcagttatgtagcagcatttactcaaaatttgttttcctctttgatatgaaaacttagtatatggttcaaagtcacaatatcgattagatttagcaggtcccgaggcacaatagtctcagtatcttaaattggtatcgggtgacacacatgtacaaagatatatggatatatagtttttatgactgggaaaccccaccatagtagggcctttcagacccacccatggtttccaaaccctggggagcctgattgcatctgccacaaccagttcttggtaatctagggattcccaatggtaggaatcgaacccgagatcatgtgtttcaaccacacaacttgacactccccattacctctgggccatgccctgatgggtattggttagtacacatatgtgcgagttaaagcgctctaaaaaatctaaaatactaatgaaaattttagaaaaataattatgattcgatagtctgaacaaattaataagtaaacatctatcacatttaacattatctaaatagttataaatacatccattcaaattgttttatgatagtgctaagaatttaaaaattttaaagctctatcatactcagttttacatccaataccaaattttgataatttgtatgtcttgaaaataaaaaatgaaatgataaaaaggtgatcagtaaaattaattattttgaaaataaatcagcttgaatttcttgttcctacttgtgtattgaggtatcttttcttggttgatgagaggaatcttcgagttagacattactgatttggtttttttgtttttgtttttttttttccatttttattagatttgagttgtggtggtgtgatttcgaattgtcctatgggttggctgaaccaagtgattcatatttgagttgaaactaagttattgttgaaccttatgatattgacttgcatatcagactcatcacagccatggctgaaatggatacagcttggccaatactgacctatatcaactgacattttgacccatgattctgaccatagttttaaaaggctcaaggtgtaccaaggcgcacctaaggcgcaggctttagtgaagtgaggcgcaccataatttacatatatttttcctctatttttctcctattttccctctatttttcctcatcttcttcgttttcttcacttctccactatacggttgaggctagggcaaaatttgggagagttgtttggttgaaaacaaccagaaaagggggttggaagggaagacagggctaaaacgacgtcgttttgacctgttttttattttaaaggaacaagctccaaaacaacgtcgttttggtcccaaaaaatcaaaaaagaaattagggcttctctctaccctctgcaacccgatgtcgaagaagaagagaagaagaagaagaagaagaagaaaaagaagaaggaggaggagaaggaggtaggggatcgaggcgcacttgtgaactacatcgtgccttgccggaggcgagtgcctttgtgaaggggcgttgtctgccttcaggcgaggcgtcgaagggtggcatcgtgccgcccggagcctaggtgcacctttcacaactatgattctgactaggattagtttgcaaagcactatcaagctattaacatttaagttgaaataacttgttgaagtcatcactgaatatgcttacacaactttaggtttgtttattttcgatttagttttagaacaaagaatgtttattgtggcatttggggctccaactctcatgttgtgttcaatgcatcaattatcattacttaaatttccaatttttataaattttcagaaatttgatttttttttttctattattgaaactagatatggaatagacattccccaattatagaaatttccataagttttgtcataagcatttaattaacttatcggttagatttttaaatgcacaagacagagaaaagggaaattatcaaaacaatcatcaagtaaaaaagtagagaataattatatttaggtaaaaaaaggaaatttaatactattaataacgatattgatggtaggcaaaaattgcattcctccatgaaatgttgcgtggaccttgacattggcattttaataactggttgagtgtttgaagcaacacatgatatatggcatattgcataatcaactaaatagaaaaaattgtatgtttatttatagctgtatattaatatcaatatcaaattatgtagaatttcttattcttgcactcttcagtacctctttttgattaatctacttggaagcttggtgttggataagatgtctcctaatgctcatcttgcttgttgaatgtcaagttgattggttgttaagagctatctctttcatattatgctttaaattggagttttattttgttttattttttaaattatttaggagaaatatgagttaaatgggctatatacagactacacttgggtcctaaatgcctttgattgttaagcaagtaaaaaaaaaagttaaatgggttaaggactccaacccaaataagtcacattcaatgaaaaagtttatgtgggttgacattttttttttttgataggaaacaacaaagaaatatattgatagaattaagaagtacaaaagaaggatggggaatcctcccacaaaagaaaactaaacaataagaatacaaaaacagctaaatagtaataacaaaaaacaaactctctttgctagaccatcccattggagctacgcattgctagccaatctagttgcaacacattaaggggaatgccctcaaaaaccatggagcaaaaagcccaaaaagaagctaggaagtgaatggtattccatagattctctaaattcctagctttatccttaaatatcctagcatttctttctcgccacacaacccaaattaaagcaatacatgtagtttgccacaaaactatgcttctcttggattttccaaaacccttataattgatggttatcaagtcagaaatgctccttggggggacccaatccatcttagctatctgaaataatctgtgccacaatcccatcgtcaaataacaacgtaagaaaagatgatctgctgattctccgtgcttcatacacaacttacagatgttaggactaagagttttgtagggttttctcaattgtagcaagtcattagtatttacctttttgtgtgccactaaccagataaatgacttgaccttaaaagagacttgaaaattccaaacaaaattagtagggaaaattggagataaatcagaagggtgagataaggctagaaaaaaagacttgactgtaaataaccctgaagaagataaagaccaggatgtctcatctaaaaccgatggggataagtgcaaacaatcaaatgaacgcatgaggctttttaattcttctatctcagaatcggaaaggttacgacggaaattaaagttccaagataagggacgagcagaaccgagaattgaaggtatgagaatatttttatctgtgactactctaaatagtcttggatattgggatcccaaaggttgctccccccaccacaaatcttcccaaaagtgaattctttccccatctcctaccacaaaccgagcatacttggaaaaatcctgaaagacttgtgcgatagccttccaagggcaaggatgtgaccatctaactatagtgttggcatcctaaccattagaatatgtcccataaatgcttagaatgacctgatgccacagagttgaactctccctaagatatctccacaaccatttccctaaaagagcgagattccttagagaaatcttcccaaactccaatcccccttttgccttcgatttacacactacatcccaactaataagatgatcttttttacattccccaacccctgaccaaaggaaatccctttgcaatctcttaatttttgcagccattaaagcgggaatcttaaacaaggatagaaagtagctaggaatgtgggataggcatgagtggataagagttatcctacctctaaaagataaataagcttttttccacccatctaatctccgcgagattctctcaatcactggatcccaaaagccacaagcctttggattccctcccaaaggaagacccaagtagagtataggccaatcagaaaccttgcaatcaagcatcaaagccaacctagagagatgatcctgatcaaatcaaggttgatgccaaaaaggttactcttgtcaagattgaccttaagcttagaaatttgcccaaacactaacaaaataaacttaagagtttgtagttcttccacacatgtgctagaaaagaagatggtgtcatctgcgaattgcaaatgggacacccttgttctattcctacctacattgaagccctccaacatacttctctccactgctctcaacaacatcctactcaacacattagcgacgatagtaaacagaaaaggagatagaggatcaccttgtcttaatcctttagttgccttgacccaccctttaacatttccattcactaaaattgcatgagagactgatgacaaacaacctctcattcatgtccttcatctaggactaaaccctttcctatccaacacatgatccaaaaaatcccaatccacatggtcataatccttttcaaagtcaattttgaagcatagttgtgaaaggcacgcctaggctcggggtgcgacgccaccctccggtgccttacctgaaggcagacgacgcctcttcacgaaggcgcccgcctccggtaaggcgcgacgcggtcacctgactcgcctccggccaggtacaccttctttcttcttcttctcttcttcagttgccgttaggttgcagagggccctttttatttttatgtttttttttttttttttttttttttcctgtttggtgttgattctcggttttcaagcccaattgatgttggagacttgtagaaaatattgtttggagcaaaaccctttttttttttatggtttttggagctcatttgatgggatttcgaaaattagggcttattttagttcttccttttatgcatttttttgtgtaatttttgggtttagtttgaaggattgatgtttgaggatggaaacctaagtgttttcgtcggaaaatgcacaaaattttggccgggaaaaaaaaaaaaaaaaaaaatctctaaaagaaccaggtcatgtttagcccggtggaaaagatgaacggtgcatgatgacgtcatgagcaattcaaagttttttcacaaaatggctaatggcagacgaaataggaaattcatcaagtttttggagaatgaaagaggtttagtgttaaataatattgatagcatcacagaggagatcttacttttttatgaaaagctctactcaagtcctcttggagagtcttggagagtagaaggcttaaattggtcctctatctcagcagagaacacttctaaattggattcccccttttttgaagaagagatttctaaagccattttcagttacatagggataaggcgtcggggcctgatggatttactattgcagtgtttcaagattgttgagatgtgatcaaggaggactttgtgagggtgttcatagagtttcacagaaacaggattattaatcaaagcaccaatgccaccttcataattcttgtgcccaaaaaaagccagacaaaaaaaaattcagactttagacctattagtttgatcacttgtctctacaagataatagtcgaagtcttattagggcgattaagaggtgtactacatgaaactatccattctactcaaggtgcttttgttcaagggagacaaattttggatgcagttcttataaccaatgagatagtggatgagaaaagacaattaggggaggaaggagtggtccgatgccgttcaggtttgagaatatgtggttgaaggaagaggggttcaaagaaaaaatgcaggggtggtgggtggggctcaattttagtgggtctgcgagctatgtgttggtttctaaattgaaagctttgaagtctctgttgagggattggaataagttggagtttgggaaagtggaggtcaataaggctttggctttgagtcaggtggatttttgggacaaaatggagttatctcggactctttctgttcaggaggtggatgcaaggagaggagctaaagaggattttaagaagtgggctttgatggaagagatatcttggagacaaaaatcaagggaaatctggttgagagagggggacaggaatactaagttcttccacaagatggctaacgctcacaggagggggaacatgttagcccgggtcaaaataaatggtgtttggttaacaaaggagaatgaggttaaagagggggtggtgaatgagtttaaagctatgctgtcttctgctggaggttggagacccagcgtaaggggattgtcttttgagagattggaggcggtggatgcagccagtttggaggagccgttttcggagcaagaggtgatggaggcgcttaaaggtttttgtggggataaagctcccgggcctgatggtttttctatggccttttggcaatcttcttgggagtttgtgaaagaggaggtcttggggttttttagggagttccataaccatggcaggtttgttaaaagtcttaatgccacctttattgttttgattccaaagaaaggaggggcagaagagttaagggatttcaggcctatcagcttggtgggaggtctatataagtggttggctaaagttttagctaatagattaaagagggtggtggggaaggtggtttccaaggctcaaaatgccttcgtgcaaggaaggcaaattctagatgctgttctggtggctaatgaggttttagactcggttttaaaaaacaagaaagaggctgtgatgtgtaagctggacattgagaaagcgtatgaccatgtggaatggtcctttttgttttcagtcatgaggaagatggggtttggggaaaaatggattagatggatgaagtggtgtatctccactgttagcttctccgttttggtgaatgggtcttcctcaggtttttttcaaagctctagaggtttaaggcaaggggatcctctctctccgtatctttttgtgttggtgatggaagcttttagtagtctcctaaggaaggcagtagctgggggctttgtgtctgcttgtaaggcaagaagtaggggtggtgagggagttaatgtgtcacaccttttgtttgctgatgacactttggttttctgtgatgcttccaaggtgcaattgctgcatttaaattggattttaatgtggtttgaagccatgtcgggcttgagaattaatcttgacaaaagtgagcttattccggtgggttgtgtgaataatgtggaggagttggctgcagctattgggtgtaaggttggaagtctcccaacctcttatctgggcttgcctttaggtgcacagtataggtcgcaggctgtttgggacggtgtggaggagagaatgaggaaaaaattggctagatggaagagccaatacatatccaaaggaggtaggattactttgatccggagtactctagctaatatgcccatttactttatgtccatgctctctatgcctagaaaagtcagactgaggttagagcggattcagagggagttcttatggggaggtggggcctttgagaggaagatccatcttgttaagtgggagctggtttgtcttgagaaggataaaagggggttgggggtcaagagtatttctatcctcaataaggctcttttatgtaaatggagttggagatttgctatggaaagagaggctttttggaacaaagtgattaggggaaaatatggggaggagcaagggggttggagttcaaaggaagcaaggggggagacgcatggtgtgggattgtggaaaactcttaggaaagaatgggaagtcgtgaaaagtaggcttgttttcgttgtggggaatgggaaaaggataaaattttaaaaagacatttggtgcggggatgaacccctttgtgtttcttttccttctctatttgcattggctgtttccaaggatgcgtgggttaaggatgtgtggaggtgcaatgagggtgggggaagttggagcccgttgttttctagaccatttaatgattgggagttggaagaggtgtgcagtttttttgtggcgttaaataggaagcagattcagcaaggggtggatgatagggtgatttggagagagactaattgtgggaagttttcggttaagtctctctacaaatcattagtatcaggccatccaatctctttcccatcgtcggctatttggaaagttacggtgcagcctagagtgagtttttttgggtgggaagcaacgtggggaaaggctctcaccttggatcagcttcaaaggagaggttgggctctagcgaacagatgttacctttgtcaaagacatgaagaatcaattgatcacgttcttcttcattgtgaaaaggttagaactctttgggtgctgctctactcaatgttcggggtgcagtgggtgctgcctgccacggttaaggagacgcttttggggtggaatgggtcttttgtggggaagaagaggaagggtgtttggaaagcaagtcctttgtgccttttttggacggtttggaagacaaggaacaaagttgcttttgaggaagaggagttgtcaatccaaagactcaaggcttcttttgtttattttctttggtcggagacgaagaggtctataaaagatggtccctcgaccttagttgattttgtcgggtgggtggcttcccgttaagggtgtggatagggtggctcttcgttccttggcaggctgctagggagcgtggggtgtttttctttctttttcttttctccttcttgttcttttagccactgcttcggtggtttttaatacaatctctttatttatctaaaaaaaattaggggaggaaggagttgtcttcaaaacatagttttaaaaggcttaaggcgcacccatgagcaaagtagtcttggagcctgaggcgcaaggtgcacctaaggcgcagactttagtgaagtaaggagcaccctaatttacatatatatttttatatcatataattaaatttaacaatcatttatttgtcctaaacacataaatcatcaaatatcatccaaaacttcaatttaatcaacaaaaaacataaaaataaagaactccaagcataaaaacaaatccaattccactgcacggttgtttttctcctatttttccttctcctcttcttcttcttcacttctccactgcacgactaaggctagggcacgattgggagtggtgttgggttcaaaaagaccagaaaagagggttggaaaggaaaatagggtcaaaacggcgtcgttttggcttgtattttttttcaaaggaacaggcttcaaaacgacgtcgtttttaaacttgaagcaatcagcctgcttgtggccaatctcgtggcaaaagttgcactcccccttgaatctctcattctttgtagcattagaagaagcagatgcattagaggttccttgattcgaattccctttcctcttgaattgcttagagcctccaaaattcttgtgtgaaggtgttttcttcatattgctcacttggtcagtaacaagagcaagggagtgagtctcatttttctttagtgagacttcatgttgcaccacaatggacatcaacttctccaaagtccattattccttcaaggcattataagtcaacttcaccgcatcaaaggaagtaggaagagactcgagtatcaaccatttcaagaatttctcactcaactccactttcatctcatttgccttgttgaagtagtgctttagcttgatgatgtgatctctaaccctacttactccatcatacatagtggttgtgagaagcttcaaataagttgtcatttctgccttatcaatcttggtatatttggcctttacatattctaaaaagtctttggccctttccgtctttgacacacattctttaatagatttatccatagtatacttcatcaccatcaaacaactcctattggagtgctcctatctctcataaaatgatctttcatcagcagagctcacatcagtgggcttacttggctcatcaactctcaaagccaagtccaaattgtgcagtcatatgcacattgaaagactcataccattcctcaaagttatttccaataagagacttgatgacagataattgcagagtaattccaggattgctagtagctggaaaatagcaaaattaaataatatgcatgttactacaatatcatgctatttgctagtttccagaatttctcaatttagcaataacttagaatcttgaaattccacagcggtaaggacaactaattaaatattacaaccaagatgcactaattttattatcgaaagggcaaaataaaattagtacggttcataatatataattaatttccttcaccaattcaagcatcctaccaagtattataatcatcgataggacaattacaatacccgtatggaccttagtaatcataataataaagcaaccaaaagtgggagataaaatatctcaacaaagacaatttgacacatataggatcacgataggcaaccacatataagttcactattgtcatgataaactcaagtatttaatttgcacaacttaacacacttggaattgcaataggtaatcaaacaagtgttctttattgccataataaatttaaatatttaaaaaaagggcctaggacaacattattgatataagataaaaaattataccataaagaacaataataattgtcccaataaaaccaaatttgacaaatgcataataattccaagaataccaagacaaccaaccaaaaaaaagtttttttttttttttttttgtttagctttttgtctccaatgaacctcttccctcaatactaattcctccaactccccttttctcaaagctctttgtgttgaaagttctgaagaaagaaccccttcttgctcaacatcaatgttagcaatatcactaaggatgctttttttcctttcctttagcactccaaaaaattccttattccactcttttaatttgaccttaacaaattgtaacttcctcataaacttatgaccttcccaaccaactccctgaaaacctctcctccaacttctaaagcaatctttgaagctaggatgttgcaaccacatattttcaaacctaaaaggagttggtccccacttgaatggattggtgtccaaaacaatcggccaatgatccgacgtccatctagggagaacttcttggaggctttgagaaaagaattgctcccactcgtttgtgtaaagaaaccggtccaatctcttacacacaggtgaatcttgcatgtttgatcaagtgaatggggcgtttggtaaaggggggtcaattaattcacaatctcttataaatccgtcaaagtcccttatgctagaagttaaactaaagcctcccaatttttttgaaattctccttataacattaaaatcaccgcccacacaccagaaaggaaaggaaaggccataaaggtctaagagctccacccaaaaatccttcctaagtaaggaattgtttgggccataaactgaggacagccacaggggtccacatccatccaacaaaaacttgattgagatagaaaaggagcctattaccacctcctcattgcatagtttttttgagtcacaaataatcgaaatccctcctgaagccccacatgctggaagagaagcccactccctattcctaactgacaagacactaccaacaaaccttctgtcacacacttccctttttgtttcctgaaacattacaacatccggattctcaagacgcaaaaaatatttaaccaccctttgttttttcctagatcccaaacccctagtattccaatcgatgatcttcataataaaaacctctctaaccctaaacctccaaaccaattcctacaggtcttaaatacctgtggagaatttgttcttctgcctagaatacaccttaatatccaaagaacttaagacctcacgaactctagccattttgctaggagaaagacctatttggagtccaccgaaagaggaaaactcaacttcaatcgggcaatctgtaacaaggttaggggcctcaataggcatgttgggtagggtcttaagggagttaataccctcagacatttggttcagacaagctaactgggactcctcaacatctaggttaggattgccaactaaatcttgacataaagcaccattgtcatttgtttttgaaaacatttcagaaactactcgagatttcgtaggagaccgagacagaattactgaactgggaagagcgggattagaagaaatcagaggtggatgtgccaagccataggaggggggaaaattgacaaaggtgattaagaaagtggagaagaagatacctcattgttttccactaccatcaatccactagtccccacagaggttaaccctttttctctagttattagactagaaggataaaccaagattgaatagccacgatgagcagaaccctcaaaaccctcagagtttgctctgtctacaacgttagaaaatttgcacagtttcgccttcctctttgaatgaatagaagccttaagagaaaacctttgttgattatccgcatcacctcttgtcgacaaagccctttccccagaccaacttcttcggaaccctaacggacgactaaaagtgagaggactcgagctgaaccttcgcaccatctgtgttcccacttcgaaagcaatgtcctttggaggagcaacaaaatctgaagatggaatctcttgcgttagagactcgcttcgtcttcgaaccccttgtcagcatccagaagttggaggattaagactagtccacaacttctttgaaccaaaattagttgtggaaccccctaactgagaaaaagagtcctcggagactgaattcccctttccctttgcagaggagtcttctctgcgtaaagagcccttcccagaattaggctgatttccaccccgttcttggtccaaagtcatcacctggccttttaatttaaaacccctctcctagcccaaatttgcttccaccagtggcctaggtttttgaggagaatgggcccttccctcttgcattgcattagaggcttggtgccagtcctcaacacttgagtgggccttaacccttccggcccaaaggaccctattctctctttatttgaattcaaattaaacggagaggaaggttgggaacaactgttccccacatctgcacttctcttgccatgtgtcccctcagaggcatcctcagccttttgactttctactccatctttcaatctgtcagctaccacattagaagaccaacctttactcgttgatttagccttctcaaccagccttctgccacctgtccacgagtgagactcataatccccccgagttgactcacccatttctctaccccgcctttcgtcttcaacttcaaccactgcaactgatattgtaaaaaaccatcccccatctaacaccttaatcaatgcaagaagaattgaatattccttcattaaaattctcactcttgccttacaaagatcatacaatttcaccgttcgccaatcgatctttgtcactatcccccactgctccacaattttcttcagatgttccttagaccataaatgaaagggcaaaccctgtaattcaattcatcctcctttgaacttccccacgacttctgagttttcccttggcatccaccttctcaaatgggttgtataccctcccttaatcttgagaaacctgaactcctgaagagagaaagcttcctcaagagtttctacaaaaaataaaccttgttcgatagagaaagggacgatagtcaccacgcctttttgccttaagaatttcgccagagcacgaccaaccttagcccagttaacaaaagaagcaggacattcacaaaccacaactctcgcccatctcccaattggagcaaggcctcctttcctcggtccttccttttttactacattcacaaaagactggtacaaaggatccgcatgtttgtgttaagagatttacacagttatgctcaagccaaacccattaatatcttgtcctgttcaagttgtgtttagagattttaactcactgatatttgatcaacttgacatttatacaatgatgaaaagttgaaggacaccaaatggaactgtaggctttgtgaaatatgtatctcatgaagacttatcaagggatatataagcacattggtcaagacattcgattctcacatctgttgataccttcttgtgcaatccacatctcctcaactaaccaatcatgttggcttttgattggagatgtgtgatcatctgattcttcctcatgcttcttcaactcatgcttcttcatataaacaagaaatagatatgagctttatattggtggattaatttctagtttttgttcacttgatatttggtgagcataatgggtatggatgagaaacgtaatctaatagtgggctcagcaaaatatgggtcccataacactgttatttaggggtgtatatggacaagttttaaacctagtatcatttgatatgaattcgatacatgtacacttgtatgcctaatattagtggcattgatgatatatttacccctaccatgatttgatggaagagagttgatgttgtcaaatattggttggaacgtcaatccatcctgctatggatatatcagtggctatttagtcaattgtcatatccatagatacctaaacaattgttgtatgccttgttatttgagctacatatatcctctgagaattgtggagagtgtaatgtttgtgtggggttgtttaattaccaatgctctaagcattggctaatacacaaattattccaaaggtggtgtgatcttgcacatgtactagtctaacctacttaattggaagtgtattcatataaccttatttcccacacacgaaagtatgaaggtgaaggtggaatcatggagtgttatgtacttttcttgtgtggaacataagactttccaagcaagagagtcatgacaatgataaataatgagcgcctaataatttattttcttctcatgatttatcattttctgcacctttcttaagttccatctatttttcttatcattagtaatggaaattgttctaaggagctgtcatctttgtttatgtggtaacaggttctaacttctacaggtatgattgacttgcaggtagat

SEQ ID NO: 10378 - DNA, 4086 bp, Vitis vinifera
  Intron number 4 from transcript GSVIVT01000791001 (locus G SVIVG01000791001) derived from phytozome v7.0 (chr-ID chr1 2; pos 186113 to 190198)
tgagtcttgcggaggagccttttcttgttaagcaggttggtctttccttactttcatttttttagttacctgttgccgcaaagcatccatattcttgaaaagagaacttgctgtgcatttatcagaaacactaaaatccccatcccattttaaccctttcataagattccttgaatcattctgaaatctagtatttcttgtttcttgggcattttaaaactactaattacaaccaattccatatcacatcagtttatcacataagattttgaggatttctaaaaactttctctttggtttgctgattcatttaatattaaaatttattataaactttgataaagtaactttaccggactaacagcaatatgtaagctgcttgtccaaatttatgatgtggatagctagtcatttgttttgaaaagtttgttaggtaagcaatatttttctcttctcaactgaatctttcaaatctcaagtattagatactgcatcgatccattctggttacagtagatcatgttctcatgtttttgtgctaataaaaaaatttgagtcaaccacttatatttatttatgtctcttgaatttacaccatttagaaatgcacatattctttatttgggatattatttgttcttcacaattttatttttcttatgaagtttctattttttttgcttatccatgttgtgaggcatgatttggtcacacctcaatgtgtattccttccatttatacttggttttgtttcaacattttcacataatggtagatgtttcctagctctcctcatagcatctatatcaactaccatgcttgattcaagaaacatatgaaatccttctgatggaaaagcgttatatttaccatggtagtccttctgaatggaaaaaattttctgcccattttgggtgttatcttcactttacataatggccataaaataaagtttgcattgatattgaactttaagatgcataagttcttggaaatgaaacatccctttgatgaatgacaatgttgctatcacttttttcaaaggcgttctttaggtgtgttatggggcaaagtggttcaaaacatgatgaagcagaggacaaaaaaagggaagccaaaggtacatgccttaggggttgagggttagttgagaagcatctcaggtgagcttttcacaccttgtggtgtgagacagaggccttgatggagtttttgatgtgacccaaatatatatatatatatatattgaggcttagttgagaagcatctcagatgtgcttttcacaccttgaggtgtgagacagaggccttggagtttttgatatgacccaaatttacacacacacacaaatcaaatgagagaaaaccctatcctttccagtgctctcattgatgttaccatcccaactctctctcattggcatttccatcatagctctctctcgtctgcattgttgacatcctctttgatctctctcattagtattttgtgctattaggtgtttcgcttcctttgtttcattcttttgtttcttccctgtttctttctcttgtttctttattctctttccatttatgtgggactttctctctctttcaatgtgctctgcttctctctctctcagtgtcttttatttccttttcataaatggcaaaattgccaaaatagatgtcttttattttatttaatttatttttttatagatttttttttacagaatggatgtcacttgtattttagtgaagataacaacattgtagaggacttaagttgatagggtttcctatatgtgtttgaattatgtttcttattttaagacttaagcaaaaatatggaattattagtatggttctttgacttaaattgacttattatgtggtttctcatttattttattttattttccatatattttaaattatattaaatatttattaattatgaaaattagagttccaaaaggcttacacctcaacactttgcggcttactcctcacctaacgctttgacctttaaaagctttagtcgtagtttacatgtgtctctttaggaaataggacatggtaacaatggacttcctccttgtggaggggtattatactagcaaagcagttagtatagaacgaatactttcttgcagccttactccttggaagggctctttcgtgaaaatttcaagaaacttaccatgtttgggcttgttgtggagaaaacattgctttagggctcattggaggtgtggaaaatgttctttgaaggatgcctttcccattttggttgctatttgtgaagtggatgagactttaattttgcaccaaggattgtttgtgggattcaggccttctatatgaagcacaacttagatggttgggagatcatggatgttctttttgttttttgatagataacaagagcatgtattaaaaagtgccaaaaaagagggggtgcaccctatgtatacaggctgtatacacaaaacaccacaatactagcaccaacatgtacaaggtttgcctgcaacaagccaagctatccccatggatgtttggttttgttgaagtttctttcctccatgtttctgaggatggggttagaggtgcttattgttggtttctggatttgaggaaattccttcagatcttttttcaacctcattaattgcctgttttacggctctttcctggttaagaaacagtgttctgcttatgtcatctaagacaactttcttaatttggtctactattttatatggttccttaccattgatcagttgaacataagtgtttccactccctaattggtgtctgatttgtttgtgttctgaatattcacccagcctcttgtttactctctgtcagtttgtggctgttatatggtatagtttgcttttggctcaggatttctcatttcttgggttttcctggcctcaaaggatgccttccgtggctagtgcccaagaggttagatgttttggaaattcaccatgaacattctttcagtcataattagagcaagaatttgtactagaaatttgagtgtcaaattgtgttaccaaattccataccaaaactctgtacctaagttgaatcccatccaatgcaatcctctaaaggcttagataacttggttgcctttcccttacacattgaagattccgcaaccgccagtccgagtaactttaggataagtgacttggaaaccttagtgttgtttttggaacaataaaaatatgttcctaaaaggttttaaaatgatatttggatctaaatccttggtgcttgtaattaataagtgacggatatttggaatggttgcttgaaattgaagttatttgccataaaaaggtgagaaagtaaccaatcagggatatttgaatgacacttggtctaaaatgttagatgaggatataagatttttagataaacttcccccaataaatgttatgcattccatgtttatattaaccaataagagatacatttattttttattttttaataaccgaggaaccttctatgaccaagcccataagtcctccgtggggacccaaaccttagggtgttgaccgccccataacaaccagcactggttaaattcagggtaggaccactaggatgttgagaactggattgttttctttaattatgagtgatcgagtcaaatttcctgtgatgttccatttatattttgtaaattgcaatgactattttggtggatggtatttgccttaaaaatccatggaaaaaaaaaaatggagagattgcatttccttaggactccaaaacatatcatgtactagtatctgagtaatttatttatctggtatatcatgcagaatacatatattcacatcatgtcgatcgatactcgagaaactcataaatggtgcataaaactgtttgtaaaagcaagacttatggtttttatgttgcctaagagttgtttccctccttcctaaattatttgcttctacttttttggcattagaagtgtaggtttctgtttcttctttctctcttgatttattgcaatggaataaaacatttacaggtaaggaaactggaagcttttgttgtgaaccggtg

SEQ ID NO: 10379 - DNA, 7403 bp, Vitis vinifera
  Intron number 3 from transcript GSVIVT01032066001 (locus G SVIVG01032066001) derived from phytozome v7.0 (chr-ID chr1 3; pos 23078427 to 23085829 reverse strand)
atctgaaacaagcaaaggtttgtgtttctgatttttcttttgctaactcaactgaggaattgggtatatccaagaaactatggatttgaatccggtgataggaattccttctaaactagtgccaaagaagctgatgaatatgcttatgtatctcaaaagcaaagtcgtttttcttgcttttgttttttgatagacaaacaatgagtacatcagacaagtgtcaatcaaaagggggggcactgctctagtacattgtgattatataaccaatgaagtaaaagaaagaggaacaatccactcccaagcaatctcttgaccacataaaacaaggaatggataaaaacaacttttaaaacttgcactgaatgcaattttgcttttgtcaaatagttcaaaacaaacaaagaggcatcattctcaaaagtcctacagttgcatgttaggtgttcagggtggtggctggcaccgttagtgggccctgagagtctgatagtaaaattcagttaagatcaagttggaaggtataccatctgctcaagccttcaaggtacataaagcaggtgcccctttttgcccctctaaagctctttttctaataacaaggaattataggctcataaacattatgaaattgtgaatgtttatgagtgtcaagatctaccactagatatcccttccaattgcatattaatgctagtggatagattttttgggccttctgagtttgaaactgtcccttctgtccatttttatcacaattctcacatttgttctaaatttctgttgaagcattctttgtaccttttgtgagtttttgagtgccctacatgagtgggtttggcctaacccaacctaaacccagtttgaaaaatcccaagtttgtattaagaaatctcaacccaacctaaggcttggttgtgcttgtgttgaagcttccccaactcgatctcaacccgaaaccctgccttgcatatgcatattttattactttatatgtacttttgttaatataatcgtattttgaaatgtgaaatggcaatgtttttgttgaatataataaattttttgaaattgtgttaaattacttgtaatatttgattttttttacttataatcggtctatgttataattactttgccaaagaatccataaaccatatccttgttcgctgtgtaaaaacaaaggttttatgacagttgctttctgccctttttggggtgtctggggtgctctcctctttggttagaaagacctttctaggctgacatggttctttcatgggaaaaaagtgtaagaaggcttggagggtagtctccttatgcatcttttggatagtttggaaagaaaggaacaaaatcacttttgaaaatgggagcttttgatccaaaggctaaatcttttgtttgtattttgtagtcgtggactaagatgtttatagaagatgatcctttgtctctacttagcgtctttgattggttgggttctcgttgagggtgggtggtttttttatagcctctcttgctttttgtagccattcctttttttggttgtgccttttggcagttggtgtatacttcctgtatgatttgaatcactcttttggcacctccttttaatatatatgtctacacacacacacacacacacacacacacacacacacacacacttttttagctataaaaaatgttatcattacttttatcacattacatgcaatgcatggaataaaaaataaataaattagacaaggtcaaatatgaaacaaaatcaaccctttgtagtaaatataaacatgacaggaaaccttaattcctactgaggtagtggttcaggaagtggcaagggagagtatatttggaagcagtgggtagttgatgtttgaatttatccaaggttttgataagattgcagagatcagatttggtttgcaagcatgaaaggctggcctttagggtgatgttttttgtatggggttgtggtttgctgtttctcttttccttttgcttgctttctggcgccatttgcataatcccttgtgtactttgtgctcctttttcaagaacttttaatatatatgcttagtttacctatcccagaaaaaaaaaaaattgatactaatttttgtatatatattttttttttgatagataaacaacatatattagaaaaggctaaaaagccgcatgtatacagggggtatacacaaaagcccaaaacaaagagttgaaaaaaagaggggaaaaacctcgcccaccctcaagtggccgcaagccactccaaaaagcctaagagagaataggttttctcaccaatgtacaccctagcccaactccacaagttacatacaaatttttttttgaatttctgaatgtctaacgacctccccctgaaagctaacctattcctttccttccaaaccgtccaaaatatgcacaacgggatagaattccaggttttttttcttttttttcccacaaaagaacccctccaactaagtaacacctctttaactgactctgggaacacccactgaactccaaaaacggcgagggcaatctcccaaagagtcttaaccactgtacaatgtaaaagaatgtgattcgcattttcctcttcacagccacacaaaaaacaccggttagggagctgccacccccttctttgaagcttatccaaggtgaggatcttcccccacgaagcttaccaagcaaaaaaagacacttttgttggaaccttatccatccaaatgcgtctgttcgggaagtcacaggctgaggagccaatcagcattttgtaagcacccttagccccaaaaacaccattgccttcccttttccatctcacagaatcctcctcaggagaagtcctgaagtcccttagcagattcagcatatctcctatttggtccagctcccaatcattgaaatctctagccaagctgagattccaacctccttgaccccggctagagtcccacacttcacttactttggcattcctatgacccgccaaggtaaacagctgtggaaaagtttgagaaagcgcctcattgccacaccacttattcgtccagaacaaaactctagtccccttccctaccttaaaatcaatgctctcccaacaccaatcagcctccttcatgatttccttccacaatcccactccgtaagacccacaaacttccttagtcctccacccacacccctcttgaccatatttcacccctatcaccgttttccaaagattatccttctcatagacatatctccaaacccatttgcctagcaaggctttgttcaacaagtttatctttcggatgcctaatccaccctcttccttagggctgcagaccaccttccagttaattaagtgggctttcctctccaagattcccccccaaaggaaatctctttggattttttcaatccttttagcaacagacttaggaatgtggataagggatagaaggtagatgggtatgctggccaaagtactcttgataagagtaattcttccccccttcgagatgtattgtcttttccactgggctagtcttcttctcattctctcttccaccccatcccaggaagaagaggttttatggtgggctccaaggggcagccccaaatagacagtgggtaaagcccccaatctgcatccaagctcagccgccaactcctccagctcatccacttcctcaacaggaattagcacactcttggaaagattaattctaaggccggaagccgcctcaaaccacgccaagatccaacttagattggttaattgctctcttctagctttgcaaaaaatgattgtgtcgtcagcaaaaaggagatgggagacagtcagctcctcaccccctctcccccgaagcctatagccggaaagaaagcccccctcaccagcccgtctaagtagggtgctaagcacttccatacccaagatgaagagatacggagagagagggtctccttgctgcaatccctttgaatttgaaaagaaaccggcaggcaccccattgattaagatggagaatttagcagttgaaatacaccaccacatccaatccatccaacaagacccaaagcccatcttccgaagcaccttcataagaaacttccaattgatgctatcataggctttttcaatgtccaacttgcaaatcaaccctttctcttttcttttgtgccagtaatcaatcacctcattagctactagagaagcatccaaaatctgtctccctctcacaaaagcattttggtctactgagacgaccctatcaagcaccttctttagcctattcgctaggactttggccaagagtttgtacaaccccccaagcaagctgatgggcctaaaatcccctaagtcttcaacacctcctttcttaggaataaggaccagaaaggtagtgttgagacatttggcaaaggacccatgctcatagaattccttaaacagatccaccacctcctccttcacaaaatcctagcattcttgccaaaaagccaccgtgaatccatccgggtctggagctttgtctcccctcatctccatcaaggcgcagtggatttcctcctcagaaaaaggcatctccaagtcttcagcttcccggggattaagttgattgagatgcagcccctcaatatccgctctccaccccggctcttctgaaagtaagttctggaaggcgttcacaatcccctccctcacctcttgatcctcagtcagccactccccattaatcataatcctatccagggaattattcctatggtgggcattagccatccggtgaaagtaaccactattcctatccccttccttgagccacattccaagttctatgtattttataatttttgtattttataaaatcatgatcatataataccacattccaagttctatgtatcttatattttttaacttatgttagatgcattattttgtaaaacttgttttgtcatgtatgccattgatgtttaccaattaaaagcatatagagtttaaaaataattaattatttatccaatgcaaactcgaaaacccacttgaactgcccaatttgagcataggttgaaaacctttcatcttgatatgatgttgggatgacttccaacctgaccaaatcaccccagttgcagccctagtttcgatctaatacctattggagcctggtatgttatgcatcatagcaggaggaaagcatggcttatgtgcagtttaaagtgttcaccattcccttcccaaccctaacccagaaaagggaccactgcaccactgcctaagcatccaattgaatattaacacattttaaaattattaacctttcttcaaggtaggtttcctatctgaaactagtggtacctatttttcataactacctgtaaccagtaatgcctcattatcaagagaataatgggtgtcatggaaattaagacagatgattctgttaaattgtgggaaaaactgtaccaccacagcaccggggaacagtactaccacaaacgtcctgcaagagatgttagacaaatctcctggaagctagaccccaatgccccattgcctatatctccaatggacatgacctaaatttgctgaaagtatgatctgattactctcccaaaagaggtgtttgacctaggtttcttacatgatttctataatcctcaatatgatataaattaagggtggtggctaggagaggggggacacgatcatggaagggcccatgaatctgtggaatctagaaacacctttatgtttagcttggagcatttggaaggagcaacaaagaaaattaagtggaaagaattgtctttatggaaattatgcttagatccttatttgtttggtaactgaaggaagttagttatgatgggaaaccttttttggagttaattgacagtttagtaggggcctggcttagaggttttgttcttgataaactggtgtaacttctatactatgcatctatttggttcatgcccccttttgaggttgttcaagtcatgctctactatctacaatgattcatatactccatagcaactttgcactgtgaagacaatcaattatgagaatgacatcccctttgcttgaggttcttgttagcgggagagcttagaatacgattgtcacaaagtgctattgtttccagaataaacccaacatttgtttccaaatcatgttgactgggttactgatagcatctttcttcatctcggatgatgggtagcatggctgctatattgtcattctgctgaattatcaacattcagtttgatctgccttggttcaggggcattccaatttatgtacctcatcgattttatcttgagattcttttggtatgatttatttgataaggtatcctaaaagttatctatgtgcatcctagcattcttttcaatgatgctaaagggtataaagcagtcattattaaatataacctcattaagcatagctgaattttgccaaaaaaatacctgctcggttaaaatgtctcttctactttgatttctcaattctattttgagcgctttctttttatggtttccatttatgcacttttcagtccatatcttgtagattgggggtaacatatctctccctaatagtggaccatcttgggtagcacagccctagacaagagatactaatgttcaatgtcttttcaaataatagttatgaaggatttgtaaaataactaggcattttttgaataccatgtaaatgatctatgttttttcacaaagattgttcgaaccaaaggctacttaggtttttttttctggattgatgataggctaatggagaatatattgacaaatgccaaaaatagagtggcacacacttagtacaccaagaggatataaaatgtgccaaaaggtcaaataaactgaaaaaaattaacagaaccctatacaaccaatgaagttcagtagagaggaataatcaacacccaaacaacatctagaccacacgaaggagagactaaaaagctttcaaaaattgaatcaaatgctctatcccatcaaaggttctagggttatgtcaaaaactgaaatcaatgctccatactcaggtttaaagctttgtgggattctgttgagttgagctgagttgatgtgaggtcattattacaatgtacccgtaatgcactgctgaattttttgtttaggtgctgtcagatattactgattaaattgccagttacccctaactccttttcctgtgtaagaatttgatgtattcaagcagatgatgctgcatgtccggatcatttaccttatttttattgaagaaatcttcaccttgctaattgtttttcaatattctaatccattgattgaaaactgacagagggaggtagtgtctcaagcaaccatta

SEQ ID NO: 10380 - DNA, 14003 bp, Vitis vinifera
  Intron number 2 from transcript GSVIVT01009219001 (locus G SVIVG01009219001) derived from phytozome v7.0 (chr-ID chr1 8; pos 6351422 to 6365424)
attacgcaagcaccaggtcctataagatctcaacaaagttcctttacatttttactattattatctttcgtattctgcatatatgaagctccaatttaattaagatctgtatattcaatctctattatgcttcttttgtatattgatactcgatttactgtgagattagaggattttctgcttcattgatgcaaatatgcttgttctcttttgatcatcctacaatcatgtgcttgatcatgcattttcatgtacttgtgcatcaatttctgcatatatatattggctgttatgcttatccgcgatcttattagttgctgtgtagcgatgtcattgttgttcagtagtaatattaagtggctggtctttcactcatgaacctcccaaactctacctgggagaagaatacagttgattcaatccatttaggagttagatttaagtatcgtgaccttaggtaataaatcgattttgaatcagcaaaatgagaagatagatcgaatagcatttagtcgagcctagctcggtatgtttaagctcaactgttgtcttggagctttggttttcacaattaaatacacgtttaaacttcaattataatcctttatttgagttacaattaataaagttatataaaagagaagaaaaagataaagttgtcgttttaattaaaaatttataaaatgtatatatccttaagtctctcctctctatcttcattactttgatttctcaaatagagcatggttcataacttcagactaggaaacatagcagtatgggctatcaaaatgaagaagaattgttttccaacttagtatccgtatccttgcatacaaaaagatgtgcattagcagtggtagtagaatgtagagatataacagaccacaaggacttcatgctagaattaggcgtttcgaatttttagccaggtatgtccagtgtttatacatggagagatgtggtaactataaatacaacgtatgcttaaagtagagctcccattagattggtcatctttgttttgttgtgctaattttggtccaacaaaacacaatttcatgcaagtggattgagtttcttttctcttttcttgagtgaagttccagcaatcttatgtgataataggtataaacctgatttgaaatttgtttttaaaatagtttttttttaaaaataaaaaactatttttcatacttgagaatgtgtttagtaattttttttggataaaaaactgtttttgagaatatgctttgaaagcatgatgttttttgaaaatttattttaactgttttaagttgttttcacttattttttatgatttgtataaatacagaaaagggcattacaaaaaacagattaagaacattacaaattccaaaccgatttttttttctacaatatatcataaaattatttttgaaaacccttcttaaagtttatttttcgaaaactatccaaacaaccctgactttctatccaccctcaaaacttagaagaactatgaggtgctaaaatatctatctttcaaggcttggcctagccttgtagtaaaagcgaaaaactttgttggatatttcattactattgcaataaaaacaaaattatgcatactttatagtttcatttttaaaagactagagccctccgacttacaaagatattttggacggggacatttacagatggagttataggatcttatgattacagatgatataatcccttttaagccattaaggaagagattttcgtgctaagtgattttggctccaaaggtaggagttcctcgttgctgaggctctctctgtccaaaagtcttttcttccctcctttcgttttgttagcatcctcaaagctttgtatcctttgagagtacaattgacaatgaaattcattcttatgtttatatttcaatcatgaacaaaaatgatacttttaagattttagaaaacatattttaggagaaagacctccatgatatatatatttatattaggtttaaatttttaaaaaagaatttcatttaggttgccaataatagaacgtgagattccgtcacccagagcttcatagttagaagagcttgcatgattttttttgttttcttgagacatcgttagacatcgagtgctacccagagattcccaattttttgtgctttacaaagaacgatgagacagtttttgttgcatgtccttcgccagtctcccggcccatacgtgctttccccaaaattaaaagaccatcgttggagaggagtggggttttgagtatggctatatttggccggacgtacttttaatatattattattattgtttatagtagcaatatagaaaaaggataagaatattttgaaatccatatcatcgatttaactggataaacatatggatcaagtgggtataatatagtaaggctacatgtgattggatcaagtaaattaatgcaaccttgagaacccatgcagtgtgtttgccagcatggcagcatgctgatcaagtgaaattcatttaaaaggcaaaaagaggaaagaggaggtaaaagtttctctttccccactccaccaaggatatgacgtagatatgtcgtttcctaccaaactggtaaagaatgtggagggtacatgctggcgccgcatattgttgttgctgttataagaaagctgttcccgatgcccaatatgtgtaggttcatggaccagcctacttttttgttgcatttcaagttcattggttggaacttttaaagtctacgaattggtgacttgcagtcaaacgaaaggcccatttgtcatgatcgatttaataataatatagagttatgtgaagctaggattttttgacaatcttctttaattcttttccatctgtgaacgttccgcagacctcaagaagaaaatagctggtaaacgaaaaatagttttttatgtgaagagaaattaggtttgtgatatttactttaaaatataaactttttattttaagtagtattaaagtacctctgacgatgattttgaaatatttatagtttttttaactcttaaatttttttttattttttaagtattagaaatgttaaacatatttcttagaattattatcaaacgcatttttagagtgcatttaccggtgattctatgaagtgtttctgccatttttaatattcgtaaatttttatttttgaagtattagaaatattaaaaacacttcttacaattattaccaaacgcactcttaatctctccatgttctttgttgaattttttatataacattttcttatcagcatagtcttgaactctctttaggatttgtttttaataaggtcataatattgtaacatgagatctctcacgcctcttaacttcttaagttcaactttactattcttgattcttttttaaactcggcttcatctttaattttcaagttataaatatttcaaagtgattatatttttaagaaatttaaaaaaataaaaattatattgcctacctatttctttgtatgattatttatacaaagcatgggagatataattagtttttttgtaaatattttgttattatatcttttcaattaaattagagtttagatgcatttaaaacataattaatatcgaattcctagtagtaaagagttcaggtaccacataggttactagtgttcatatttaacactgaaaaacttaattttacttggatgcaaactaagaatgtaactgaagtgataaggtgtcaacaaaagattatgaaaaatgtgactagatgttaatacaaatatagtaatcaagatataaaactttggtgtgtacctcttcagggttgtagaatttcctgtttaaaaatttattgtaatatattaatttaatacaaggtgataacttcttctatatggagataattagttttgttattttccttcatgttcaattcttcaaacatgttatcccaataaatatttgagtaatgttattctttcaccccttcttctcaagctatgtaagcagtgatttttggattgggctatctagtcacgctgttcaagaatagggatgacaacgggatgggtttgggatgagtcaccctcatcccaaacccatttagtttattcaaaataattctcattcccgttctattaaaaaaataaaatgaaggcgtgtgggatggatatgtgaattttccatactcgtctcccttgtctcgtttaactttttttgaaatttttttaattacattaaaataaatatattttataaataattaaaatattataatttattttattgaaaactatttttattatatataataataataataataataataataggaaaataaaaatgaaatgaaattaattttatatatgagataggacaggataatatcataactcgccccaacttgtcttgggttttgaaaaaaaatttaaaccggcttctaacttgtttacctaaatttcaaactcatatcattagggttaaggtaaggcgggtacctgaaaaaatccaccttattgtcatccctgttcaagaaggaaaagctaaatacaagaataaatatacatttttaaccaagtaaccacatgaaatataaaacaaaaggaaaaatggggaaaaatcgaattgcaataaaggtgttgtgatatttaaaataatttaaaattaaaatttttaaataagtaatctaaattatataagcaatcatgattcaattaaaaagtgtaaattttttcatttttatatgaaaaagttgctctttttttttttttcgttcttcccttttccttttcctctttcttaatttgactttggctagaccgagcatagagctctaaccctcttttctctatccaaagagaaaaactatttttccaaactaatttttaaatttttttattatacttaagtctgatataaaataatttttattacaacttccactctctcctatccataatggttgttttaacatacatttactcccttaatcaatataggatttcacccattgctaggttaattcaagggaatttactctttgtatatggggtcaaaaactttccttacttaagcaatatgaggtcttaaccattcttaggtcaaatggaatctcctacattaggataaaaaattagctttaatactatttataataattcactttcttttatttatatatatatatatatattattttcaaaacatatccttaaggttatgaagagtctatcaccataataatttgttccattacgtgtaaatattgtctaccttgggttaaggcctttacgatttttaaatgcatttctacaattaaaagaagtttactaatatcaaaaccttttctccccaactaaagtggaatctcacaattgatcctccctcgtgaacacatgatgtccttatcttgccccatgacattacgaggtcaaaaaggcaaacatcaattatagaaccaaatagaaaaattctcacactagggttagagatcgattttgatataacttgtaacaatttgcttccttctatgtggatatagtttgctttaaaccaaacccctcacaactttaaaatatgtttataagttagagaagttcatgtcattacatatataatgttataaactcctttctcaaaccaatatgtgatctcacaatcacctcctatgcaaatatgacatcttggtcatgtttcatagaattgtgaagcctaatgaataaacacttcttatgggagtagatagatagtcttccacatcagattcaagaattgattcatattccatttatatcgacctactccttgtgtaaatattgcatccttagagctaaggctatcacaattttaaagtgtctccatagattaaaaaaaaaaaccctactattaaggctacaacttgggtggattggttaggttgatggttaaccaaaatgtaacctgaattaagaaagaatcaacttgatcccaacccaacccaatctctaatgtaagattcttaattcaagtttaacccaactttattttttgaagtttaagttaagctcaatttgatcatgatagactttgagttagttcgtttgattgagttgtatgattcaaaattcatccacaatgtttcttaattttattttttttatatagatatttagactacaatttaaatagtaaatgaaacaaaatttcaagatagtaataaaaaataaaaataaatttctctatctttataaaaaaatgtaaaagtatattgatataagtatagtttcatttttattttcttgaaaatctaaaaagaaaatattattttatagggctatatacattataaatatcataaaaatattaaatccggtttggtttaaatttgggttgttcaatccctaacccaagttcaacctagatttagcttagatagaataaaacttagcctaagtcaaacattgaatgttacagatgactactcaagatagtccgaacatcaagttaacctatccaagttgcacccttacctacttaatatataatgtcaataactttttttccttagccattgtgcaatctggcataaatgataatttttttttcaaataattatacaaaatattaaccatgtgatttttgtaataacactagaattagattattttttttaaaccatttttactagtgcaacaaatttgggtatttttttgaaattcataaaagtgttcaattactattttttttgtcaaaattattactttcaaacatcttgtctagaatgatataaaacaagtgcaaatatacttaattattaattttctatgtttttaacatgaaaaaccaataaacaaaggagtgtacgtggaaataaaaaaatcaatattattatcctcaattcaatcaaaaccaataaaatctgttgagctttcaataattaagaagtacagtttggtttcagaactatgaaaaccaacttgatccattaaatttctggtttcatttgtctcatgaatgatataatcaaacccaactgatgtttgaaggtttctaccctttttgtaattataattacttaatgttggatgcatttatgtaaattcattgatatagaggccctattaaagtagttcattattattgggcaatgacccaaaatgtagaagtgccattatattttaggcctaaattttaaatgacttttgggctttacactcaaatgaattagaaacaaacttgagaaatcaattaggctaaagacccaaattggtttggttcaacttattgatttaaatgaatgaaaccaagttcaacttcaagttgattcaattaattttttcaccaagaatagattgaatctgccctttaagcaaacatatcacttaaagtttttgtatatataacactattaaatttaaattaaattcaagtttatttaaatttgagaggaaaatacaaatgccattggttccattggggtaatcttaggtgatgtttgtttttttcacttaaatccaaataaaacttaatttaactaattcaagaaaaaactttaaagtattaagttgttaatttttttataaattaactattaagtattaatagggtgagggatatgttaagattatgttttagttatttcaaaaagttatttttagcatttagcaaaaagtaaagtattttgactttttttattcaatgaatttttttaaaaaaataagtaataaataaataaagttaaaaacatattatctaaaatctaaacataggttgcattcaacattaaattaaaaaaaaacaaacaccaccttaatgtcacttaagtagatttaaatgagaaatgtatttcagatttaacaattgataaaaaagattacattacctaagtgtgtaaatagaacaaagcttttaataatgaaaaaatggaacaaaggaaaatttgttaagatctatcccttcagtttagatacattggttgaatttgaatcaattaggctttaaactactttaatgaagtccatatcatatctataataatatatataaacaaaccccttaatagatttgcattcaacattaagttaagataacaaacaccaccttaatgtcacttgaatagatttaaaagaaaaatgtatttaagatttaattcataaaaatgattatatcacctacgtgtgtaaaggtattagtcaaatagaaccaagcttttagtaatgaaaaaattgaacaaaagcaaatttgttaaaatcgacctgctttaatttagacagtttggttgaatttgaattaattaggctttaaactcaattggtttaatatttgaaaatcaatttagttgacaatatataataataaactactttaatgaagtccatatcatatatacaacaatatatataaacagatccttaataataaattacaacaattaaataattaccaacccaagtttccattccctaaagaaattgggtttcttggttggtgaaagtagcacctaatttagttcattttgattggtttggattagttctatttattctttagttccatctacaccattaccaatgctttttcattagagtaaggcatccataggaaaataacaccctatttggcaaccctttttaaatataattttctattcttaaaaatagaagattattttcaagactcgaaaacacaattttttggaaaaaaaaacagatttttttttttagaacttgttaaaaaacaaagtgctttacaagaatatagtttgattgttttcaatttttttaatcatatagttatgtagaatgattgaaataaaacactattaataaaagttatttttaagaaatatttggaaatagagaaaaaaaaaaggttaagaacattccaagttaccaaacaaacttttgttctagataccatcaaagatcgacttttgaaaatgttatcaaacaagcctttaaactcaatataggacactaaaagagtgttatgacttgttgtcttcatatgcacacgacatttttgttgtttgatgatattcacgcttgtcaaactttaccatctatggttgtggaggtttgcccttgagtgggaaagtctatgaagaaaggtcattctaagaaaattcaggaaattggatgataggtaaaatatatgaggtaagagagagttttggcataaatatgtggaaagacattataaaaggtcgggaagattttagccacaagatagttatttgcgttgaaaatggcaaacgaacaaaattttgatgagataggagggttgaggagaacagattgaaagaagcatttcctttgttgtacatgctagcttcttctaagaatgctataattgttaatttgtgggaaagaggatgtagaggctaatggttggtacgattcaaaagactcttccaagattaggaaatggagggggtaacccaatttctagtgcttatttattcaatgagaatgcaagttgaaggaaaagacatcttaatatggactaaggataggatgttttgtgtaaatttgtattacaatttcttgtatgctaagactagagtagatttcctaaccaaagaaatttgaggctataaagctccttaagaatacgtttttttttttccacttgggaaacataatgagggaagatcttaattgtagacatgttaaagagaggatggatgatagtcaatatttgtagcttgggcaaaaagaataattaatggagaagagcttccagatcaaagattaaaagaaaacctcattaaatcccctttttgggatgaccctatgttctattggaaatgaaaaattttccaatgatgaaattcttagataaccataactgtgggtagtttgggctttttaagggtgttttttggtagatacctttcgacaaattttgccttttagctttgtgtatactccttgtattatattcgttgagccccgtttcttagcactatttatatatataaaatgattaagggtgacaaaatctgcatacttctagtagggcattgactagtattttctaaatagaaaagggtatgataggctattgctctagtatgaccttcttccaattttgagagagaaattcgaaagctagagagttcagttaactacgattgctctccatccactataaggggaataatttagggaaggggttggacttgggcttaggaagctttagtgctcaataggagtttcttttttggggttgcggtatgagtttcttttttctcttgcatcttagtttcttttgtggctatttgttgttagggtggtgggtttttcttccctattctcccgcttgtcgattgatcctaattgtatactctgtgtgtactttgttgtgccttttggcaagtgcttttaatatatcttgcttatttacctatcaaaatatcccatagcttacaagttgaccaaactttgtacattcacaactaggatgaccaaccctgtatactttcgagtggatattgactctaagacactatgtatcacaactgattgttctatgtaaaaattatagattcagcctcattgtccttcatgactttaagtagtatttacacattttagagttgtcatttataagggaaaaaaccttctccctgcaaaggacatgccatctcacaagcattcataactttttaattatattgttactatttttattaaataaaaaaaaaaaaaacttatcaatatgaaaagaatgtaatacaggtcacatacataatcacatgtagaaaaatttccaaccgctccattgacatgtagacactcacctataataaacccaacatattcaagatctcatacaaaaataccttctcaatatgttatgggacttgattatgttcttttcctctctttgggcctcttgtactgtaacttttaaaggagttcttcttaagtgttttacaactcaactaggctgcggtttgcgcttcaaaagtttgagagtgttggggtttctctttgtttttagttttctaaagttgggtggtttctactttgttcagtttttgtttttgtgggaaggacctctcatccttctcttgttttcttctttttctcttgtatcttttcttctattaatataattttcttcgtttctgataaaaaaaaaataaaaaaaaaatgtatccagttcctgttgtaccacatcaacaccaattcatattttgtcatctcaaatcttaaagaaaaaaaaaattcaatttgaaaataattaaggaaaattttcatagctagatactttctcctcaacatattgctactcttcaactttgttatagttctcagtcgcttgttgtagctaattttccctaagcatggtcatcatagcttctactttgtattcccgtaagttcacctgttttcacttctaattccttatatagctacaatgacgatcttttgaattatcccctttaatcatccttgagcagaaaatatggaagtatgaagaaaattctagtttccaactttctttcccccctcaaacatgttttttgtttgaaaccagtctcacatacttgtaattgaataatgtcatgagccactttaagactttttttggttggggttttgggtgggggagggggagacggagaaagggaaggggggaattgtaattattatatagcaatatatagattgtacaatatgtagattagaattatggaggttttggtattcaaagaggctccacaaacatttagtttgtaaatacaaatgtaaaagatagatcacagagaaaaggagaataaaaaaacataaagacagtcataaactcaccaaattccacatgatttaagtaaactaaattgaaatgcatgatttttatttttatttttattttttttaaaaaaaaacataaggaaggtcataaactcaccaaattccacatgatttaagaagactaaattgaaatgcataatcataaacgtatactgtgaccactgtaaattgtcttcaatgttgaggaaaaaagatttaagaggctggaagattttcatgaaaagcactatttatagtctccctagcaactatatgtaagctttgatgatgccaaaaggcctaaaagaaatttgctttagaagggtgggttgacaactagaaagattcatccagtcccaatagaagagtttgctttgttaagactaatgatggtttgggtattatagacaatcttgaacaaaattatgaagatttatcagtgggaaggacagttagtacggaaggggtggaggaggtgttggggttgtgtttggaatttgagatagcacagaggctagtagggttatcctctggaaagcatcagaagacttttatacaaattcgattccctaaaatgtttaatatggtagttctgaaagaagtttgggtgctagattgttgaattgagggagaatagcttctaggtagcaaggactccattttctgaggtggcttctttgaaaggcagctagagccatttatgcagctcctagacgtaatgtctattcatagcagtgcagggggtagattggcatgggggagccttgtttttttttttcttttttttcacaagctttatgactcttaaggtgtcatccaaagtttctttgctagaaaagccagcatgggaggatatcttaacattaacaactctatgagatgcagttggataatggttagcgcaaacaagaggaaactgcaaaccatactctgattcattgtggatgagcttctaatttgtagtctcgggtattctccttgtttaaggtgtcttattgtcatagctcactcccaattttgtgtagatctacaaattttccattctccaagggtttcaagcagctccaaaatgttccagaactttgaagtgcccgaagcagattttaaggtatttgaaggtgcttagagcaactttaaggtgcttgaaggagcatacaacagccgctaaggagtttagtagtgcttggaccagcttagaagtgcttgacaagcttattagaattccatattcaatatgtattaagaggactttcccctcgtaccgataactaggtggtctaccatcaatcaagttgacaagtgttttgtaaagttttctaatgttattacacttgctttcttcaaatattctctctctataattttttttttatcagaatttcttcaagcattctcttcctattattaactcttgcttttattttcccagtggcttgaattaggcttattaagttgcttagagtttgaggtgctgagttaccgtatgaattctcagataaggtattggtctgtgatatcacgctcttcccaacccatttggagatttggccgggcatgatggtttcaaagaaaagagatataagccaatggttcacttctgataatataaaaagagaggaacagaaggttcttcgataatttagagcaatcaattttgattgtgaagcaccaagtccttagaactctacttttatggtctaaagatctgattcactctcttttttttgatagtttagaggcatttcataacttttgctcatgcactaccataagttctgttgccttggtgtaccttgtacacctttctatatactagggtcacacttcatttttttattaaatcacttattctaaaaaatatactatccccgacttgtctataaaaaagaatgcaaagaaaatataacataaactcagattttcaagaacattctttcagaaaagcaaaaataggaaaaacagaactatttgaagtccataccttgagtttatgtctcttggagtaatcatctccttagcaggtaaacctgtaatcttttgtttaatcataatgatataatgagacagccaactcttcacatagtattgcctgacattatgtttcaaatttctgtatgaaatgcccaaaaacagtatacagaacatattggagatctcacacaatttcattctgctattccagcattaaatcaataactgagcgctatatcaaagcaa

SEQ ID NO: 10381 - DNA, 3701 bp, Vitis vinifera
  Intron number 17 from transcript GSVIVT01010214001 (locus GSVIVG01010214001) derived from phytozome v7.0 (chr-ID chr 1; pos 17615095 to 17618795 reverse strand)
atctgggaggaactactactacttcagaaggaaaggtaaaagatctccttgatttaaattctacatgaagattggattatggaattgattttatttaaatatggtcttttcaaattaagctcctttgtggggtatttggcatcgaacatctttgaaattgtagatttgtgtgttgaatcactggtaggatcgagtttatttatatttaatttgattcagatatttctatgattaaataatattcttctcttgcaaaaatctcctagtggtgcacagtgattcactaaactacacgcagctttatgaattcttataagattgtatgaataatcatgttgaacgtccaaaggaagcacacttgaaagaacagtgtctctcatagaggcaaaaccatcagcagtttccctacttcacttactacatatgtcaggcaatattattagtactgtctaaaagaaaatacactttaaatattgtgttctctcataagaaacacggttattctcaatttaaattgtaactatttataacagagaaactttgtgggctaaccagcagcataacccatgcagtgcaagagatctcatcctcatcatctcacaagctgtatcacattcccttccttgagtttctaacttacatcaaataaatgaaaattttgacattagagtgacagcataacaaacatttccagattcagcgtcatagaatctattaatattcaattgtttgttttcctgaacttgagatctttccaagagtgaattctttgctaactcaagtatcacaaatagcttcagtatggatacaagagtgatgttttgttgactaactatattggttgtcttactcattgtcaagttagcatttgggttcttaggactttaaacagactccttctatccctaagacaatttttcaatcaactgagacctttctattgaaaatactattcagatgagccttgaggttactatttacatgatattcacttactgtaacgatgatactgtacatacacaggcaaaccagtaataccattgcatttctgaggaacaaacatataatgatgaaaggaagtccttttttataacccatacaaaaactgccattaaattgacctaatataagctaggtggctactgtacctgctcatgaattagttttcctttcatgccttgttaactttccctaagcaacacaacagaaggttgctctataaaaacctcctcctaaaaatcgctgttagagaaaataatttttgatacgatgttagttgaaaggcaatcttggattcaatcatggatagaactacacaaactgaatttagcctatggaattgtgcttataaaaatatattggtttgaaattttctggtccgctttcccatacaacaagcttttcatctctatatagtacttgatgtatacaaagtgcatattttggggagttagctccaatgtacattttgggctagaacccctcacaccctaatctgttgcatgtttcctcatggaagaatatagtgcctgttggtaaaaaaattgaagagaaatggtagataatagaagaacaacattatggtagagagacatctgagaataatataaaatttgtgttcaaatgttctaaatggcagtgataccttgttgatgtgcaatttgaaggttaagaagagacctaggagtgaaaatgtaagcagaaggcatgctctgagccaaaaaaaaaaagaaaactctctaagttgtgattcttactacacttgaaatgatttccattttccttttcttgggctttgaagaaatagtgacacaaagaagagggatcctgataacaaaggaatggtataaacctattgttatgaatttgtctataaaaaatttgaattattttctcaaaatcaactccatatttgattaccaaaattatcaggcctagccattttcaggtaattgcaataaataaataaattatattgtaataatttaattgaactagaattaccgcttatgattaatgacccaaaattttcaatcttataaaccgattttgatctatatattttttgtcatgttcatttaaactattccttaacagttatgccaaataaaataaatatgggattatgcaaaaataaaataaattgggggacatctccattgtttctttgacacaaagagaatgtctatcttccttttcccaaaattttgttcaaaatgctctgataaaaaaaaatgtacaaaatgcataaatctaaaagtatgaagtaggcccctaaggcatggcttaggtagcaagtggttgatgtagggataggaaaggttccaggtttgattccataagaaaatttttatctctattagatagacgttagtagttgattagtagaataccacaactgatcatccagagtaaacaatggcttataacaaacaatatactaggtagtcctcaaaactactttggtatatccatatccatcgttgaggtatggctgctcttaaccagtgtgttctttttgcctaaggacctcatgttgtttaggagtacactggtctataacaagaacacaacatagtcacaaacttatggtgttagctgtggatgtagttccaacataaagtctttaaaatcttgcagataaaactgaagtcggtaactcaaactatgtatctcattgagatgaagatatctgtgaagacatctggtttgagaaagattgggtcggtaactggaaatggcacttgaaagttgtcagtagaagcattcatgaagacgagattgtagtgcatagaacatcaaacagaaatgtagctaggtttgccacaaagttggcacaagtaaggtaaatgtcctacatccatttttatgagctcaaagtatctcaccagacatgtattattagggcacctcaggaagggtcattgcttttctagttttatttcataaccttatggttgtggactgtggaactttttaatgcttaatgatctgctcatgatattcctgtcttgtatgcttctaatcatttatctaggtggagatttcttttgtagtgtcgttaattttttaaggtccagttgaaggagtgctgtcatggactctgctagatgggatcttttaatacaactaatggaaagatcataattatggcaaagaatggaagctttcctatgttgctctagttatatataggagagttgacctagtcatatgtagtagaggtatggggtttatgaattgtgtactctcctgccaagaattttccacttgcactaatcaaaaaaaagaattttccacttgctaagttctaccatgaggcaggatctacagaggcacttcaccaggaaactattgtctctagtgcttactactcttgactgctaatgctgagtttgttttcaaatgtgtgatttcaactaaaaatatgatgaactcatgttaaccactcatatacatgagttcaaattattaatctattttagatactggaggaatggtgaactcatgttaaacaatcctattatatgataaacggatgagccagttgcaaagtcagctgtttctgtggactgtaaatggagtagttttgaaagcacttacggttttaaatccctttaattttgtgtgtgtgcaatcttatgctttatagttccttataattactgttgtaataatattatgcagattaggtgaatcaa

SEQ ID NO: 10382 - DNA, 3807 bp, Vitis vinifera
  Intron number 2 from transcript GSVIVT01012514001 (locus G SVIVG01012514001) derived from phytozome v7.0 (chr-ID chr3 _random; pos 392616 to 396422)
gaacttcaaatttgtactttcctatactcataaacttagcaaaaccttaatgcattatatttccattaagaaggaaaaaaagaaaaaaagaaaggaaaaagaaaaactccttcaaagctatcccagttgtccattgttaaaataagtattatctgttcttgagaattgggaactgaatcaggtgctgaaatacaattcagttaaatgcatgagcacataaactacttattctaggtcaatattttgaagtagatccagtcaagataggtcagagaagtcggattaacttgtgaaagcattggagaagtctttaggaaattttttaaaaagatggaagcaatagatttttttaatggttaatagatgagccaatacacacgcaaaaggaaagaaaaatggtggggtctatctggagttctcttgttatatttctgaaggggattcttgggaatggtattttctgtatgaaagggaacttcctacagctgctgtagattttatagagtagttgtgctccaagctctaaagtgttgtagctgctgtagtttgaatcttttgtgtcaacatatatacttctcaagtactgtgtttgccaccttagaatgacatttttcttatatatatatatatatatgtatattcttatttgtctatcaaaaaaaacggggaacttcatgactaaaagtttctctcttggtgataattaggctcttggatggtggtttttactttgataaccaaattaggaaatatctatccataccctactaacaaatgttttaattgtgaattatttttaaaaccttacaaaaatgatactatacaatttcttttctccctttttttttttttgtgtgtatgtgaaacaattttttttctttgatgtgtatcttattgtaagtgtgttttatgataagattcgaaacaagacacagtgatataaaagtgcaaacaaatttaagtgtttcatatgataagatatgataacaagacacaatgatataaaaattcaaacaaatttagttatttttaatagctcctttaaataatcaaatttgaaatttgtttttcttaaaaaaattctaatgctagaaattataataaaagggaattggagaggcaaggtattcctacatgaaaatgctacaagcttgttgtcaaaggtacacataaaagttgaaacttaatgtaaaattagttatgtgatgaacaatggggagttgttctttgaataatttgaatgttgactttaaatatgatgatgaataaacttttgcttgatgtattaatttttccttttttggatccttttctttgggcaagggaatgatataagcttagaaagttagaacgtagaaggtggcaaataaacacattgcattttaacaaaacatacaaaatagatataatgatttagaattttaactaaaattagttaaaaattcaatacatttgttttgtggattttattatgaacccatgcattataatgtcatgttttgttaagttgaactatttaaaccctagtctctagttttttaatatatacgaaattgatttttaactcttctgccttgctatctttcatcaaattgattatatttttcccttagctttagtcgtccaataatagtttatatatagtctatgattttttcatatatatgaaattgatttttagctcttctgtcttgctatctttcatcaaactgattatattttccctatgctttagtcttccaatactagtttatataaatatatatatatatattaattatattaagcatagtggcagtttggagcgaaaaccacatttagtaagatggaaggtggtgtgcttaagcaagaagaaagggggtttagggatcaaatgcctttccattctcaataaggtactcctttctaaatggaattggcgttttgcaaatgaaagagaggctttgtggaatcaagtgataagaggaaagtatggggaagatagagggggttggtgcactcgggaagtgagagaggcgcatggcgtggggctctggaaaggaataagaatggactgggacttggtgggtgcgcggatttcttttagtgttggcaatggaaggagggtgagtttttggagggatagatggtgtggggatgcccctctgtgtgagtcatttccttccctctatgccttatcgattgaaaaggaagcttgggtggcggatgtttgggatcccttggtgcaagggggtagggggggttggaacccttgtttttcaagagccctaaacaactgggaggtggaggaggcggaattatttttggggtgtcttcacgggaagagagtccttggagacgtagatgataaggctgtttggactgaaacaaagagcggcattttctcggctaagtctctataccttgccctagaagcggactgccctagttctttcccatctagctgtatttggaaggtgtgggtacaacccaaaatcagcttttttgcgtgggaggccgcatggggtaaggcacttaccctagatcttgttcagagaagaggatggtcattggcaaatagatgttacatgtgtattgaaaaggaggagaccatatatcatctgcttctccattgctcaaaaacaagggtcttatgggagttgcttttttctttgtttggggtgtcttgggtgttgccgtgttcagttagagagactttgcttagttggcagacttcttctgtgggaaagaaacacaggaaagtgtggaaagcggctcccctgcatattttttggacggtttggaaggcgagaaatcgattagccttcaaggatgatgaaatatcaatacagagattgaaatattcctttttatgctcgctttggtctgaggcaaagctgtttatagtagaatgccctcaaactttggtgaattttatagattggttgggatcattgtaaggttttgggccttttggttggtgggtctcttatttgtctttggcctcttttggtggtgggtgtataggtttgtataccttacataggttgtataccttgagtcgctcttttggcgtctctttataaatgaattttctttacttatcaaaaaaaaaaaaaaaggtgattgatcgcctaggccactaggcgaggtagcttcaaagaggcgatcgccttgggataaggctaataatatagaggcgggacctttgaccatgggttaagattaaacatacttagattgtaatttaattcaatctaagattaaattaaaatagagtatacattatattattaatcacagtgataatgagatggatagtctttatggaactaatggaaattttaatttcaatgatgactatgatgatgatgtctaaagcttctctaagatgttcattctcttcgttttgatttttggatatttgaaaatagaatatacatttgaacaagatgaatttctctaaaacaatatgatgtttcttatggtgtgggttataatatttaacactttaaataattgttactattttgttaattttattggacaccatgagggatgaaaatttaatagtattgattattgaagacgatgtttatattgattacatttcaaataggtaaatatatttgtattctttatcgccttactctagttaggctatcatgttttttcctttctccataggctaaaagaagtcatatcaccttgacattgtcttttacttttgataacttcaattatacataatcaaggattaacaaatcaaatcataatgaaaaaaatatgggagaaaaataagggaagtaaggaaattaaaaaggaaac

SEQ ID NO: 10383 - DNA, 5511 bp, Vitis vinifera
  Intron number 3 from transcript GSVIVT01001824001 (locus G SVIVG01001824001) derived from phytozome v7.0 (chr-ID chr1 4; pos 26103581 to 26109091)
ggtgagtcgctttagcttcttagctttctcatatgatttgacactccttactgatattatggttgagatgcttttggaaattctactctaattctcgcttcttacatactttcttctgattcatcttccatccatgaggttgttgtcagagtttaacctagacaagtagatgtacttgcagttcttttttgcccctcaatgtcagtttatcatcaaaattatgttctattgccaatgtgcataaagcaacctcaattcagtactgttagtggtgtaaggtattacgaacaggaaaatattgattagagttttgtgatacgaggaatgggtgggagacataatgcattttttcacctgaatttggtgaactgttgaatgattagaatacaggaggcggttggcacccttcttggtaagctatatttggtggagaaacaaagcatctttttttttttttcttttagtaatatgttctataactatcttaaagaagtgaaagcctaggtaggtagggtgtacttgcagaatattgtcaccttgagaagttgtttttgtttttcagtaggaaacaatataacaaacaaacaacctatcaaagaggcatgaactcccctacacaatcctttgactaggaacaccatgcttagagagactctatgcttattcaatgaattttcaaagtggtaggccaagcttgctatccacaaaaaggagcatcccaaagcttcactctgataaaaaaatttgcgtgacaaaaagtccaattaccaaggccctcttttttcttgaaaggtccaagatatgactttggttgactcacccaccaccataatgttagcaaaggcctgagaaactacccaaatcaggtctaccaacaaggttggtacctctgcccttatagcttggcctaacccaaaatgtttggagagagctttaaccatagttctcatattatgtaatgctccaacaatacctatttgtcttggattatatgacaagtaatccatcaaaattacactccatgagggccaaagcctattcgatatgctcctccacaacccttccacttgtatgacaagcaaccttagatcaaggatgatcacactcaactaagaattttgttttaggcaatgatcaattatattaatagcactcaacaaaggggcacacaaaaggacacatagtgtattcatggtgtcaaaggtaaaaaatggttaaggctacaaaaaaaaaaataacactcttgccttacttagagctcaaccaactaataaaatcaattatggacaataagcaatctcctatgtactagggaagtcactctaaaaaatatacataaatgatgtttgattacttgattcgttttttcaatgttttcaaacactttgatttctctcgttccatatgattcaaaacaagcacaatggagttgcttttcaagctttatttttcttctttccaacaaaggatccatggctaagaaaaacatctctaatagaggagagcattgtccaccggattccaaagagagcataaattaacttccataacatgactgctttcgaacaatgaaagaggacatggtgagtcatttctttttcttctttgtgcgggtggcatctattcaacatcttccaatccctacttttgagttgatctaacttcaacattcttcctatttttttatggataaaaagaaaaaattcaacatttttccctaatgtagctttccaaggaaaaagtttaaccctcatctaaacccatcattccaaataacacactaggagaatgtccattcttccatttgataaggaagaacatagggatttaactatgaattttccactctttgaaattagtgaaaacaaatattatcccttgtatccctactaattgtctgcatttgcaatttcccttaaataaaaaaaaaaaaaaatccaccatctctcctagctcctaatcatgaatttgtcatgtgaaattggggttccaacaacttccctcgccattttgcttgcacaccttagctacccatgcatctttagcagtagctattaaaataaagtaagaaaagcctctcctaggggttcatcattgcatcacctatccttcaaattttcactctccgattgttccccaccctaacttcaatcatacagttaaacacctcttacccactcttgattgccttaaccccatcccatactcttctcttactcccttagaacaccatcctccttctttcccatacttccctataatcacccgcttccaaagggattcattctcaattgtgaatctccaacaccatttattgaggagagcctagtttagatagtgcaaacttctaatgcccaagcccccactcctcttttccttgtaccttgttacttagttcaccgatgttgttgttgcctaagcgcctctctcccttaaaggaagtcccttcgaatattacttgcacatggcaaactatttttgaaatctttcccccactacattccaaactcgagaattctaaaaagaggtcctagcaaaaggcccaaatggtttgtggggaggttacccactctccaacccaaaactatagctaggtcctttatattagcaatcctcctaaatagaatcaactcacttttctctaaattaatttttgaacttgagattacctgaaaccacatgactgcctaactcaagtgctccatatgctcctccttggcattgcataaaataagggtatcatcaacatataataggtgaccgcatttccttttttttataggtaaataaaaatagtattgagaagcaccaaaaaggggtgcattgaagtacacatgatgtatacaatgaccacctgaaagcgccaaaaaaggaaagggaaagcaaaaaaactactcccttcctcaaaccaaacccaactaacaaatgaaatcaaataaggacatcaaactttcgcctataaatagcttggtctaggataacaagttacacataaacaagattttcagtcttttttttttatagataaggaaaagttgtatataaaaaaaaaggggacataaaaaacagtgcgctcttttttagagtatacatgaagtatacaaaagaaaccaaaagacacaaaatagaggaggagagatagaaacaaaaaacatcacttgcccttacttagagcctaatcaatcaatgaaacttacaaacgaaaaagagctcaaatctatagacaccctaacccaagatcaaaggttatatacaaaagaatttttcaatttttggagcgaaagctcgtcattaccaaacgctaacaaattcatttccttccaaattgtccaaaatatacataagggggtcgcttgccaagcctttttttgaactttacccacaaatgacccatgtcacccaagaagagtttccttcactgaacaagaaataatccaagacacaccaaagagagagaagaagattccatagaacccaagtctttgtacaatgaagaaaaaggtgatcaatcgtctctacttagaaaggtaaagaaaacacctatttgccaagaagtgccccctcctttgaagttggttcaaagttaagacttttccccaagaagcctcccaagcaaagaaagccatcttaggaggtgcgctcgacctccaattaatttttatttaaaacttatatttcataatatatatatttaaattttttgatatttttgttgtttacaattttataataactgtctttttgaattttttaaaataaaaaattaaaatgataaatttgataatgagtattttttgtaatttcttaaaataaaaattacagcaataaatgtgaaaaaaattaaaataaaaggattatcatggcaatttttcaaaaagatcattgattaagttggtgatttttggtaacattgacctcaaccattggattgtggcaacagatgatattttccttgcttcaccaatccaagtttccaatcttttctcagttaagtatcagcccatattcgatatttcagcctaaaaatcatcgaaagccccttattttttaattcttgcttaaacgtgatccacttttcatttatatataacctcattttttgcaatgtttgtgaagagcaaatgacatatttaagttgaatacctatgtggtttaaggtagccatggggctaaaaaaaatttctagtcacaagtgagtttattctagtaaggaagtccctaatagggaggatttagcttctttattaggatgcaaaatggtgaagttcactacttatttaggtctccccctaggcatttcttttaagttgtgagtagtttgggaggtagtggaagaaagattcattaggaggcttgctatgtggaagagacaaatatctttcaaagggtgaaaggctaatgctgatcaaaagtactatgtctagtttgccaataaaatgtatggccctatttgttattccaagaaagatgtcgtcaccttagcgatacaacactaaacatctcttttccttcattattcgccctagccaacttaaaagatgcatggattgttgatatatgggatgagattgaggagggaccgcaatggagtccatgtttctcaaaactatttaatggttgggagttagaaagtgttgaggcatttctagcaaagctgcaatagtattttttgaaaaggggcataggaaacagactggtatggaaggaatcaagggttggactgttctcaaccaaacctttctactcttgcttggagtcgaaaagaaaacttttctggtaaaagtagtgtggaacccatggtaccaacaaaagtaggattctttgcttaggaagcaacttaggggagagtcttgaatttagatcagctaaaaggaaggggatgagctttggcaaatagacgtgatctttgtagagttgaggaggaattagttaatcatgtcctttttcattgtgcaaagatatagtaattattctcattgtttaaagttgagtaggtgttgtcttctacggtcaaagaaacattctcaagttggcaagggacttttgggggtaaagaagcgcatgaagttgtggaatgttacccttttatacttatttttgaccatttgaaagtagaggaatcatagaggttttggtaatgaagaacaatcaaatccagatctcaaaaactctttgttgtgtgctctctctgactttggggtagaaaatacaagagaagtgttttttttttttttttggtcagtctttccatctcattgcctttttggtacctttgtatacttttatacatactttggtgtgcattcttttgattagacgctgttagtaatattcttgttttcctataaaaatatatatatatatatatcttatcatgatcatatttaaatgcgtaagtttgataattggtttttcattttatcaatctcttaaccagcccaacttttgagttttttagtagaatgagggatttcgctaacaatgtttcaaatttgttattatgataggggg

SEQ ID NO: 10384 - DNA, 6812 bp, Vitis vinifera
  Intron number 12 from transcript GSVIVT01008230001 (locus GSVIVG01008230001) derived from phytozome v7.0 (chr-ID chr 17; pos 4429287 to 4436098 reverse strand)
gctcctggttagattgagtttgtttggttattcttgttgaataggtacctgtttgcatatcttgtgtacttcatattttttgaaatctttgttatggcaatggtcaccaatgaaacataccttagtgactatctaagaataaaagctacgttggtgaatgcccaatagaaggaaccaaacacaacttaagaaacttcttacaaaaaataagttgtccgtatgtattaaaaaaaaaaaaaaaaaaaaactgtagtgatatgaatgaggagcatttgaaaccatctaatccattgctatatggaattgaaaaacttgtttcctaggagacccaagaaagaatgctttctattttgtatttgtgtcctttgtgaggaaaatagtcagacgagctagtctattgctaaatggacttgaaaaacttgttttaatctaggagatctaagaaagctttctattctacatttgtggggaaagtagtcaatgatgtgccgttgaagcctagctcaagtagtaatgggttgggatgggatgagaaatgggggtggttgagggttcgattcatgtgtaataggacaaaagcaaaaaggttgagtatggagtggcaagacaaaatgctgttgtattgggcttaagaatgaggaggtggtcgagaaaagtgaagaaggccaaaaaggccttattttgccaattaaggcctaagataatagggtaggctttgtgcaagtctgggtagtgagagccattaagccaaaaaatagtggccttaatattttaaatggagctagcccagtggatgatttgtagcagatgtgggcctcttttgtaactagagagccctttatccattctttagagttggatcttatgagccctggtggaagggtttggaaactttgtgtagagagaattaggatccttggagacactgttttgaggagaaggttttattagcctttttcaatttatgtggggataaagcccctaggctgaaaaacttctccataaccttggtagttttgttgggattttgtgaaaagtgaggtgagttgataagttttgtttgtttgtgtttttccctttcttcttttgcaaatttctatgaactaagaggccattttgatagtctttgtctaaacaaagtggggtgcagaagatttgtaagatttcggccagtcaatttggcggtggtgaaaaaaatgattttggacttttagtatgcgtttgtggaggggagacaaattttggatgtggtccccataactaatgaagtcatcaacttaaggttgaaaaacaccgtcaatggggtcacatgtaaattagacatttagaaggcatatgatcatgccaacttagggctttttgttagtgatcttggaaaaaaaaagaattggtcctagatggatgagatggattaagtggtgtaactctatgactcacttgtccatattggttaatgagactctaacatgctttttcctaagtttaagaggcttgagacacagtgacactttgttcccatattgctttatcatggccatggagtccctctctcacattctgaaaaaagttaaggaagggggtttcatagaagggttcttagttagtggaagaggagatgagggattgaaagtatcccatatgttatttgctaatgacactcttattctctacgatgctactaaggagcatatggaacatttgaactaaacgttcacgtaatttagggcaatcttaagttaaaaatgaatctgaaaaaaggtgagttgatccttgttaggatagttgctaacttggaggaactacctagggtgctacaatgtaggtaggtccattcagtgtgtcatgggtttgggatgtgatagacgaaaaattttagaagcaactatctatgtggaagaagcaataccctatcaaaaagaggaagaatagctctaataaagaatactctgtccaacacttgaatttacttcatgtctttatttgtcatcttaaaaatggtgaggttaaagctaaaaaggatccaaagtgatctcttttggtgggagagtttatcgtgagaaaaccacatttggtgaattggttgatggtttgcatgagaaagaaaatagtgttgggtgttagaaatctatccatcattaacaagctcttttggacaaatggtgttgaaggttcgctatggaaagacaatctctttagaagtaggtgattgttatttgtagggaacatagttgtgaaaggcgtgcctaggctccaggcggcatgacgccatccttcgacgccttgcctgaaggtaggcgacaccccttcatgaaggcgccgcttaggcgtgcaaggcgtgatgcggtccacaggtgtgccttgatcccctaccttctccttctcctttttttttttttttttttcttcttctccggtgtcaggttgcaaagggcagagagaaaccttaatttttttttttttttgattttttgggaccaaaacgacgtcgttttagacctttttaaaaatgggtcaaaatgatttcgttttagccctttttattttaaaaagagcaagccaaaacaatgctgttttggagcctgttcctttaaaataaaaaacaggccaaaacaatgatgttttggccctgttttcccttccagcccccttttctggttgctttcaacccgacaactctcccaaattttgccctagcctcagctgtgcaatggagaagtgaagaaggcgaagaagaggaggaaaaatatatgtaaattagggtgtgcctcacttcactaaaacctgcgcctcaggctccaggactactttgtgccttggtgcgccttgagccttttaaaactatggtagggaagtatggggaggtggtgctctcaagaagtgggggaagggtatggggtgggtgtgtaagctggtgggagacctttaacaatcaaactagttttaatgtaggtggtgggtggaatgtgaaattatgcaaggataggtgggctggtgacttgttcctagacgaagttttttcagaattattcttattagccacgggtaaagatgcatggttagttgatgtatgggagcaggatggcatgggagattattagaactcgaggtttgtaagatagattcattactgggagatagatggcatgaaggcctttcttaaaagctgttagcacaaacaatttatagggatataaatgataaaatggtttggttgaattcaaggaaagacattttttttagttaaatttctttatcctctgtatcaaatttaagaatggagacattcccttctagtattgattggaattattggatactgtcacctgagaaactattcaacgaaggatattgactttggatcaactcaaaaggaggggttagaggattttgaacaaatgctatctttgcaaaggagaagaacaaactgttgatcacatccttcttcactgttagaacgtagtcatcctattacaactgattcatgctttatttggaatagattgggtgatacattcctcaattgacatggatccttttttggaacgaagaagaaaacttggagagttgcttctttgtgcttattttaaatcatatggagggagagaaatatgagagcatttgataattttgaaaaagtggatcaaacaatcaaataattatatataacattttggagtgggttagagtgtacacaggagatagttgtttctccatgatggactttgttaactggttaaatctaagcaaagctagagattcattttggcttttagcatccttgtatttacagtatatgcctttgtatacccttttgttaggcaatgttgatataattgatctttgcctatcataaaattaaaaaaagaaaaaatatatcaaaaagaaaaaaaatcatatgtgggatagaattgccatcctagcattgactagggctttgattggctctatactctttggctttttttttttttttttttaaattttttttgggattagaggtaataaacaggctttgtgctttcactattgaatatgctttaagtggattcccctctagctgcttaagataacttgagcttcaatgagttgactttctatttaaaattgtattggttggacttcttagatgtggaaattatagctcttctttaaggccttcaggaatgcctccaatttgtccaaaattaccattatagaaatcattgttaaataagaatttttccaccattttcaggtgggtttgcagtagagcatgtggatcttggagatatgcctacagtttgaaggatgtaaaggacttttattaatccttagtgcatagtttcttagatgtttaatgttgttgatatggaagtgggtttcttggctaagagaggagtgataacatcggagaaggaattgatgtaggacaaccctaagatggttgcctacactcaaagtaggtgggctagggttttgattttagagtataaggagaggaataaggaataaagtttatggtagaaaaaaaaaaaaaaaaaaaaatagagagagaagaaacgatgaagaaaaaatgagaaccttagagtctcactaagaccttctaggagtctcacttagaagaaaatcaatggaatctcaccattgaggattgcaacacttgcaatgaagaaaaacataatattattaatatcaatcaattcatttctttgatttacatcaatcagcccatttataggcttctctaagcaatccaaggtctattaggattctaataacctattatgaatctaatcctaattataacatccaaagtctactaggactctaataacctattatgactcaaattctaattatattataatttaattagctaatcctaatttgactccaacaaatagtaatcctaattcaattctaattaatattaattatacttaaagtttacttaggtcttccatcttccttgaatagtctttaaaaggctttccgccattaggttcattgcctattcctccttccctcatcctttttgatgctttttaataagaaaaagaatattatcagaggaagagaaacagtacaaggggactgaaaccatgtgaggtaggcatgcaacttgggttgaactaggacaacttgggtagttgaaaagcaagcaatgaacactaagaaacaaaaggaaagaataaaatggaactatggttgctaagaaggctttaaaccatccccatttcataaacaatgtctaagaaagacagcttcctaacaccttaggaattccttgagcaaagaaataggaattcagggaaataatgtttcagaacctgatcccgacactccaaaatttctttgatgtgctctgtttagaggcaagaataagcacaaaggggcattctctccatcctcctcttgcccatgaacttattatgccggtaatgagcatgttcttgactaagaaaggccaaacccaagcaactccaaagatggcaaacaatggagatcataagctatgtgcacaatcacaatgagtaagagtatgggttagccaatttgtccttttgtttgcacaagcaacacagacaacacaaggatactacctcttctcataaattgcagacaataagaatcttcacctacacaactttctaaataaagaaactgactttagaatgagcattttaattcacaccttgctggaatagtttgatgctaagactaatacttgttaacatctttaataatttgaaaaaaatggaatatgctgttattaatttgcattgatattggtgatattgatacttagagagttgaatccttagggtttgttggaaactgttcttaaaaacagtttttttgttctttatagcaaaaaaccatgttctaacttggaaaacatgtttgacaatttttttgatagaaatatttttttttgagaatttgttgtgaaaattgactgttttttagaacaaatttgaggtgttttcagctgttatttatagagtattcttagtaacacttgaaactattgagaatactttaggaacttttgcattatacataaatgcatactactctcatggagaataagttgggaaaactgtttttcatattggagtacccaaatagaattttgttcttgaaaataatcaagaactgttcacaaaaattgttttttgagaactgttttcacaaatgttgccaaacaagttctttagttttggattcaaatggtgtgaggattgatgtgcatgatgccatcttatttatttatttatttttatttttgttttttaaaatggtaatagccacaaaattctctccttggcctgtcaaccatgaatattgaaaatacctgaataactatgaaaatagaactgccccgtgtttgtgtgtgtgcccaatctttttctgtgatgtgcttttcaatgttgatctatttgcctatataaaataaaaaagaaaagaaaagaaaagaatggtaaatacactatgaaagtagaattgagttataactttacataataagccgaaaagtctagtagaatttgatttactgattttaacaattttaaattataacattcttattttacctgtggcatcttattttacctggaattctggatgtttcctagtattttagttctgcacttaggagcttgctttttaagttctatttactttcactgtaatccattcagaagttactatcctttgtcttctcttgcaaatgctgataataagagtcgaattttcatgtatttaaagcaaattcatgcaattttacgtcttcaaagtgcaggcaaattgtgctgtttgcaaagcag

SEQ ID NO: 10385 - DNA, 4323 bp, Vitis vinifera
  Intron number 8 from transcript GSVIVT01036544001 (locus G SVIVG01036544001) derived from phytozome v7.0 (chr-ID chr1 4; pos 23262481 to 23266803 reverse strand)
cttccatcaaccccacaggtatgcatctgggagaatactatctactgtatatgactatcataattgacaaatacaatattagcaattttagtttattatggttgctgttttgatagcctgtaaagaaactgtacctatgtttatttgtgaggaaatatgtggttctaattttgttttcctgatggtttcttatctgtaatgttcttacctaccaaaataatcattgaaatctgataagattcagatactaaatttggcaattgtaaaatactgagtcataagctcagaaggcaattgtaccatttcctcaatattttctgtttaaccaaaatggtattgtttaagaattaattatttcaatgtgattaagaatctgaaaaaatgccagaggttaggaccttatccaaacaacctcccttgttgtttcaagaacctgcttggctggaccatttctgagcaagggcctgggggggggggtggaattaaggatgtaatcaatactgctcattgacaattgtatcgggggttggaactaaatgacaattgttaaaagaattaggaataggagaagagaaaaataataaacagaaggagtaactgcatccctataatgaccctaatactcaaattacaataataatacactcacaaataatctcttcctcaagctatgtcataaaaaacttcaatacctagcatggagtagaaagacaaaaacaatttttttgaaaacaaccttagtgaatatgtctctaagctagatctatcataagaagtaatcacatcacctctcatcactacttcccgaatgaaatgacaatccacctcaatatgtttagtgtgtttataaaacacaagatcacttgcaatatatgtagcaacttgattgatcggttgggctctcattgagggtggggatgttttttatatctccattttggcagatttttttgtttgagctgtggggatgggtgtatttatcttatataccgtgggtcgcaattttgtcttattatatgtactcttctttacttatcaaaaaaattatcaccaaacataaccataggcttctttgttccaacacctagttcttcagacttgtgacgtaactggttcaaacacaagaataatgggaagaggaagagcataaggcaaagacaagttgtgcatcaagggttgaccctttagggaagaaagaacattggatgggacacgattaatgagaaaacaagcaataagaacaacatccctccaaaaccctccaaaactattttggaacttgcctatgaaaaagtgaacaagtgaattccaaaaggtgtctattttttttctctgccactccattttgttttggaatgtaagagtgggatacttgatgaataattccattagaacatgggtgaaacgaggtaataaactccattaacttcactccctccaccaattgttttctttgctaaaagatcctaaaatgcaaaatgggaagggaagaatgtttcagaacaactaagagacttggggagggggcttggagcccatctttctctagatccctcaatgattgggaagtgggaagtgcggagaggtttcttccttgcttggattggatgagggtgaacaggggcgaggaagataggtgcattggacagagactaagaatgggaagtttattgtgaagttgctctatatggctttggagccggggacttcgatttcttttccttggaacaatatatggaaggtgtgggtgcatcctagagttagtttcttcgcttgggaggcgacttggggagaaactttaactttggatcaagtccagaaaagggggtggtctttggcgaacaaatttttttatttttttgtcatgttgaggaagaatccatagttcatcaacttgtccattgtgtaaagacaagagtcttgtgggagctattgtttgccctttttagggtgtcttgggtgttacctttgtcggttagagaaactcttctagggtggcataggccgtttgaggacaagaatcgtaggaagtgtggaaagcgggaccattatgtttgttttggatagtgtggaaggcgaaaaatagaattgcttttgagggggaagagctctctatccaaaggctaaaaagttcttttgtttcttgtctttggtgagaagcaaatgggtgcttagataatgttcctctaactcttttcagctttctagattggttgggccattggtgagggcaggctggttgtattccttttattttgtaacttggttttattgtggtagaggctggtggtagctgtatactttttgtataccttgggctgcttttttggcagccctttctaatatattttcctatttatctatcaaaaagaaagaaagaaaaaatttccttccaaataaaagattaataggcagttaggaatagagcaaacagttcctttttccaatactcgggatttattaccattagcaaggataatcaatgaatgtgtggaaaaattagaaaagtcagaaaaaaaataaaaatggaagacttatcagttctatgagaagaggcttcctaatttatgatccaaggagatgaatgagagacacaagaaaataaaacagtgctagtggctgacttattggctgaagactttggttgagaagatgatcatattcttcttgtataatcatgattggatttccaatattgctgaatgaggaaccataggttcaaatgagttctccactttgtcacatatcactcaacttgcataggtttgtcaaaacttatttcaacatttctttgacacataattagtcttaccacaatgtacataatagttatttcctcgacctctaccatgtcctcccctcaaattttgacctctacctatagatccacctcttgcacaattagttgaagtaacaaaagttgtgggttctttgttttccataggggaggactccacagaagaacccagactaacacattgaaggcaagagtaggtactgcttagcaagtgttcactatgggggatataattattctagatttagaccagagataaactttgctattttgaattcttcttgttgtttataacagatcaatataattagtaataggatgatacacgttgaattcctcctagatagcttatagttgatcatagtactcactaagaggaatcccattttgtgtaccaaaaaaaaaccctacaaaactcacaaatccttgaaatattttgtttatctcgagtatacctttctcataaaacttccaaaatttatttggcagtgtcaaagaacataacagtagcagtgatactaggttccatgctattccatgatcaagttatggttattgggttcttcttcctatgtcattggtctttgtcctttgaatcatcataaggatcatcaaacaaaaattgtaactagttttttgccataggatatacttttacagctttaaaccaaagtagataattagacttattcaattttatggttgtaatttggataccaatattctcttaggtcaactaattttgattcccacagacaactaccatcagaagccatttgaaaaataaaacaataacttaaataacatggagaggaaagggcagcgttcaattgaaataaagtttgtagccactggacctactctgataccatgttaaaagaacaaagaataggcaaagagaatgtgctctctctctctctctcactcctttttggatccgaaaacaataaactgaagtagtaaacataaggcacctagtactcaaattacactcataccctcacagatgatctttaacgtcaattactatggagctctgaaaagtgtgttttcttctgcccaataacagggatcttgccataatctcctataggagtcatggcttccataaaatggcaaaccacactgccttaattgcttgctgtgcatgtacctattcttaattaagtataaacttttttctcttcatactcaaatcaaatccttggattagctatagccataaaaatcttactctggcctggcctctcttttatgttttttgaaaaaaaaaaaaaaggtattctactatcttcttattcttaattcttgtttactcattgtgttcagtaatttagtcatggttgttttgtggcttttgtgggaggtgtctctttgatttcttcattttttttttcctttttgtcatactaccacttcatcgctgtcctggatttagataacctaatttgcagttcacatttgttttcctatgttacacttaatctgtcctttatttcctatcacatcaggcactcttggagtct

SEQ ID NO: 10386 - DNA, 5322 bp, Vitis vinifera
  Intron number 9 from transcript GSVIVT01023486001 (locus G SVIVG01023486001) derived from phytozome v7.0 (chr-ID chr1 4; pos 11091186 to 11096507)
gttgggcacccagttgtattggaccatatagccaggtaataaaatgaacttttttcttataaattattaattcattaatttcttccttttctgcatgaatgacgtcccaaaggcaggctatgtaagctgatcatttctaaaatatgaatttgtgttcatattctttgacttattttttttttccttttacattcaatcccattggccacaatgctaataaagcattgttaaaagtcttagttgttttggaatttaatactactgtaacaaagggctcataatgtctttggctccaagggaggcatccctgggtgaggaagagaccaaggtggaggctaggtcctatcagttatgttattggttatgatattttgtccttctaggacaagtaggattacaattgatagattggcatcttgggatgaacaaaacacaaaatctcacaattgtataaataattaaaaattcatatttatgaaatcaataaaagccagttgaccacatataatatgataagaagtgcactaaatgtgcaaccacatgggctttatagtataagatcccaagtcatcacaaaaatacgtgatattatctcattggagtcaactatccatataaaaatatgggatgattatgctatagggtgtgtgtgtatgtatatatatgtatatataaaattggtttaaaggatatcaaattttaaaatttagtggtaagtccatgatagatggaaagacaaagctaacttttttgtcttttctttattttttctaataataaaataataataataataataataataataataataatttcttttatttttaaaacttcttttattattagaatgatcataagtgtttgtttgtccttttctctatttgctcttattattattattattattattattagaataatagtaataacaattcttcgatggaactcatattttaagtaaatacatgaataaaacataatattaataatataaatagtaaattaataacaacataaaattaatagtattaataattattattatataagcaatattaatagtataaataccaaagtgaataaataaattaatcataatatttagtaataataaaaatattaatagcttcataaaaatagtaaaaataatgagagaaatggtagaaaaagacaaaaaggtcatataggcatttttgagtggtctaatggtcaaatatccttcacaacaaatttattataattgaaaggttgtgtgggatagaatgtgaaaattttgtagtctttagcctatttatttagattatatgacccaaaaaactaattttccctaaaaatatgcaaatcatctattccttctattataggctgttggatactgacacttgttgggcagagcgtaatttgacttatgactagaacatgtggttcatttgccaaaatcatgctcaagtccaaagatggatagcatagtccaagcaaacatgtttaaaatctttactggactataatcagccagcatagtagcaaataaatgtaattactaagactaatgcctgaaatcaatgagggattagctcaaggagcactaaaaaagttgctaacagcagtggggcccctgtgggcaatgagaagcttaaaaaatgatgtccatttctttgaaaaaatccactatagtaatgccaataaaaatagaaaatgggaggtccacaagtcctggttccatagagggaagaatggcaggggccttgccgtatgaagcttcttttagataaaaaaaaacaagcaggattgcggagctgtgaatctgcttatgatatcagaaagttataaatattaatacaaaactgatatcttgaaataaatcctgttccttgcttgtgtctagtgtttccttttctctttcacatttttgcaaaccctgtaaaaccactataatgattctataatgggattctgaaacaaatcatgatatattttaaatgtagagattctaaactcaagcccttgttggatatgaattgtaaaagttctcttacacaggagttttctaaataaaagaaaaataaaatagaaattgaaccaaagtaggaatgctaaagaagttcgtactgcttccatcttaactcaaattttgtcgattcaatcttccatcttttggagttatatgctttgtcttttatgtctgctttttctaatacacctatatcatggtggcatttactacatatatttcccccctcttatgatccagtaatgtgtacatacctgtttggaggcaactatatatgctccctgatgacagaaaggtagattccaccctcaacactcttacatgctgatgaaagaatgatggatccccccctgcagctaaaattcctgctctggccctttcattctgttgtctgtctcatatctcagacctaggttgaacctaggctctaataccagttattaagggtcaagggaagctttatcacccactttttgggtagagtgaaatatgattggcatgcatattaaggttcaacataaataaataaataaataaaataagaaataaataattgaacatacaggagagaaaataatatctcttattagcggagttgatgtaggcagtcaacgctatggggcattatcaaggcttggctcaagtggtaaagggttcaaggaggttccaggttcaagtcccaaaggggacaaaaatttaccttttagaaaaaaagaaagaaaaaaatcattggattgatcatgcaacattcaattgtgagataacaggatggattcggatgcttacctttaagggctaggttcatagttgccagagtattatgagaattttgatgatcatatttaagtttctaactacctgatttgtggatgttcgcaaaccatctctttggtcattgacaagagaagtgttaatgtttttcaaatctttgacttaggatctacatgagggatgttctttataaggttttgttagaggatccttttgaagttctcctagagcccctctgaacagtatttgggaagttctatcctctttgagagaagacatttatatagaaggttgagaaaggatattccctacaagatttctttaagattaagatgacaattagtgacttaatactgtcattggtgttttccaagtaagatcaaacatgtgtcacaatctaattcacactttgacctttttagaagattggcttacaaaagatgatttgctcatgagatgagttcagttagcccttgaactcccaaactaagatcctccaattatcttacattcaattcaacagggaaaactaatagtaaattttaggatcttaagaccctatcttgccatgaatcttgataggtgttaagtatcatggtgtataaggatatatggattgctagttatatagcatatggtagacctcatttcatttcttaaatgatgcccaagggcgttaagccatcaatttgatccacatgtctaagctcttaggtaatgggacaacaatttataccaagctaacaccctcaatcagatagggtccattaccctctcatggagaagctaatcatagatcgctgatgaatagatgggaaataaacaaacaaaatgacccaaattcaggacccctagttaaagaaagctccattaccacattaagctatcaatttgatccaaaagcctgagtttttaggtaacaaaacaataatatacactaggtagccaccctccctcatgtgcaagctgttacttgcatgtggagacacaccacaaataatagataaacaaataaataaattgataaagagacttcatttgaagacctctagttaaccaaagcttttatactatgttaagtcaccaatttgactcaaaagcttaaactcttaggtaataggctaataatgtacaccaagctaacaagtgggcctcactttaatagttttgctattaaattgtatgttcatctttgttagagcatcatatgcataatggacccaaatcctaacagcttaaccttttaggccaattagttgctcaacatagtattagagctctagttaactcccatctctttatctgcctacctgtctatccctcagtctgtttatttgtgatcacaagtatgtgatttgtatacctgtctatctatctctccatgtgcaggtatgtagctgcatgtgagaagggtgttagagcatgatttgcatagtgggcccaaatcctgatagtttaatcttttagaaaagttggtagcttaacaatctttatggtaagatcatttttatcttaccatgtgtggtttggtctgtaccatgtgttgattgttgctgccacgttctacttggtcagtgctgctttcagcttggtcaatgctgcattcttcatagttgatgccatgtgccacttggtcaccaccatgtgctgcttggtttctattatttattcttggtttctgccatgtatcccttagtttttgggtcatgtattactttgtaaattgttggctttgaatgtggatgtcaaaggcctgcttttcatttgttgtttttgaatgtggatttcaacatgtatgcattccaaagcattaacatttgcttcagatagattattcacaggacgcatctgttcctatcttttattagttattcactgtagtttaaaaatgcatcatccacctgatgctattatttaatggggctaagtattaaaagggaggtgctttgttgctataaaaatggggctaagttaataaaggaggctattgcttcatatctgggaaacaaaaggaacataggtaagcataacaaacctttggcaccttctaactgaattgcatctattaatacactttatgatggatgcctacaatgaccaaatgcctagaaagtttgtctagatgcctgccttctttattaacaatcttccctagaattaccacttgcatatattacaggttcactagcaagaggaagtccaatagagaatgcttctcttggtgccaaaggttagacattcattattaagtgtttcagggtttagaattatgaaagtcctgagctccctgagttctgatattcagaagataagtgtgtttttgtgatttactttaacaaccttcttgaagtaaccttgtaaggctcaaatgcagatgttatttccttgtttctgttcgttactgttaccctgcatataatatttacaatatggttttgtcattatatcctttagttccagtaaagccttttatttctttatttttatctttttatctttttcttttccaggcaaccttacacaaggggatacttcac

SEQ ID NO: 10387 - DNA, 4294 bp, Vitis vinifera
  Intron number 1 from transcript GSVIVT01029254001 (locus G SVIVG01029254001) derived from phytozome v7.0 (chr-ID chr1 1; pos 17959358 to 17963651)
ctgcttcccattctccggctctgtggtaatctgctttgtgcttgttctatgggttttttggtgttttctgtcacgattgtgatgtgaatttctggtttggtagctgtaagagatgggtttgacttagtctgttgatatgcccattggggttacttgtggtaaatgtggttttagtgaatgatcaataagttgggtgttattgggttgtgtttcttatggtttctttgtgaaatctaatctattgttgcagtgttgttgctatatttcctccatttggtgtttgttgagttagaaaagcatgttatagggttcttaggaatgcaacgaggttggaaataaagaagaaagggtatcaattgaatatgatgatgcgctagtgtgagaaagattgaattttttattagaataagcttacaccaaggatcaatgcaaggaaatacaagaaaggtcctttcaagtcaaggaggctaataatcctctgagaagtcctcctgagtcatagccccttccttgctacaaagtcattccttgaacatccaacctctaaagtgcatcttctctacttagtatgtcctccatttcttttttaattgtcaacgattgtaatcttcgaaagaaaatctccacttcatcaagctcccaatcattaaaccaccttgaaaaaaagggagctccaaccatccccgtccccaacttgcttccatgcctctgccacaagtttagaaaaggtttttccaatgtttgatccttgcctcaactcacaagtctttccaaaatctaacccttcttccattcccaactaaaaagcgagacctactttttatcccattcagttataatggctttccacacttccattccatatccatctctcacccctctcgaaaactaccccttttctcctctccaaatttcaccatcatgattcgtttccatgaggattccctttttgtatcaaatctccaattccacttaccaagcaatgccttgtctaggacaaaaaggttgtgaatttcgaggccctcatccttctttcccaagcgaactaagttccaattaactaaatgaggtcttttctctagtgtaccacctcaccataaaagtctctttgattcttttctagtcttgaaccgacctttgatgatgagtaaggacatgaagttaagcaaaagacttgataaagtgctttgattagagtaagtctcccacccttaaaaaggtattgcctcttccatagtgctaatcttttcctaaatctctcctgcaatgtatcccacaccttggaagatttataagaggctcccaaagaaagacctaaataggaagtgggtagcttccctattctacaacctaacacctaggctaattcttgtgcattagatactttccaaataggaataacctcgctcttatccaagttaatttttgggtcagaaatgacctcaaaccagataaacacctaacttaaatatctcaactaattatgattgacatcgcagaaaatcaaagtgccatcgacaaataaaagatgagacacttccattccttccttaccctttcatcccaccttaaatcttgaaatgaagcctccactcttagctctagtcaacatttgactgagagctttcatagccaagatgaacatataaggggattcgagatcaccctaccttaaacacctagaactctgaaagaaaccaaatggagttccattaatgaggattgaaaagcctgccatggaaatacatcattttatccatcttatccacctttgtccaaattgcattttagtcatgtcgtcattaagaatccccaattgacatgatcataagccttctcaatatccatctttcgaataagcctagaaatattattctttaatattgagtcattggcttcactagcaataagaattgcatctagaatttgtctaccttctataaagcatgctgataaactgaaaccacctttttcaccactttcttaagtttgtttgcttgcacattagctagcaacttatacgatccccgtacatgactaatgggtttgaagtcttttagatcttctacttcatcttttttttgggatcaacaacatgaaagtggtgtttaagcttttttcaaaagtgccttaagtgaaacactccctaaaagaacccatgatcttagacttgatgaaatcccaacaaaattgcctaatagccatagtaaaaccatatggctctaaagccttatccccaccaaaattggagagaatcgaaaacttcctcttgggaaaaaagcttctctaagcttctggaactatcattccctaacacttcaaaacataagctccttatgctcggtcttcaatctcctgtctcaaaagaagagaatgaaaagctctaaacactatccttaatttcgttaaccttggtcaaaataggaccattaactctcactttggtcatcaagtttcttatactttgtgcattggccattttgcagaaaaacctggtattcttatctccatctcttaaccaaatttctttagattttttgtcttcacgaagttttttccattaaaacccacttttgtactcctccaaggccacccttccggcctctgcctccttttaaccaagagaggagaaactctctttagagtcctaaaagctaataggagaaagaacctttgccttgttaaaagaaacatttccaaagactcctttattccaccccttaagatcctttttaagagcctttagcttcactgcaaggcaatgattgctagatccagcataacccatccactaacttcaaatgtgatctttgaacccatgagtcttaagccacatattctcaaatttgaacggtgttttgctctttttgatttctctgcccttaagaacaatgggacaatggtcagaaaaaggcttaggaagcataagttaagataggcccgaaaagtgctcctcccacacttatgaaactaagaaatggttcaacctcgaggatgattgagagttcaagccttcgccccaagtaaatagacctctagaaaaaggaaggtccctcaatctcaactcttctataaaatctaaaaagtgcctcatttctacagagagtcttagcaattccttctttcccttggaaatttgattgaattggaatccccacctaaacaccatggatcttcccacacgcctttggtagcccccaacttttcccttagttcctctttcttccccctcaaaattggttcatacactccagtgaacatctaaacaaagccatccttacaatttctaaaatggcaggagatggagaaccctttagactccatatccaacataacacttgtcccaaaaaaccaaaatgccacttgacacacctttggcttccacctaaattacctcctcatcatcattgagtgagggaatgatgatgagttttgcgaagttggaactttaaaggtgacatataaacacacacacatcaacaatgcatacatgtatgaccagttggagctaggaactaaaaagttttagttaaacttcaataagtttattttgtggattttatgatcttatatattgaaacatattgtttgaagttaaatttgtcaaaattctagtgttgcatgtttccatatgcatgatattgatgaatgcttatgttttgactcttttaatcttactgcttttagcaaatttggttatatattgctctctacttcattgttccaatatatgtataattgatatgtgtatgtgtatattttttcctatttattttgcattatgtaaaaagaaacttattgtatgagatacaatatattacacaatacagaaaaatagaaaaacaatgcaggatatcatttataggaaaaaactatgcttgtgatggtttgatttgctagagttccataaagcaaaactagacaaaagcatttgtttgggcttgtaaggacactctttcaagttagtgaaaattttctccttttctttgagttgtaattttacaagtgagattgatattctagacatggctaccacttgatggatattttaaaataatttttttaatattttaactggtgccacaaactttgttcctatactcgtagcaaaatttactatttatttttcattgcaaaggtgaatcaaattttatggcttgcttgttgtcctatcacatcattctattacttgtgcttgctgttgattcacataatttgttataatgctagcttacatgcttcattttcctcataatcaggattccattaacatttgaaggtgatttggcttata

SEQ ID NO: 10388 - DNA, 15406 bp, Vitis vinifera
  Intron number 8 from transcript GSVIVT01009836001 (locus G SVIVG01009836001) derived from phytozome v7.0 (chr-ID chr1 8; pos 11660922 to 11676327)
tctgaatcacagggtttcctaaacatcttgagtgggtttgtccctttctttcgcacttttggtagctttgtcagttgtacttttgttgattgtactaaaaaactttgtaaatgtttctcaacaaggaggtaggaagtgttttgcactttcataaattagctgatactttggcaatcttgtgaatttacatgttactaacaagaagtttaggcctgctacttaaatattcagattaattgagcttcagttggatcttgtccttcatgcagtaacatccctgaatccatgtttttgctgctcaatagcccattttatggacatattgtttcttgattgcccaccatttggcacagttaagcgtagggagtttccttgtagctatatcttacaaaattttcattttatttttatagatatccagggatcaacaattttctgatacacttcctcatgtcatccatcctattctagttctaccatcaaagcttgttatgtcaacttactctattttcaatgttaaattgtgacacttacttttgtcatgggttctttttcccttcttatttatagtttcttagttctaataaatgtcaaggacttaaattcttaatttgctcaaacaaaaactagtctgcttctaaagtctttacgatatagttggctgtagtggaaacctgttagatttgggggaatttagaggagtaggggaggatttttccatcatttgggctgtcataaagtctctagaacagcatgagcattttttttgttcttttctccttttagggaagacaaaagtatgggtaacaagggaatcagatgagaacaggaagaaaaatagaaattagatgagaaaatactagagagtgtgaagagagaaaagagttgcaaattctctaaataattttgaataatagtaataaccgtctttttctattactgtaatgaactctatttatatataagcaattcacgaagcctaaaggaaatatgataatagttgattgaaataggaaaagtatagtgataagaaatagaaattaatccgaagtttatgattggaattctaattatgacgtaaacaaaaattaatccccttcgactacacctataataaacttgaaataggcagtcttgatcctcattgattttaagatggaggagatgagttattctaatggatgccttttggtttgtatatgtctattgacttgtaaatgaaagatatgtgacatctcaagccaaggaatctgattagtcttgaggtttatgtcatgatagggcatgaaacaatatgagaattggtagtggcgtctaaactagtctggtcgtagaagtgacaaaattagtcagagtaagcagttataggtgtagagaatgtttttagtaattgagtctagcagctctagcatacagtgtcattctattatggtagggattgcacaaacttcatgttgtacaccttgcaccctaaccttagaataagagcctatgtatttacaagaaggtgatgacagtgaatgcacctctaaactccttgtttcgtttaggagatggtgttgaagaagaattggcaattgatgacacgtacaaaaatattatgcactggattttatccattatgatagatgcaataagtgggagcataagtacattttttatatttaaaattcttttaggttgtccttcaatatatgactttgccatcacccattatggtagagaaaactgatgtggaatagtacaaacaattcttttgaggtagagagaaatatgggtacctaaaaggagaaaagaaaagaagatagatgggaaaaaaagaagaagagaaattagatgcaaaatataagagagcaggaagagaaagaaaaatagcaaaatttttgaatcacaattgtaacatgaagagtttggtggacttaaatcatcacattggaatttatgtggacataataagtgatatatgtcgactcttggaaaaccacatagttgagtcttacaacataaaataaaataaaatcaaaaagatgattagaaaattatgttctcttgattgcaaattcaagagagattttttgaaatcaagaaaactaattccttgaattaggtagatcaaatgttaagatgacctaactccatctgtaaatacatatgtttttctttagtacatggcctttgaaaaaaaagaaaagaaaaagagactctagaaatttcaatccataaaaagtttcacaagttacgaccaaaatttaaatgttcttcaataagccgagaagaatatcaagcactatactcaagacattaacattttttttaattttcttaggtgttctagagtacagaagggaattattgtgctcacaacaaatctccctttggatatacaaaaaagtacataagggaattattgcaagtttacttgacaacaagtccttgttgactttcaaatgaactactatttaggaacatgcgtgagccatctttggatcaaaatcaagtaagcagttggatcaaaggagatctatattcttttgcatacaccacaaagaattgtactagtactctttttattaaaattaatacattcaattttgttccctatttttcttgtccacttgataggttacatggcttgtgcatacaaatttcaaaaattgtatttaagacaacttatacagatatatattcctcatttgattttagaggtagattcttgtgccaatagaaaattttcttattgttttcttttcctttctttcaagggatattttccttcttttcttttttggcatcaaagaacgttttcatatcgatagaaaattttcttatttctagtattttttttcttgtaatttgagtttcctctttttgtaaattattattatttttatatatagggaggatgagagcttaggatgacttatgatacaccacaaatcctttatgagaagccttggatcctcgattgtattgttttggtgttagttgatcatatgctctaaatcacataccattgactagtgagttttacttaagggctcacaatttttttctatggaagtgatcaaactgttggtatccttgaatgagtcttattgcaagatcacgagctcacagagcaaaattgacttgtcaaagacatgattaaacaatattgaaataatacaatgtgattcaggatccaaggtttctcataaaggaattgtaatgcgtcataaactttcattttaagttctcatttttctcactctatatattaattaatggcatatagatagaggaactccaaataaaggaaggaaaataggaaaatttcttattgacacgagaacttcctttggcaccaaataaaaatagaaggaaaatctcttggaagaaaagaagagaaaattggaaatgagaaattttttattgacataagattttttttttgaaatcaaatgagaaaaaggaaaaagatgaaaagttgtcttgagtataattatggagatttgcacaaatcaattttgggtcctgtagatcaagtctataggaaaaataacaaacaaaatcgattgtattaatttcaatcaaaataatgtaggtcaaattttatgtagtggatatactttaatttgatcatgtatttgattgtagatatgtgttgttgaattagagttcactctacaaacaccaaatacatttgttctcaagtaaacatgtatagtatttccttttgctccctagaatgcctaaagagattaaaaaatgtttgtagtgttcttcggcttttgaggtggatgaagagtatcgatgttgttcttgatattcttccatagatttattgaagagtgtttgaagtatggtcctgaattgtaaatttcttttctagattaggacatttagactctcttcttcttatttttcgaaagcctgtgtactaaaagagaacacttgtatttctaggtggaattagggtattaatttggtatcctaaaattttatctctccgattctaggaatttgactcattgattttagaaatatgtatttcctttgtgaaatttgccatatatatatatatagatttgattattttttgacttagactttattttatttttttaaacttatttttttggtcttctcttgatgagtgtcaccttttatgattcacacaaattttgatgtggtgatttgggctcaccaaaattttgatatttacaacaataacaatagttctttccttaatgtctttagccttacttatatgagcaattcaagaagcctatataaaataaaatattaaaatgataataataaaattataaaactcctaataatgataaaattcttaatttaaataaaaataggaatcctaatttgatgtaaatcacagtcccttttatccttcttgtctaatgcttaaaataaccttgaaattagtagtcttcatctttgtaaaaaacacttatcaattgcaatatgatgttaagtctatttattgaatcttgctaaacccgtgctaaagtttaatgcttgtttggatacactttatgttttctgtttttaaaaaagggaaaatagtggtaacttctataaaaaaaaatatagtaactctttatataaaaagtataaacttattttatgtctttaaaaattacttttaaattttgaggtagtaaaagttttttaataccttttttttttattaagtagtttttaaaaactgtaatctttttaaggtaagtctcaaaaagttcttgcgttttatataaaaattaccattattttctatttttaagatagaaaacaagaagtgtatccaaacaacaccttactaagccacagtctagatcattaatccactcaatggtttgttatctcaaacacctaaaattactactcaaacctttaagaagcaaaacattcatattttgaaacaaaaaggagtttgagaaagaagggaggaactcaagcttaatgttggccttggtggttaaaaacatttctcaagagttgttagcatatgaaactacattactgcctcttgttagcatagaaatgagaattttcttggaaatagggtgataacatttgtatccctttgttggtgaataagtaataaagatacatttaagagcctaatgatcaagtttaccgtgattttgagcatgaatatggatgaaggcaacacattcgaacactttagatgagatcttgcaaactatgaaaattaggaaagagttgaggaaacatttactggggctatgtttcccaactctttagagggtaattaattgattgagtaggcaatggttaatattgctttcctctaattttatttaggcacatttttctcaaataagaaggcatgggttactttaagaagatgacaggttttgccttttgagactcttacaagatttcatttttaaaaaggttcaaccaagtgacacgagaacaatcattaataaaggacacaaactgacgaacttcatgcttgtatgtgtttgggtttgagtttgaatatatagattttgcaattcaagagtgtcaagtccccaagctcaaggactttaattatggtatcctaggagtactaatatcgtctccatagggaatcctatatggtggtattagacgtaatggaaatgaaatataactgctggtaagaagcactaaaaaaatggttatgaaggtaatgggtaaaaataagaaaataaaccaataaaaattaaaggaaagcaaacaacaagaatagagatctattgagatcaccactcccaacctaagtcctccaaggcactaaactagagcttatggctcaaggttcaggttgtggattcacaccaaaaggttcctactcagaaggaatgagaaccacctcaacaatgctttttagctccttgcaacccgttgttgcaaatgggtttcagttcaaccttgtaggtttgtgctttgctcaaggaaggccatttcaacaatgctcagacttgctccctaagttgctctcttttggttgttgcaactattgctgcaaacttttgctcccatgattgctttgctttggtccttgcaaccattgctatagcttagatccacttgggctttgcacacatttaaaccatcggagagctaagttgagatatggaagaatcttaacttcactcaccattggtgttgtaaaaactaactaaacatgctaaaaatggaaggcaagctggaaatgtaaagtttcaagaaagtaaaggtgcaaagaattgaaatttatggaaatttcaagtgcaagaaagctggaattaaaactgaactttgaaactaaaattaattggaaattaaaggtttattacagtggaaaattaaggaaagattacagaaaaggaattaaaattgaaactaaattaaactaaactaagttaatcttactcctattcctactcctaaaactaaaaatataaaaagacgaagataaggtaatagaagatcccgctctaccgcttatataccaaaattttccactcaaggtgagcaatcaaaaccagccaaatcaaggagagatgtcagctgccaacaactttccccaaatgttcttgctttaatcaacccatgcttttgcccatacccaaatgttgacgtggagtaggaatgcaatagtagtcactcttgttaggggcacagttaaggcgcaaaggtgtagggagcatggctcttgccatgtggcggctttgaaggggctcagaagtttgaaatttcgtcacacccaggtgtgcataggcttgcttatggacttgcttaggcttcctgaataaggttgtgtctgttgcccatgtgttgctcaaacatcttgcctagagctacctaagcaaggttgtggggggtgcctcgtgcactgtaagtttacttagagttcttaaggtgtttgctcacactttttaggatgtctacttagagctctctgagtaggaccgtgagaaggctcaaccaaggcaggtgtcacaagcacaaaattttccacatttctttcttgcccatgcaatgcttatatatatatatatatatatacacacacacacaactgtacaacttacacagttgtatattacaaatgtataccttctaccaaccataataatcttcaacactttccttcaagctggtgaatagatattatctattctcagcttgccaatgatagattgaaatgcggtagcactcaatcttttagttatctttttagttaacacatctgcaagttgaccctcagttgacataaatggggtacaaattagttcgctatctaatttctcttttataaaatgtttgtctacttctacatgcttggtgcgatcatgttggatagggttatgtgcaatatcaattgttgactttttattataatatagcttcataggtcctttccatgcaatctttagatgatcttccaaaattattttcaaccatagaagctcacaaactcctaatgccatagctctaaactcagcttctgcacttgaccttgcaactacagtcaacttcttgcttctccacattacaaggttacctctgaggaatgtacaatagccttaagtcgatcttctgtcaccaattaatctaacataacctgcatccgtgtatgctttcaatgtcaattcattacctcttttaaacaacacttcctttcttggagtaccttttaagtattgtagaattcgatgtgctacttgaagatgtacttttaggttgtgcataacttgactcaccactcctatagcacaagctatgtctggcctggtatgagaaagatagattagtttgtcaactaatctctaataggattttttatctaccttcacatcttcttaagcctcacaaagcttgtgattttgttcaatgggtgtctccactggtttacaccctagtttccttgtttcaattaataaatctagcacatatttctgttgggatatgaagatacaatgtcgacaatgagccacttcaatgccaaggaagtattttaacctaccaagttctttaagctcaaattcttgcaataaacaccttttcaatgcctccattccttgttagtcatctcctgttaccactatgtcatctacataaactaataaaattgtaactcctcttgaagtggaatgtataataaacaatgtgtgatgaccctgacattgtttgtaacccaaagttttcatttctctagtgaacctaccaaaccaagccttgggagtgttttaagccataaaatgcttttttcaacctgcacactttattcttctttgattcaaaccctgtaggaacctccatatagatttcttcatcaagatcaccatgtaaaaagacgttctttatgtcaaattgctgcaaacttcatccacgattagctgctaaagataatatgattcttataggattcaattttgcaactagaacaaatgttttaagataatctattccataagtttgagtataccccttagccactattcttgtcttgtaacgttcaagtgatccatctgctttatgtttcacagtgaagacccatttacatcccaataacttctttcttgcaggtagttccaccaagtcccatgttttgtttttctcaagtgcacccatctcaaccttcatagtttccttctgctctctaatactcaatgcttcagagacaatttttgggattgtaatagtgttgaggtggataagaaaacttttatgaccactagacaacttctcattggacataaagtgagacaatggacatgcaggctgttgagtacgctccttaacaccctttctaattgcttaagaagatcataatcatcaacaataggaacattactttcatgatattttaaattaggtgttacctcttgaagaaaaagaatatttcttttcttaacaaagatgaaaattattcacacaaccatacatgtttccttcttataggaaagtctaatgcacaaacttaggaaagaataactgctatctagctaataaccctaatttacaggattgactaaacaacataaatacaaaaatgcatgctacaactatcatatctctcaaatcccagttaattgaattgaatcttcaatttttcaacactccacctcaagttggtttgaaaatatcttccctagccagcttgccaacttaactgttaaattgctttccatgtagtccctttgtcagtatattagcaacttgttcagttgttggaatgtaccatcatgcaaatcaagccactgtcaagcttttctttgataaagtacttatccacttctacacgcttagttctgtcatgaagaactggattgtgtgatattgagatagttgctttattatcacagtaagctttcataggagatggactaggaatcttcaactcttcaaatatccttttgatccacattacctaacaaatcccatgtgcaagagacctaaattctacctcaaccttgcttttggccaccacatcttttttttttgctttgccttgtgaccagtttacctccaacaaaggtataataacttgatgttgatcttctatccataatatttcccgcccaatctgcatcagtatagacttcaacttgtaagtgggcatgttttctaaataataaccctcttcctggagtcctttttaagtatcttaaaatcctataaagaacattaaaatgttctggtcctggagagtgcataaactagctcaccatgctaactgcaaaggctatgttcgggcgtgtatgagacaagtagataaaccttcaaactagtctttggttttgttctatatttttcacatacttaggtctggcaccttgtaacttcaagttaggcttaatgggagttttagctactttgcaaccaagtaagcctgtctcaccaagcatatcaagtacatatttcctctgattaacaaagataccttccttagatcttggaaactccattccaaggaaatatttcaacgtacctaagtccttgatctcaaagtcttttgcaactcttttctcaagcctttctagttcgtcgatatcatcacttgtcagaatcatgtcatcaacataaacaattaaaattgcatttttcctttgagtgtttatagaacaaagtatggtcttcttgaactgaaaaccattgctggtcacagtttttccaaagcgttcaaaccgagctctcaaggactgcttaagcccatataaggactttcttaatctgtagactttgtcactcctaagtttcttctcaaagcttggtgattaactcatgaacacttctttttctaaatcgccattgagaaaggcatgttttacatccaattggagtaaactactaaggacaatagaactctaatagagtttatttttacaacaggagaaaacatttcttgatagtcaattccataagtctgtgtaaagccttttgccacaagccttgccttgtacctttctatgcttccatcagatttgaacttcatggtaaactcctatttgcagtccaccatttttttgtctcttggcaaattgacaatttcctatgtaccacttcttctagctcattcatctcttccataactgctaatttccaattcagatcactaagggcttcctgtatatttctcggaacaatcaagtgagagatcctagagataaaggctctatgattttttgacagtttcgtataagagatataattggtgataggatgcatagtacaggagtgggttcctttcgtaattgctatgggcacatctagatccaaaggtatggtattagaagaaatagatgaagaaataggacgattgaagtacttgaaatatttagataaccatctcccgaagtgtttgaatgatcctgtgctggtatgatagttgggtcttttgtttgatgatgaagtttccttctagtataaaactgaaacccaaaattcaaatgatttacattcttctatagtacttctccccatgtttgtgaaacatctatactaggcaaggacaaactaggattttgtatatttccagtatctggaatatttaattccttagtctaagtttttaaattattaggagaaggatactctagtaaaatagtattcggtaaagtgacaaaaatatcctaaaaattatcttctactccttgattctccccttgaagaatttttttgtgaaagtaaggttgattttctaaaaaagaaacatcaatattgacatgaaattttctggtttgtggattataacacttgtatcatatttggtttagagcatagcccacaaaaacacatttttcagcccaagggataggcttagattgaaatttactaggtatgtgaacaaaaacagtacaaccaaaggcctttagaggcaaatcagagtatattcgtgtcaggaaattttttttttaaaacacctgagaagtgtcatgtactttcaaacacaagtcgacatcctgttaatcaaatagcaagcggttaaaacaaatcaccccattaatattttggaacattcatataaaacattatggcacgtgctactttgagtaaatttttgtttttatgctcaacaataccattttgttgaggggtatctcgacatgtagattgatactgaattcctttttctttcaaaaaatttcccaagagctcattaaaatactttgctccattactagaatgaaggatacatatttttcttgaaattggttttcaaccatggtgtaaaaatctttaaataatttctcaacttcagattttcactcatcaaatatatctagcacaaacgagtgtaatcatcaatacacgtcataatccattttttttctagtactagtagtaacccaagatggtccctaaacatcactaagtattagataaaatggtttggtggcaaaataaggtttggataaatatgtagcatgctggctctttgataaataacaactttcacaatgaaaaaatgaacaatcaatatttttaaataaaaaaggaagtaagtgtttaaaataaggaaaactaggatgtcctagtctacaatgccacaacattatttgttcacaaacataatttgaacttgtactattaaaagccttgagcttttttattactagaggaaagttcatcaaaagagtaaaccccttcgatcattctagcattggcaatcctcctcctcgagctctggtcctgaaattcacaatgagattcaaagaaggtgacatgacaattaacatctttggataatttactcatagacaaaagattacaagcaagttttgggacgtgaagaatagatttaagaattatattcttagaaatttttattagcccttttcctacaataggtgagaaactaccattgacaatacaaattttttcactactcgaacaaggtgagtaagaactaaaaagattagaaaaacttgtcatatggttagatgctctagaatctatgatctagggagcagaatttgaacaggatagggtattagaattaatacatgtttgtgccaaagaaacactaagaatactagataagggattagattttagtagttttagaaggtgatccatcagctctttgctgaagggtccaaagtttgcttcattggctaatggagttacatgagaaatcctctatttcggtttgatgtttttccaatttgcaggcttgccatgaattttccaggatgtttctcgagtatggcgtggctgattacagtgatcacaccaaacccgaggcttctcatccatcctgtgcttataattgttggccttgttggcagtagcatctgcagtagccaaagcagaattttcaaatggctcatcaatagtcttttttcctaacatgacaagtttatgactttcctctctccgaacttcagaaaaaactgcactgatagagggaagaggagatctaccaataattttgcccctcacttcatcaaacttgacattgagtccagcaagaaacttttaaatccgatcgtcctccactgttttcttgtggtgattgtaatcttctagggatttccattcataatcattgtataaatccaggtcttgctacaacctttttagtgagttaaaatacttggtgacagagtccttaccctgttgaatttctccaagttttagtttcaactcaaaaatttgagactgatttcccaaatcagagtacatttggttaatgttatcccataattctttggctgtgggataacacatataattggagctaatgtcttcatccatggaattaacaagccacatcataaccatggagttctcagtatcctaggtagcacaagttagatcctcttttcttggtgccttcttgtttctggtcaggtagtctatcctcccttgccctcgtatatacatactggggtgttgatgacgtcatttgttgatgttggattagagacttgctgattggtagattctgaaacctcagacattttttaggcagaagtggaagaaaccaaataaaagttaaggattgcagcaatgcaggccacaacaagaaaatagagcaaaagttctgcccaaaaaccaaatttctccaagttttttttaaaaaaacaagtaatgaaggctgaaaaaattagaaacctgaaggagcttgatttggatctgataccatatggagaaaaattgtatttcttttcacatcttggaagtagataaccaatgaaatatatatacaatagcagaaaggaaagaaaaagaaagaaaaaagaagaaaagaaagaatagggaagaatccctacaaattagggattatatatatatagttgtacccacaactatataacttacacaactctatattacagttgtatatcttctaccaactataataattttcaatagatgttttaagtagaatgatgctcaaagtggaagatgtggtttgttagtgggctttatggtgggcagggataggattagagtttcctttttacaatttgcagatgacaccgttctcttctctaatgtctgtggatgacttgcaaaacttgaagttaattctgttgatatttgggcaaatttaagggttaaggattaatttagataaaagctctatctctggtatcaatacaagttaggattaggtctttagtttgtctttgatgctaggctataaagtttcaaagtgacctttatcttatctagatcttcctttaggagggaatctgttggcaagcagattttgggatctagtggttgatagcatttgaaggagaatggatgggtggaaaaaagctttttttcctttggggggaagaataactttaattagtcttgtttgtctcatatcccttgttattttttatcacttttcaagattctagcatcaatggtttcaaagattgtgaaattgcaaagggattttctgtggtcgaggatagaggagagtaaaaaagatcatctcattagttgggacatagtgtgtgggctaaaggagtcgggaggtttggggttagggtagactgttccacgaaattatgctctattagggaagtggctttggaggttccctaaggtaaggtctatcctttggcattaggttatttcaattatttatgggatacatcctaatggatgggatgagtgtccttagaagaccattgcacaagttttccaatatttttctccacatatccgttttgtggtgggcgatgaggaaaagatttgtttttgggaggctttgtggtggggaaattgaccttaatgttcacaacccaggagcatatgcaacatgatgaccgtctcttttagaggttttgggtgtttcgtgagaaacaagaccctatggcaaattgcttgcttcactttgcctttggatcgtgtggtgaatgaaaaatactaagatctttgaggaaaagtggaggatggtagagacactatgggatttacttcatttctattccttcttatgaggttcttgtactactgcttttaaaggcatccccctcaatgttattaaacttaattggtgtttggcttgtaattagattctgtataggtttccttgtatggaggaggagtttatgttacattttgattggattcttgtattttgtggggaggatccttcatcctcttactctttttatcaatatatgctattttatcgtttctgttgaaaaaaatgtgcatgcaaaattggtataatcattctttagggttgaagtgaagattttggtgtaatattttgaccgcttcttacctagaccttccctgtgttgggtttttggaattgcaattgtaacctaatttggtactgatggcatttcttcatcccttaagatgagatgtactaactgatatttgtcatattgttcataggtcgacaaaagatttatttaaatgtatactcaataattctgatctattattttctgtggcagtt

SEQ ID NO: 10389 - DNA, 4380 bp, Vitis vinifera
  Intron number 11 from transcript GSVIVT01001045001 (locus GSVIVG01001045001) derived from phytozome v7.0 (chr-ID chr 11; pos 6978439 to 6982818)
aggtaatgcttcacagttttgttggctgttactgttggtttcttctgacccatgggaaccttaaattcatcagcttgtatttcaccttttctgggtgccaattatttaagatgcattggacaaactccaggtccaaaatggacatatcttgttcataaagaggactacacatctttaattgtgcatgacatctaaattgtaagacctatttcttgcaactgcttttcagtagggtgacttttctctcccctttaattcaatttacaggttaagaccacctcatggctgaaactgttctatgtgatgttaaagaagtgatctcactgtattaaaatagtattggaaaaatgttgttttttcctaaagttgattttgcaatagattttgaaactatatttggtttttagctttagttacaattaccattttatttcataattacataataggcttaggctacatttgtatatgtctttagtcctttaagtgagattttttttttttttttcttggaaaaatatttgctttgctttggtttgttattcttttattttcttttcttttctttctttgtatttcttggaacagtttttcaaaggtcacagctattcttcatacaacttgttcaaagtgttttctttcaagcgaggtttatgttagttttctataacataataaggatatttttatttctttttagttaacaatggtttgtggtacaatgcaacattaatatctttcctgctgtttgcttttgtgatttgacatagggaaccagataaatcttggtttgcaattttgaaatgcttcctattccttggctcttgcactttctttatctgtgagcttttttgaatgaagtcttagagaatcatgtccaatttggaaaatacgacatcttttaatccaatacgaatggatacaatgcttgagagaaaaggttttctgataaagtaaagatttgttacagatttttcttttgacatcttagttcattcaatcttcagcagagagctacttttggtgttgcatttggtctctttggttaatacagtctgagcatgacaactacttaatctaaatataaatattgttaagtgactaattaacccaaaagcttaagctcgagggtacaggaccaccaatgatatcaggctgatttgggcaatgccccaacaccttgcctcacaagcaaccttctatgggcttggacataacttcaataaattatggtatagacatggataaagcttggaaacacatatcctcttgtaaaccaaggctctgatatcatgttaggttaccaattgactcaaaagcttacacttttagttaatgggccaacaatgtatatcaagctgatttggacaaaaggccagacatatatatctgttggaagtgcagtctttatcaaaggaaagattaaaagtacaagaaaaaggagtgatccttcacacagagagaaggaaaaacttgataaataacaaaataatagtattatccccttcctttagactttggtgaatagttccctacaaacactacaagcaattttagcttccccattggcaaagtaattggcctcttggttaccctccctggtttctagacaaataaaataaccatctatctagggagccaaagaatcctgctcatccagttattatatctccaaggacccatactcttggaggaggtgcaggaggtcacaactgaagagtctccttccacaaagaaactcctgaacacggtgggcgcatctgcaagaccccttgtaatgctaataattcaactccattggtcaatatattcctagttggttactgatcaaatatatatacttatattcctagtcagcttgtagaaggtctgaaaataaactcctttgtgattgctaaacttccccaaaatgtctgaaaaaaaccaataggattagcttgaggttttgcaaatattccagagaggctttagagaagaaaatggtgtcatctgcaaattatagtagagacactctaatcttgtccctacccacaatgaagcccttagttaaaccactttcctccgctctaatgatcatcctacttaggacatctagtgctatagtaaaaaggaaaggagaaagagggtctccttgtcttaaacctctagtggccttaacctaacctttagtatttccattaactaggattgcaaaacttgttgaagtcacttcccctgatccaagatctccattttgagctaaaacctttcctttctagcacatggtccaagaaacctcaatcaacatggtcataggccttttcaaaatcaattttgaagaccaccccttcctccctcggcctccttttctcatccaccacttcattggctatcaacatagcatccaaaatttgtctcccttcaacaaaggatccttgagatataaagattatttcatagagaactccacataaacactttgataagaccttagctattatcttatataaacttgtaaccaaattaataggattgaaatatgagattttaatggtttgactctttttcgacacaagaacaataaaagtggcattagtactttgatatattatcccattactgtggaactctagaagcgccctcataaggtcctcttcaatcacatctcaacactcttgatacattgcaatagtaaacccatcagggttaggggccatttccttgttaaactggaaaactgcaaggtgcacctcttcttcaaaaaagagacggttttaagggggttgcttggctcatcactttagacattttttatatgatgtgatagataggaattcaagtattaaaaaataaattaatgaaaggtggttctttgttgttagtagtaagtgcctgacaattgcaaaactctactgtgaagagcctttagctttaataccatgtggaaaaaaaatacattttgtatattgattttaaagatgaaccaattttcctaaaagcttaagcatgtaggatttggtctcatagtgtatatcatgtgttctgacaataagtatgtatatatatgtaaggtaaattgaaaatagggaatttattcctcataatcaattcataaaattttcatgaagatcagaaaagaaaaaaaaaattctcaaaagaataaaggcagaaaagaatgtgaaccttcctaaagtaaatcaattacaaatcagcgtgtaataaaattaatttgacttcctatatgaatggtattcttaacaaacttgccaacacaaagaaagcaatggtttaccagagaccatcttctttgcagctggtccaacatcaaaacctttccccaaaaagcttcccaagcaaagaaacctgcgttggtcaggaccatcaggttccaaatagcttttgtagggaaagtgtagataatcatgagtttttatcttatctattagttagtattttatctgctaggcattcaaaataaataaggtcagccgaatatgacctgcagttaggattaagactcttttattatgttgttttggattattctttggagttatttgtatccctagtttttaggagaagtccttgctgatcagttagagcaagagtctatttatttcccttgttttccacaagttaaataaaataaaaaagtctatgcattaaagactttagaaagcaactgctctttcctgccctagaaaagagtagaaggatttaacaataaatttccccttcttagcatccatccattccagcctatcgtcttcattccttctcacctacctggcataaaactcctaattgaactcagtttagaaactcaaataacacagatattcttaaaaggtaaacagtccactagaaataaaaagaaacttacggtgaagagacaatttccttttctttcttttattttttcttctttattttttatttttttatcagtagcaagtagatactctaaactgtgaaccagactcaacagaatctcaactaggaatagcccaaaatcaaattactactgatgctgaataatctctcataataacatgcataaaatttctgagatatttctacatggaataaaatagtctagtttgaagaatcctaaactaacccaattttcctcttcattgttagcatgctgtgcttcacatttctattgcagcaaattttcaaatttccaatatgaaatccatggcatttctagcatgaatagttaggccacaccttcctgtgaattttgggccaaggctctgctgatggtgactgaaattttctttgatagaagaaaacatgtttcctcattggctctactggattaaagccggcagtaaatttatataattaattgacttttcagttaaatctattggtggcaactaaagtgggtgaaga

SEQ ID NO: 10390 - DNA, 10453 bp, Vitis vinifera
  Intron number 2 from transcript GSVIVT01036583001 (locus G SVIVG01036583001) derived from phytozome v7.0 (chr-ID chr1 3; pos 18586933 to 18597385)
gaccatcgagtctcttttcttcctcttttgacaaggtacactgtaaagcttttttcccctttcatgcatatcttgctttcatttctctgacatttgttgatttttttatgttatttgtgactgttggaacctcatattctttaatgaacgcatttatggagtttgttgatgtttatatattaattctttttttgcattagtgttgttacaattggttaaaataatggtgagaccctggtattcatggttcttatttggatgtttacctcttcaattatcatgattcaaaggaagaaaagattcttcacctttgatcaattgaagcctaatcaagaaggaattggtaccactttgatcaatttgtaaccttaagctctttcttcctattcctttttggccttcactaggagagaaaatgttctcaaaattacttaaaagaatttaggagtccagaaatttactgcctgatcattttctagaggaatatatatggaggctggagaggagatcctaattgtcacaaaaatccccaactccaatagatttaggattcttggttgtatcatatgttcataaaccccttcaaaagcctattaattttaccactataaaattagaatcacactgaattacaacgcaataccaaattcttgcggagaagtccctctctaacccaatatctataagcagaggtaggtatggggaaaaatctaccatcaacccattatgtcttatatctatcagcagagctcggtatgaagaaaaatttactgccaacctcttatatcttatgtttattgagtacctaattcaataacttcattgccaaacaacaatcttttgagaaaccaagattccaaaataatttctataacatgcttttaataaaatcatttttgctactgaggttcaccaggcttgaatttattttgtcaaattccataaattacctcaagggattatttatctttctttaacagaatgtgatttccttattgagggtatgcattctcacaatcaatcatattgacctcccaagttatcaagatatttaacatgtaaaatctccttctttggtaaaccaaagtaatttaacttgagaattttagtttacaaacgtcttaggattgagagccttaagtagatataagggctatatcaatgagtgtaatttcttagatattttcccatagtagtctaggtaatatactaatgcactactcagatgatcaaagtagattgccctatcagccataagtcaacatgttacgactttttagataaagtagctagctttattattagatgtttaagtcataagaaaacgatgatttagatctcctgtgtatgagtctgcagtataatttttacgctttggcatgtctcatggaaacatattttgcccaaaatgtgaaactcaataaatgtcatttaccaaacaagaaggtatgtcaggcagtttgctttcctggcatgaaatcttaatattttcttaattataataaggtgctgttggtcttgaaaaatgttattttaaaaaagctacatgaatatgctgtttccataatgagaatgggagagcaactgaattatgaaaacattagtatatgttgcattctaaaattatttcaataaatgcaaaactttccttgactcccctgtaacatgttaatttgaagcaatgcttgtgaatattttatgaaacaacttttttttcagtgtatgtactctgttaagatctgccggtaaaaatgccggggtcttcccctggtggtaagtgctggtttggctttgatttgaagacctttgagattatcatagaagaccacaaaggaaaagtgcgtggaaagatctgtgaaagaggccccaagttctcttcatggattagatttggaggaaaaggcttatctctgttgctagaaggggttgaatcatgttgtgggctaaaggaaagaacccctttcagaaagttttggtcagaaggtgatagagtttacagtatggaactcagatgcaatagagcaggaagatttttgttctgcgttgtaagagatacggagaacaaaagattttccttggctttccctgaaggaagggggcttgttggaggctggaaaatgctggctagtaaactgagaagtatgggagttgcccccctccaatggagaggtgttttgctggataaagaattaccttcccaagtctctcccagcagcagcgtaggcagaggctcataccctcttcgggactgccccgtgcctcgagatgcagtctggctagaaattgagaaagaaactttggataggaatgaggagctactgggcaggtgtcttgtgggctcttgggtgggggacgctgatcgtcttcctgaccccgtttctttcgggtcatgggcgaagaactcatggttcttggaaggaaacctctggctttcaaacgtgagagaaaatctcatgctccttgagtttgaatttgaggacgaagcagaaagggtgtatagttcagggacaagacgtttcagaggaagaagcttctgcctagaaaaatggaagccatctgtgggatgtcttgagggagataatgaggatgcgcgccaggtgtgggttagaattttaggactccctctccatctctggggaagaagcctcttcaagcagttcggagactcctgtgggaggtacgtagctatggatgaaaacacaactgagcgtcggaacctcaagtgggccagagtcctagtcgaaaccagtggatggcaacacccaagctcgctgcaggtagtcgctggcacctcctgttatgctctgcaactatggtgggaagaagagccctgcctttcctctgtgatccccgcctgcaggtccggtgcttggaagattggggatgaagtggtggcccctgcacgcgctatggggagcgtggacccccagccaccttcctcagtcattctgcaacctgaaaagctgccttcgccgaccctagggactggtgcacctgctacagacatgatgggtgcagctgctccctcatctcctacccgcgctacggagacgggccagtatcccctttcccaagcccgcgttgaggaaacaggccagcttctggatgtcttggcccatttgagcctgacctgtggaagaccctttgggcctgggctagggaaggcccaggtcccaatctctttgggttcttctcttaaacccctcggcccaaccccctccaaagctttagggcaagaaagccctagctgctcgctgcgtcgaagtggagccccctctgcgactccttccttctcaaggactccccagaaggttgcatcgccacttttggatgcaccgacggcatcccttcccgtcgatgctagcaaaaccccccagatggaagcgtcatcccctgtggaatcgccgatgcatgcatttgagctttccctccccgtcaaagctcgtaagtcgacccaattggaagcgtcgcaccttgtggaagtgccgacatctgtgaaggagtttccccctcccgtcgaagctcgtattaaaaaaggtatgctttctcttcccccgatctccctgagaggggactcatcctcttcttcttctcctttctgggacacggggcttgagaggggaagggaacctggctctagtcctgtaatttcaatggcaagggacgtagaagtgacaccgaaccccctgtccatcatgcttagagatgggttgatagtgattttgtcttcaaccccgacctctgatctgggaaaaaacatggcaaatcagagagactcgtcggattaccccccgtgtgaagaaggatggtcagaagaggagctctccaaattattacattttagtaaagtcttgggaatgcctgttgaagggcatgaagtcgaaattctggagctgttttcgaaattgaagttgaggactggaagtaactctctcggcaagaggaggaagaagaaataatcctgttccacccaatttgaacgagagttaaaaagattggaatgctctgttagttataaggggacattagggatatccaaaagatctggtcagagctcctgggatttgattccagttgattaatgagaattaaaattctttgctggaacgttcgagggcttaatgattgtgataaaagaaaactgatcaagggagtggtgaggaatcagaaggctgatttggtttgtctcttggagacaaaggtgaaagatgtttttctacgcaattggtgaaaagtgtgggattaggaagatttcttaattgggcttcagtggacgcaaggggcacggcaggagggctccttctcatatgggataacagagtcttggagaatttggaggtagaaagtggggagtactccatctctgctcgttttagaaactgcagtgacggattctcttggatcttctctagtgtgtatgggccagtgataggtagcgaaaaggaagacttttgggaagagcttggagccatccgtggcctctgggaagacccttggtgcataggaggggattttaatgttgttagatatccagaggaaagaagaattgcccctagactcacagctgatatgaggagattttcagaggtgatcgaggagctggggctgaaggatatcccactggctggaggtcctttcacttggatacggggcttgaactctcaagctgcctctagattggaccgttttttaatctctgaccaatggaaggaccacttctcagccatatcacaatctgctctccctcgcctggtctctgaccacagccccattattctagaagctgggggtttctcttcaggcaaaagccccttccgctttcaaaatatgtggctgaaaattgatggtttcaaagacctagtaaaaagctggtggaatggatattcggtggaaggctatagcagccactgcatcgctgagaagctcaaagctcttaagaaggacctgaaaaaatggaacaaggaggtggtaggcaacgtctctttcaacagagcagaggccttctcccgcttgcagcagtgggaggccaaggagaatgagaacgctcttaatcctaaagatctagaggctaaaaatctggatcttgaggaatataagaaatgggcccttctagaagaaacttcttggagacagaagtcaagagaaatctggttaagagagggtgataaaaataccaagtatttccacaaaatggccaatgctagggcaaggaggaatttcctatccaaaattaaagtaaacggggtgaatctctcatccttggcagagataaaagaaggtgtttgcaatgcctaccaaacccttctctctgatcctggggattggaggcctagtataaatggccttaacttcaaggagttgggagaaggcttggccagcagcctagaagttatgttttctgaggaagaaattttcgcagccctaagcagtttctgtggagacaaagccccaggtccggacggcttcacaatggccttctggttattctgttgggacgttgttaaaccagaaattttaggcctctttagggagttctacctccatgggaccttccaaagaagcttaaactccacgttcctcttgctcattcctaagaaggaggggaccgaagatctaaaagatttcagaccaatcagcctggtagggagtgtgtacaaattgcttgccaaagtcctaaccaatagactgaaaacagtgatggggtaggtgatttctgattctcagcatgctttcgtccatgggaggcagattttggacgctgttcttattggtaacgaagcccttgattctagattgaaagacaacatcccgggtctccttctcaagatggacattgagaaggcctttgaccatgtcaattggaactttcttatggaggtgatgtccaagatgggatttgggcacagatggattaattggataaaatggtgttgctccacggcttccttctcgctccttatcaatggaagcccctcgagcttctttcgtagctctaggggactgagacagggcaaccctctatccccctatcttttccttttggccatggaagctcttagccaattgttgtcccgtgcaagaaatggaaactttatttccggtttcagagtgggaggaagaggaagtgaggggctgttcgtgtcccatctcttgtttgccgatgacaccttaattttttgtgatgctgatgcagatcagttgcaataccttagctggaccttcatgtggtttgaggcgatttcaggtttaaaagtcaatctgaataaaacagaggccatcccagtgggggaaggcattcctatggagactcttgcggcggtcttgggttgtaagatagggagcttacctacatcctacttgggtcttccccttggagccccctacaaatccattagggtgtgggatgcagtggaagaaagattcaggaaaaggttatctctctggaaaaagcaatacctctccaaaggtggctgtcttaccttgctaaaaagcaccctctcaagcctcccaacctactttctctctctctttgtgatccccaagagagtgtgcgcaaggcttgaaaagatccaaagggatttcttatggggcggtggagccttagagaataaacctcacttggtgagttggaaggttgtttgtgccgataaaaagaaaggtggcttgggcattcgtagtctagctactttaaacaaggcccttctggggaaatggttgtggagattcgctaatgagaatgagcccctatggaagcaaattatccttagtaagtatgatcttcaagagggaggatggtgctccaaagatgcaagaaaccggtatggggtgggggtctggaaggccatcagaaaaggttgggagaattttcgttctcattctcgcttcatcattggggacggcaccagagtgaagttttggaaggatttgtggtgtggaaatcaatctctggaggaagctttccccatcttgtttaacctctctgtcaacaaagaaggatgggttgctgaggcttgggaggaagacgaaggaggaggtagctgggggtttcgttttaacagacaccttaatgattgggaggtgggtgaagtcgaaagcttattaagcaagcttcatcccttaaccattagaagaggtgtggaggacttgctccggtggaaagagaacaagaatggaaccttttctgtcaagtccttttatagctcattctcaagggataccaaaccccccttcccggctagaactatttggacgccttgggttccaattagggttagtttctttggctgggaggcggcttggaataggttgctcaccatggaccgcctgaagagagttggttggagcatccccaacagatgctttttgtgtaaatataaggaggaaaccacagattaccttctactgttttgtgagaaagccagaatgttatggctcctaattttctctctgtttggggtgcaatgggtgatgcactccactgtgaaaaaacacctcctaggttggcatggttcctttgtgggcaagaaaaggaagaaagcttggagagctgcccccctttgcttgatgtggaccatttggagagaaagaaataggagagcattcgatgatatggagaggaacgatcaagacattaaatccatttttttgtacacttttgtgaattgggctagggtgtatatagaggaacacactttgtctttgatagattttgtagactggctagccaccaagtaagggtcatgtttgttttgtccctttgttttttgcttctttgtctttggtatactccgtgtatgccttttctctagcctctggctcttaatgaaatctatttacctatcaaaaaaaaaaaatattttatgaaacaactttatgttacatctgtaggaatttattgagaaagcagttgaaatttaggaaatttgcaatcacataattgaattttttttttctttttttgatgccacataattgaatttctttgatagaagaatgctaaaggaattttggaagtaaaatatagaaaatgggattaagcccatttttggggggcttttgagagaattcaaatattttgaattttcaattggttgggaggtgaggtgcttgaaagatcctttttaatttctagtagttttaagtggaatcttgagtttcttttggttgcttaaattggaattttggatcgtatttggtgttcaggcatccctgaattgcagcttgtgccaaggccgcaggagatctttgcaacttaggtgtgttttgtgccttttacaataaggatcgagctagtgatgttgttttgagctgctatggccccaatgtatgtgtgtattcgtcttgtcttagatatgagttttaggatgatttaggtgagtgttttttgttcttgcacccttgaatgatgtgtgatggaggttttaatgtcattacttactctaatgaggaatttggggcttgaggatttaaatataagtctgcaaggttaaggcaattttgctcatgaatgtggcctgtggattttcctcttaagaatgctgcttttgcttgatctaatatgcaatattagatcatcttgtaggacaagttttattattattatttttatttatttattgttatgttctttattagttgggaagaaatgttttctgaccttgtttaggaagtttctcccagcctagtgttggaacatagctctgttgtccttgagtctgatattttgaagtggggctttactccattatggtctgagaccatgcgtttgatgcttaattacaagggataggagggttataagttgatgtaaaagcttaaagaggtgaaataaagatgaaggatttgcaatttgaaatatttcttgtttggggatattcatgaaagaaaatgggtgattttggtgatatcaaggatctggatgctttgaaagtgataatggaagagatgatggcctcaaaaggtttatgaatgaattcatgtaaattctctttaaacatggaaattacttggtaggcaaaaagctaaagacaataggttaaaaatcaggttttgcaacttaaaaactttttcacagattgaccagtggtgggagtagtttacagaaccttgcagaatgagtgaaaatttaatttccatttattaatcacttttgatggagttacattggattttttttccacctctgttctgtgggcagaaaatagaactcctcatattgggatcatatttttgttaattagtgctagtgggaggagggcctctttgaggaggatatctaagaggttgtttacctgatgccatatgagttttttgtgactcttgactaggaaacactatcccatcagacagggcttttgttaaaggtagaagtgccatgaggcgtttttgtggctaactagattgtggaggagagaggttaaaaggttgggagtcatcttaaaattggatatccagcgatattgggaaaatgctttggattgaaatcgaaggagttggatcaaaaggtgtatttcatttgttatttttgtacttgtcattggtaaagccaagaggtgttgtatctagagggtttagacgaggatattcactttctcattttccatttgcatttgttaatgatagtcgttggagaatgatgagtggatgtaggttttagactcactggaggtccgagttggggaaaaatagggatatggtttcttatcttcagtttgcttacagtactatctgttttttgtgaggaaattgagattcatgatcttctatcacttgtaagaaattttcttaggtttagttttggtgagcttgtagggatcttcaggttaggctggatagagtgtgtaggcaaagatagaggatatcctgggtcctggaaatgtctacttgaggaacaaaacccaattggttagtggttttggagatatcctgggtcctggaaatgtctacttcatggcttgagttgtaaagaacaaatatggtttgtataaccatggttagggcatcaacttggttgttagacaacagccttggaaatatggtttataagatgtggttgttaggttgattctgcattatgaaacagatgtttttttttttttttttgtggtaatacctgttaactgataatagtgacaagcaatcttttacattttttgccttaaaagttatctagatgtcaaatgctggctagctttgtgatcttgtgcccattgattgctgcatgttttgaatgccttcaatctgacatcttcctatcataaaattattgcttcattttatggattactgtagaattatagtttatcaaggctcagatgagagaattacatgtttattttttcatttcattttattttattttaattatgattacacaattttcatttggaataataattaaatttttttcattgctataggtacaaaagagaagggaattgttggctgcagaatt

SEQ ID NO: 10391 - DNA, 22272 bp, Vitis vinifera
  Intron number 5 from transcript GSVIVT01001940001 (locus G SVIVG01001940001) derived from phytozome v7.0 (chr-ID chr1 3; pos 15050451 to 15072722)
aaaggctaaggaaacgaaaggtatgtattttcttctaaaatactatttcccctttatttctttaattcattttcttgaacattcctaagttctttctgaattgatgaaagaaattgaagccggtaagatataatccaaactgtcagttttctgttattttttttccttcccattgttaagttgataacaataacatatatgcattatgattcaataccaaattcgttttaaccagagatagctgttatacatgctaatttagcagacatttcatctaattaagtaccagcagttgaacgctttctgcaaactcaaacaattattcgaatctgtaggaggcatagagctcttgtttgcttgcttgttgttaaactctacagattctaaaagctttatgggatgatcatttgaatgaaatttgtaggattgatatgctaatttggtcatggctatttctcttgcaaacaatcaaaaacttttatatggttgggtagatagatggagggtaggaaagatgtttcttaaaattatttccttttcctgtttggtttggaaggaaataggaaatggaaagaatctggactcttgaaaaatttagtagatttttctgtttctcatttgaacattgtttccatagaaaggtgggttttcaatggaactttgttaggcccttaaggcctgactcaagtggtaaagggatggggagggtttgtgagaggctccgggttgaagtcccagtggggacaaatatttatctatcaaaaaaaaaaatgaagttttattagatctaatttccttaattttatacattcatgctacttgcatctgttgagaatgccttcatgctgacatttgtttgtgatatcagttaatggttcataaatgtcctttcaggtttcttttgcattttttattttattttgttaataggatattcttaaatgtgtttctctgttttattgctgtattatcttgttgcctgatttcttatgtcagtatcattcagattgttgctgtaaatgtgtagtcttctggttattggtttctgaactattactgtcaactatgaacatgcagacgataaacaacagagtttataatggtgaattagtggaactgtagaagcacctgttgttagacttagataattttgacatgaatccttttggaagctaaaatgtctattttgagttttgggagggattctcccttcttatctttgcagtctacacatgctaaatgaaatttttacccagtttaggtacaatccatcttttgaggcctgacatagatacaaagatttgagtcagttggatatctggtaacatgatctgtgatcttttgaattataaaaacccaatgccaactcaatctaaatgaatagtaaaatactcattaatgtgataatttgaagcaacaagaaccctagaagatgcctatagtaaaatatataaatgaaactcaaaacaaaaattataaaattgaccttggaatcaatgacatttgactagtttagggtctaatgggtttgatccaccacctccttttatttcctcccttccatgggtatatcagtttatcactgttcccatgcttttcattatctcattcttcagctttttccacggcttcatccatcatttgataaagaaccactgtgatttgcaattgtgcatctgatggacatataattgctatttggatgatagcaaactgcatttgatgggtaatttgatgtgtgcatatatatatatatatatatatttatttatttatttatatattctgctgtaggataattcttgtaagttctgacattagggccttctttttctttccacacaaaatcgatatcgcatgatggaaaaaatagcatgcgatggttgattaatatctaatgagcgtgtacgcccagtttacaggacaaatcttcaagaaatatgagcttctttattatgccttaagggtatgaatattgtatttctatttaatcaaaaggtaagatatatacttgaatagatgtaagttgttcatagacgattgccctctaactatagctaattttatttattagttgggttctaagtaggcttgtggcaatcgggttttttttgtcttttggcctttgatggcgggtgtataggttttgtatacttagagtcgctattttagcgtctcttttttattaatgaaattcatttacttatcataaaaaaaaaaaatacttgaatagatgtatgctatatcattttattgtgtgtagatagttgtatgcctgtagaaacctttcttaatgagaaaagaaacgaaaattggttacataataattatattaattaataaaattgcaggttgttgactgcatatgatttctttccatcagtcaatgagaaaggtgttcccataattgatcttcattactcacaatgcttttaatagtgccaaaagaggaaataaaattttaatgttgggaatacaggattagactatacttggtggtgtctccaacagatcagcattaggctttaattggcaaagaattttgcaaggccttagttagaaagtttttaattgtggtacatgcattactggtagaaattctttctcaattaggtatggcttcattactgatgtcaaattatccaaagagataaatctgcccctactttgggttatcctttgtacctcatcctaccatagttgtaaaagtggctggaggcctaggtgatggccctattgttttccaatgattctacttaggagcacaacttttggtcatatggatgaccaagttgacttgccaaaacttagaaattatgatggtctataagacatggaatgtaagaaaataacgtggaaattaacttagtttaacaattgtagcattattaggagccattaaatattgtttcattttcttacttttagtgattctgctggttttgaggatggatttaatcttagtgggtcactacattgattacaacatgtttaaaggcttttgtgggttttaaaagcctatagattatgtttatatgcagaatggagtgtcatttccagagaataaaagattaaaaaataaaataaaattggaaaagaccctctctctctctctctctctttctctgatgaggaaaatagaacattattctaaagaatggaagaagtttatttggacttggaataccatttggtggtgaatggaacaatttgaaggtaattttaaggttgtagaaggcatatgtaaagtagcaatatgctctctgaaacaacacattcactgctaactgtggaaaagttgagaagaaaatcttattattctaaacagcatctggttatatacaaaatggataagccctaggagtgttatctaaaactaagactatcataaaccaaatccctgtaaatcagtaaactaaatccctataaatcagggatcaaattccaaaaaattaggaattacattatctcccatatttaaacctatttacataaaatacaaagtcaaaaccccataagaaatgtgtttctccacactccccctcgagctggtgagtgaatatcatgcattgccttcttgtcaattattgcttgaaacacagtattgtttagacccgtggtaaacacatttgctagttgattggttgagggtctcgtacggtgtgcagatgagaccactccaatttttctttgataaagtgtttgtctacctcctcatttttgatctggtcatgttgcatgggattatgtgcaatattgattgttgatttgttgttgcagtagagttttagaggtgcttcacagttaatcttcagatcttctaaaattattttcagccattgtaattcacaaatcccaagtgccattgctctaagttttgccttgacgcttgaccttgctactacattctgctttttactcctccatgttactaggtttccaccaaggaatgtacaataacccaatattgagcatctatcaaccataaatcttgtataattaacatccgtataggcttcaagtgtcaaacttgttcctttcttgaatagaatctctttttctggcattcctttgagatagtgtagtattcagtgaactgtttggagatgttcttccttaggattgtgcctaaattgactcaccacactaacaacatttgaaatagtaggttttgtgtgtaacaagtagatcaattgacccactaatctttgatagtttcctgatccacactagcatcgttattattatcaccaagcttgtgattagtctcaataggcatgtttgctggtttacaagctaacttcctaatttccttcaacaaatctagtatgtactactgttgggatacaaaaattccctgttgtgaccgtgccaccttaatacccaagaagtacttcaataggcctagttctttaatttcaaactctttcatcaaccacttcctcaaattgtttctttccttctcatagtttccagtcataattatattgtccacataaactaacaaggccgtaattccccttgaagctgaatgtttgataaataaagtgtgatcaccttgactttgcgcatccattggtaatcatcaccttcgcaaatctcccaaaccaagtttgaggagattgtttcaaaccatgcaaaaccttgttaagcttacacattcatctaccttctagattcttgccaaatccagaaggaacttccatatagattttttcttcaagatcctcttgtaagaaagcattcttgacatgaaattgttgcaaattccactcaaagttggcagccaaggataacaacatccgaactgtattcatcttagctacgggtgtgaaggcctttaaataatctactccataagtttgggtatatcccttggcagcaagccttgctttatacctctcaattgatccatccgacttgtattttacagtaaaaacccacttacaacctgccggattctttccttttggcaactctactactcccatgttttatttttttctagtgcttccatctcaacactcatggcttgtctccactttttattatttaatggcttaggtagggttttaggaatagtaacagtgtttagttgggtaaggaaggctcgataggaatgtgacagtctatcataggatacaaactgagctaatgggtataaatggtgtttagtacaatcttgtgtacctttcgtgcgagcaatgggtagatcaagatcattattatcaatggtagcacaagaattatcaaaagaagattttggtaaagcattgacctcattttcagagattggtttcaacttttgtatttgcataggttcaacaacaaattcttttctccttgagtatacctgtagtggtccaataggattgtgagttgcactttccttagtcaataacatgggattagaagaggatgcttcgatagtgggcaaaacaagagggtgattgggactgactatgggcttggatgagggagattgtgaaatggagggcaagtcaagtaagaatgaatcgttgtccttatcttccatgaatgatgtctcctcctgaagataaggacgggtagaataatcctctctttcaacaaaggtcacattgacagaaacaaaaagtttcctagaagggggatggtaacatttataacccttttgtgttgaagaatatcctataaaaatgcatttaagagcacgtggatctaactttcccctgttatgatcatgaatgtggacaaatgagacacaaccaaagattctaggagtgagattattttgaggtattgacgtcgggaaaaaactaagaaaacacttgcataagactcttgaaccccaaaacttgagaaggtaacctattgatcaagtgggcggctgtaagcactacctccccccaatagtgtttaggaacatttttttgaaattagaaggcacgagtaacaacaagaagatggctattttttcttttggcaaccttgttttgttgggggtgtactaatgcaagatgactcatgaataatcccttctttcgcaaaacaaggggacaaaacctgattaaagtagtcttgggcattattagacctaaacttctttatgcttacaccaaattgagttttgatcatgttatgaaggtttggaaaggctctactcacataagatttctgtttaagaagaaagatccaagacacatgagtacaataatcaataaacacaacaaacaagctagcccctgaaatattaggaaccttagatggcccccaaacattaccatgaataagagaaaaaggaatagaggttcttttattgctaattggaaaagaagcacaatgatgctttgcaagttcacatactttacaatgaaagctctctacatccaattctttagcaatgaaggaaataaaactctgagtatattaaaggaagggtgtcctaaatggagatgataaagccaaattttgtccttatttgagatggagcttttagtcaagaatggcaaaggaaatttgttctcaatcctattttgatcacttggtacatcaagataataaagccccttttttccttagcaaatccaatcgtcttccctgaactttggtcctgaaaaacacaatgagaagggtaaaagactatacgataattcatatatttgttaatccgatgtatggacacaagattagttgaaagtttggaacatgaaagacattctctaatgtaagagacgaatttatatgaatttttccttgatcagctactgttgtcaaaaagccatctgctatggaaattttcttgttacttgggcaaggtgtgtaggagctgaatttcaaagcagagtggtcatatggtccatggcatctgaatcaatgacccaggaatttgaaagaggagagtttgagacattgaatgcatgagaaacaaacctcttacctgaaagtgctaaggagcaagcaccagagggtttttctgatgattctaacaatcttttcagcctctcaatatcctccttgaactctccatctattggggtctcattctcatcgtttggtggattgctattggtgaaatttgcctgtccttgaactttttgctgctgtccgctgttaggtctccatcccctattattattgttgaagtttagtgttcttccatgcaacttccagcacatatccttggtgtgcccaggtttcttgtagtaattgcaccacctgaatgaatctggtcgtttgtttgcagcattcagctgattttctgcaacaacattcttcatatttccggcatttgacaacatagctgagctttctaccataggtgtttcattcatcattacacctcttcttccttcctctgcccaaattatggaaatagtttcatttatgaacttgaacttgatcaaactccagatttagaccagcaaggaattcgaaaattcgttctttctcaacaaagcttttcaatatggcagcatcctcactatccttcatttgaatgcattgataatgatccatctcttaccacaaattttttaggagattgtcatattcagtcacaaattgctcaccttgtttggtggctgaaatctctgtcgttatctcaattatctctgctacatcacatatctttgagtaagtctgtctcaggtagcatcaaattcctttagccgtggacaaaaacatgaaagtgctactaatctcaggtagcatcaaattccaaagccatgacataatcatggagtcttcctcatcccaaatctgaaagttggaatcactttgctctggtcccgtacccaacaagtgattcatttttcttttccccttcaagaacgtcttcacaatttgtgaccactgcaaataattcttccaattcaatcaatatgtggtgtgaatgctttgaagctccccattggactgatttggcagcccttcaattggttgtactgcaggaatgttggtggcttcaaatgtcttggacatggtggattttttctttttcttttgaattgaaggagcaaagaactagaaactttgattgaataaggggcaaagaaccagaaactcggataaagaagactgctaggtcttaagaagaaaaccaggttaacaaaggacaaaggaatgtgaattctgggagcctaaggctttgatatcatatggaaaagttgagaagaaaatcttattattctaaacacaaaactcatctggttatataaaaaaaagataagccctaggagtgttatataaaactaaaactaccctaaaccaaatccctataaatcagtaaactaatccctatgaatcagggattaaatcacaaaaaatcaggaattacattgttcccagatttaaacctatttacataaaatacaaagtcaaaaccccgtaagaaacgtgtttctttgtcttcatggtcttcaagagcttgaggcaaggtgattcaagattctattggttcatagcggttctaggagaggaaaatgtcaattttgactctgctggccaacctcttgatctaattttttctgcatgttagtggtaagtatttgaaccattggggttagtactggagagaatggcatttgatgatatagtgagtgcaatggtggaagactggttggagaactaactacaacaaacttctaaagtaggcagcataatgtgtttatattcatttgagtttcaagtttgaacagtgaactggattgcatttctgatctggtcatatctcagtcttgctgcaataagtgatggctttagttaagaaaagttgtcctgacctaagtatatgacctttgtccttttttttttttatctctttttctgatgagcaatggtatgattttatgtacaagcaccaaagaaacaacaaaagaaggtgccaaggaaccaccaaaacgggagagcaaaaaacaagtctctcccttaatgaggacctaaccaatcaatgaaatcaattaaagacattgtgtcttcacctatggataactttataaaccaataaaaataaaacctatgtataactttataaagagattactaaggaaagaactctttagaaaatagacaaactactccttattctataatgacctatgattttgttggaatccaattattgtttcatggagtttatttgatttattcatgattttgtgcatatttaaattagttgactaaaaaagtaaggaagttgtttgatcaaaggctaaaaaatttattccgtaacaatttctatgtgtgggtcaaagtgtatataggaggagggtatacacatttgattgatttcatagattggctgggttgcggttgagggagggagtattttttgttccctattttttatttttgcttggtgctccttgtatatgaactatgtactcttgtgtgttttttggtgtttttattaacacaatctcttacttatccaaaaaaaagaaaggaagtaataatttaaaggatttgtaggaagaattttaggaataggttagttgtcttattctgttttcatttattgtacaagtttgaaagttgtatatatatatatttgtactaacttttcaatgagtgaatgagaagatttcttattttccaatgcatttttattttccaacatggtatcaaagctgaaaaaaggcttctggcaattttttcttcttcttggccttgattgcctattatatttgcaaccttctattgccatcaacccttatttatccctgccttagttttcttctaccaatggcggaagaaacttctgttggaatcttcttgaaccagcccaagacaaccacccattttgataatcccacacttaagattacaacaaagaagcttaataggcataactatcttgagtggtctcaatttgcaaaacttttccttaaaagtagagggaaaataggatatttacatggtaccattgagttaccaaaacaatttgatccatcttttgaatcatgggatgctgaaaattccatgataatgtcatgaatgctgtattcaatgcaaccagaaattggcaaaccttttttgtttctttcttcggctaaggaggtttgggatgctgtgtcacaaagatactcgaagaaatgagatgctactcagatctatgaactaatgaccctgatccatgtcaccgagcagaaaggtctctcaataacgacctactacaacacattgaaggtcttgtggcaagagttggatctctatcaacatattgaaatggaatccacagcaaatgcaacaaggctagctgagatgattaaacaagatcaaatcttttagtttttggctggattaaaaccacaattggatcaggtaagaggtcaaatacttggataatatcatcttccatctttacgtgaagtttattcctattgagcgcattgaagagtctagaaggactgtcatgatggaaccaactccataagaaaattcaacactcaatacaacttaggacaacaatccaagactttaaaaagggggagaaactgagactaaatggtgtgatcattggaataagccaagacacactagagagacttgttgaaaattgcatggaaagccacaatcaagggccaaggatagacacaagggcaacaatcagttcaaaaacaacaaaggatttcagtgtgagacaattaatgtactatcaatcaagacaccaagttcaacatcaaccttaaataccctccctttcacaacagaacaactagatttcttgtataagattatgggaaaatctgaggtttcctctttctccacttcttgttcttttgcacaatcaagtacttttgaaacaactcttggtactttagcccttgtattttttatttaggggcaactgatcttatgattgaagagtctaatgtttctctatcctacattccatgttttggtaaccaaaaagtataggttgctaatggatctttgactcccattagtggtagaggcaatgttttagtctctcataatatcactctttcatttgttttgcatatcccaaatatgtcttgtaacttattgtccatcagtaaattaacgaaatctcaaaattgttttgtaactttttttccaattcactgtgtgtttttggacctaactatggggaagatgattggaagtgctaaagagagagagggtctttattacttagttatcgaggagcaaggaaggattcaagttcatcaactaaaaggaaacacaagaaaagaaagtgaactctggttaatgcattagggcatttgagttttttctctttgaaaactttataccctaaattatatgtcaacttagatccttgtaaattccaatgtgaggtctgtgagttattgaaaaacaatcgtatttcttatcctttgagcgataaaataagtgaaattcctttttctctcatccgtattgatgtttaggggccattcacaagttccttgtcatttatgagcaaatggttcttaagttttattgatgactatactcgaaccacgtggatctatctcctaaaagaaaaatccggtactatcctcacccttaaatagttccataggcaaaattacaagttgtgaggttggataatggagaggaatatttaaaacaaacccttggaaattatttcttggggaataggattattcattaaacctcttgtgtaggtactcctcaacaaaatggggcagtcgaaaggaagaatcgacatttgttggaggtagctagagccctaatgtttgctagaaacgtttctaagttattttggggagatgtagtacttacaactggctaacttatcaatagaatgcccacaaaaaccttaaactccaagactccaatagacatcctaaaaaatacctacctcacataaattgccttggttctcttccccccaaagtctttggttgtactatatttatccgtttcccaaacaaaaatagatccaaacttgatcccaaagccactaagtgtaaatttttgggctattcttccacacaaaaagggtataagtgctattatccacctacacagaggaaatttgtctctatggatgttaggttttttgaaaatgttaggttttttgaaaaccagcctgattaccataaatgtaatctttaggggagaaaatattgtaggaaaattagttttggatgcttcctttatttggagtcatgctattgaacatggtgatgtagaggaggtggagaatgtatgaccagcagtggtagaaaatgctgatttagacttgatggttcactctaggaggccaagactaccaatgtaagaccaagacctgatctctctcacacacgaccaatcatcaactccaaaattaggtatatctaagccttctaatctctctcttcttaatcatagttttgatattgatcttgatattcctatggctatttggaaagatgttagaagttatactaaacatcctttgtcaagctttctatcctatcatagactttgccaccaatataaagcctttactgctcctttgtccttggattgatttcctaaaaatgtacaagaggctctaagtgatcctaggtggaaggaggctatatatgaggaaatgaaaaccttgtataagaatgaaacatgtgatattgttgatttgtccaaagaaaaaaattcagtgggatgtaagtgggtgctcactgtttaatacaaagctgattattcaattgagaggtataaagctaggttagtagcaaaggaatacacacaaacctatggaattgactactaaaaaacttttgcacccatgaaaaatatgaattccattagggctcttttatccttagcagcaaattttgattggcctctacaataatttgatataaaaaatgaatttttgcgttggaacttggaagaagtatttatggatttgccttttgcttttgaaggaaaaatttaacagtggaaaggtgtgtagattgaaaaaatcattgtatggtttgaagcagtctcctcaagcttggtttgagagattcactaagtctcttctcaaatttggccaatgtttttaaaggcgttagtgaggcgtctttagggtgctccttagagtgaagcattccaaaaatgcgttgaagcatttaaaaaaaactagactcagaaaaggcatgcgcctctagagtccaagtgtacctaaggtgcacttccagcttgccttcaatgcatcagagcatgaggcttaaaccttctacgtgttgtagaggtggctggaccaataaataaatccatttaaaagaaaaaaaaaatgatgtctttcaacctaaaacaacccatggagaatgaagtcttaggacactttaggggtgggggtgggggacgagacttaactttaactctgaccttattgtcgacgaccacatctcaagcttctcaaaaccattgaaaacggctcacttcagccaaggtagcttcaacatcttcactttgcctccaacaagatctctcactttcccttttgttttttattaacattaaaaacatgtttttataaaaatactcttgtttttttgttttttttttccctttttaatgatgaaaactctcaaattagataaaattaagataatagataattgatttttattttgccattttatatagatgaaattagataattgattttattttaaaattagatgattgattttattttaaaattagataattgataattgattttattttgcttagatcaaatttgacaattgataattgattttttcaaatagtaaaaaaaattagttaattgattatattttgttttttaaagcatttggttatcaccaaagccaaggagatcatgcccttttcatccaacaatcactagaaaaaaggattataacacttgttgtttatgtggatgacataatttgtcattggagatgatgtagaatcttaagggaaagttggcaaaagaattcgaaattaaagatcttggaaatctgagatattttcttggcattgaggtggcaagatcaaaaagggatccttgatttgctaaataaaattatgatgctaggatgcaaacctatgggtacacctattgatcaaaatcatcaattaggcgctatcgttgaaggaatactagtcggcaaagggaggtatcaaagaaagacttgttgggagattaatttatttgtcccacacaagatcaaatagagcatatgctgttagtatggtaagtcagtttatgcactcccccttagaatttcatatggatgcaattttaagaatcttgaggcatgtgaagtcaactccaggaaaaggtttattgttctcaaagaacaatcaccttagagttgatacttacatagatgcagattgggcaggttctatcattgaaaggagatctacttagggtactatagttttgtgcgaggcaacttggttacttagtgaagcaaaaagcaacaagtagttgctcaatctagtgctaaagttgagtttcaagctatgaaccttggcatttgtgaacccatgtgattaaagggtctgttgagggaactacaagtgaatcttgagaatcccatggaatcatattctgacgaatgctgcaataaacattgctcacaacccagtacgatatgatatgactaaatatgttgagattgatatcgtttcattaaggaaaagattgatagtgaattgatttgcactttgtttgttgcatccaaactacaactacctgatgtcttcacaaatggagttcaaaatcctacattcaactctatggttggcaagctgggaatggaagatttctttgaaccaacttgaggggcagcgttggagtccgataattgttcctaatttcatgaagttcatttgatttattcctgattttgtggatatttaaattaattgattgtgtaaattagggaagttgtaatttagaggatttataggaagaattttaggagtaggtaagatgttttattttgttttcatttattgtacaagtttaaaagttatatatatatatatttgtactaatttttcaacgagtaaataagaagatttcttttttttcaatagatttctctcttcccaaattatcccaaagatgcataaaggagcagctctctacactttcttatagattttagtgaaggaggatccatgccatcctaacaaagtctctctcacagtggctggcagcatccaaagaacatcaaacaaaagcaattgctaaagaacccttggcctttctttgtcttattagtgatattgttgacatattcagatcctacgtagtggatccaagggattataaccattcaatacctaatataatatttcatccgaagaataaaaaatagtaattggcttgatagaaaatcattaatacttaatttgactctgttacaatggcctgtgtagatataactcccactagctactagttggatttgtcaatttgtcaaggcatgaagaagtatgattgtgttagtgattctaatttggccctccttattatgagaccatctttgccattgtctacccaattgccttcaagcaataagagttttgtgctttaaaattgatattcaagctaagtgcatgttgtcacaattaaatagtaaatcttggcatgtttgtcatttgtcttttataggagttagtggcttgattggataggagaaaactaggttagtagtggcaagtggttcagtttggatggtatatatatatatatatatatatatagagagagagagagagagagagagagagagatccacttttagtattttaaaatgataagtataagaacgggcaatgcttcaaggatgtatgagaaatgttacaaagtaaccaagtgtcaagccttgctagggggaagaaatacaaataagagaaattcagcacactcaagggggaagcaagtcactaacaaaggacgctaaaggcataacttcttttttagctaactagtctacaacttggttggttgaacaaagaacctaagagagggaataacctaactcactgacaacatctaagatcttgcacattcaattgtcaaacttctatggatctctttccttattaatgacctaagatatgacagtagcagaatctctctctacagttaagttagagaggcctaaagcttttgcccatggcaatgtcaaaatctctacctcaatagtcaatcctacacttgcctacatagagaaagctctcaacacactatgtcaaaataatctctaattgagcccccaataccccatctaaccagggttacctaaagaacatccatcaaagttttaactttattaactttattgaacctagtggggtggggaaccaaccaatcataagtttcttcatcgacttgtttgagaagcaaacatttttccaatccaacactaaaagaaacaaaggaatatctataaaaggttttgtgattgaggctcgatgagaagaaaaaaagtagatcaagttccaaatagatggaatatattctctaaatttaattattaatgtgcttgttcatgctaaggagcattttaactaaggttgtaatttgggcagttgagtcgggtttgatgaccaacctaatcccaacctcaattaagaaataattaatccaagctcaacccaacctgatctttaacccaagatgctcaatttaagcacaatcccacctcatttttctaagtttaggttgagttggttgaattagacttagattggttggattgattgagttttatgattcaaaatccatcacaatgtttttttattttttattttttaaaaaagaaaattctatatatttgtactaaaatttaaatagtaaatggaaaattttttcagataataaaaagtaaatgtctttcttgaaaaaataaaatggtagatggaatatggaagtacttatggcagaaagggccaatttggtctttcacaataaagtgacaaaaggaactgccatgaattgacttgttaataaattgatagatcacttaagaatgacatatacatcacaagtcctggatcaagtaaagactttgagtttctagcaagtcattgctacatccatttcattaggaattaatgatcttgtaaaccataccttctaagggatggctagtcccctagaaggttataataattagatatctttgcttaaaaatctaaaaggaaaataaataaaatgaatgttattatatagaataatataaatcataaatgttataaaataattaactcagatttggtttagactttgggttgtccgatccgtggtccaagcccaacataaattgagtttggattgaaaaagcttcatcgaagcccaacccaactattaaaaatggttgtccaaacccatgtaaaagtgggttgggtttgggtcaacccactcaagttacacccctatcccatgtatatcatcttgcagagatgtaacagaaattgcttgtctgaggaatgatggggaataagttgaacatgggtacgtatcttagcttgcagggcactgatgtagctacctatacaagactgtttggattgtcttcttatgcagtaagctaattgttcaaattaaggttagtaatccttcatgattagactagatgaacggcttctttcttgtgctatggctttgattccccttgcccaagcctgcctccctccctcaaaccttccttcattcaatgcttgacaggaggctgcttgttctgtttggaaggtacagagggtaaggatggactgtgaacctcctccatttggttattgtaagtttaagtttggtggttgtgtgtaggaaactcgttacaaatgaggattggtcacattttaagaaaccaatatggtgaagttgttaagggtttctccaagctggtagggcttaggttagccattgaggctgagataatgacttgcttacttgtgttaatggcataaactgtagatcaactcttttttttagttggttgaaagaaagtgaaaaaatcaaagtgtctttttcttaaattttatttttaggagatataaggtatatcaatagagaggggaaaaggacaagcaaggaaggggggatccttctagaagcacaaaatggaaaaggaaaagcatagaaagcataaaaagcacaaatatcgttaaaaaaagataaagggccgataagctccatgagggtagagagaattgtttggttgtttgtagggggagggaaggtagaaagtttacttttctttgataaattgctgttgtaaaccaatttttcctttttctggaaagtttgatgtgaagtttgctttttcttttctttgcggaaaacagtctggaaaatgattcttggttgtagccaacttatgataagaggtagaattcttgtaattggtgctgcttgtgtaaacaaaaggagtcagcttaccatactctcatttgtctacagtgtgcataacatatggtttttttagtttttgttctttattttttattttaatttcccatttttgggagtttagttggctttgccttaggaacattctagttagctagcatgataggtttctttggcaagaggaaaaacttgatttggacaatggcctttttgtacttattcaggtgcttatggatgggacagattgaagaagttttgaagctttggattttttaatgcttgttctaaaaatttatctcctaaaatctttaatcattggattttttgaagattgggaatccatccttaaactttattgaaaagttggggagggtttaaggcttcatagcacttgtgattttatataattattactattatatttgcctccctagatttccaagggaaggaacaacccaattctctataagagggagcataaaatctccaacaaactgaagaaatgagcagttcccctttttgcaagtacattggattcctgtctagctaccatatgcttccaagcaaaggaatgacaaaatctctagaaagatcgatgcaactaatgatatgccatggatacccaagaaagaacaatcatagaattcccctacacagcaaggttggagacccccatcaagggaaaaaagatatcttggtaggcaacccacatgacacttgccaataaaaataacctctgtcataactcttaggcaacagggcaatgggggaaatgtggtgaatagatttccactctccatgtataaaaggccttctaagatttggagcaaatcattagcattaaccttgttattcatcactagccatgtgaagtctctaacttttgaaggattcttagatgtccaaataaacgtgatttgagggaaatgaatttaactagcacttacatagagggtggaaaagaagaatttgtaaaagaataagccatttaagaccaatccctacatctcctgtccagaaaagactgggataggtaagttgatggggatcaagaatttcaagttcattatagtccttaggggggtaggagggattcttattcttattacatgttcagaaaatttgctacttttttttctctgtttacttttctagattccttatttaatttctattcctttctcacccactttctttctttcttttttccttctctcttcttatctaaatttccttgttacttatattgcttctgctgtcctacattacaagtgttttgcaaatgcaataaaagacaagagaggtgcagcgaagtaacaatttcttggtactgaggtttctttggaaatttaaagttccataaagggaaattatgggagaaagaaaaattgatggtaatagaagcttctcatgccagataggtggtgtagacaagggtaacaagactgctggttatccatcacattccctcctagaaatgaaccttcaatacactaccaacaacaagtacttgctaaatgaactcctagtacctctcccatatggcttttcatagacaaggatgtgaagtcctaaccacaaagttaacgtttaatccaatactagtgcagctgtaagtctttctaatcacaggatgcataatcaatcatgtttcccacagcaccattagaactactttcaaatgaaggctttaccatacagttatcacaagatgtatagagaatcctcttagtcacatgaaagataacctctctaatgttctcttcttggaacacgggatacataaagaatcaccatgtctatctgaaagataacctctctaatttttttcttggaagaggctcttcaaccatcttacactagttccaagattggtgaccaacatgatccccagtctctttttttacaacctttgtggaggcatgtaaagaatcttaagatgtccccaaaacataagatcctaatattcgaacctcccttagttttccaatggagcatgttactactgcaaaacattttcctcaactgttcataaggctaattgagtggggcctaatgtttcccaagcttggcttcttaagcaatagggtttgaacttggtgtttgatatggttttatgctagataatgagtatgatttgtgctgtttactggtagtttcttcatttactagctgtaattagatggttttaaatcttatggaatggagggtttatggatcactaacacattactgtaagaaacattcttaaatattggcatattgaatgaaacatcaagtcatatattctgactgtaaacaaataggtatgacagttaatgagtatgaattcatgcagccttttggaatcaggtggttgtgctgagatggcaatagaccatctgccttgtatttctcactgtcttgtgccttttctcagtatcttcttaaaatatgaaaagtagaattcagttgtgcatttatgtacttaaatgtgttgttctttatacttttagtggatacaagttcagggagatgcaatgctgaaattccacaatttaagataaaagtttttgtttgcttctttacaattataatttgtttgagtatgacaatgtttgtaaaggtacggatgaaagcacattttttgtcacctaggtattgctatgccttgtctttccttgggagacaattatcttggcacgactagatgccttgtaatggattttgttttttttaatttgaaggttcattgagggaggagggttctcaatgttaattaactagattataatcctaggaataaccttaaaaaccttaagccatagtgctgcatttgtacttactgcattggaattcagattctcattgccctggttttggttagatatctttatttaatcatcaattgtgcactataattattatatggactggaaaaaaaatttagaataaggtcctgtgatatgtttttatttgattggccagcatcaggccccattatatatgcagaggttctttaatctgagagacttgtggatagcttcttactataggtagaagtagaacacatatggaagagtatgggccctggattattggtttcagaatctcagtttaggaaggagaaaaagaaaaaaatggttactggttcagaatttattagacctaaggtagagtgggcaattagggaggatacctccctaggattattaatttcagaatctcctttagagaaaggaagggaaaaaaacgaggttactggttcagaatttattaaacctagagtagagtgggctgtttgagaggatacctctctataagaacatcctgtatttaaaatcttgcttcttaaaaatcaaccaggataccactactgatccattctgggcagtccagcaggcaagtcacttgatacatcttaattcaaatggatgcaaactaagaaggaaaaatgagagtcaattaattcggttgcctcacttgtatcatttaattatcaacaaatagcatattttatctttcaaaggaagacagtaatgctttttgaagagattgaactgatagaagaggattaggggattatttcaagttgaaaaatagatggctccgaataggcagtctacaaatgaaggaatggcatgaagacattccttcatttggtaaatacaagaacctccaaaaaaaaaaaaaaaaaattgaattgggtaaatcaaatttgtgtacctgatatcaacccacttaagcgtggaaatgacttcaactgtgtgtcatggtctacttcttgactggtgttcacaaagcagtgctgaatcttgacaataaatgtaggccattaggtatacaatccattttgtatggtttttacatgattctcctctttatttgataattagttgtatatttatatgttattattttatgacttgcaggagctggagaag

SEQ ID NO: 10392 - DNA, 2228 bp, Vitis vinifera
  Intron number 2 from transcript GSVIVT01033649001 (locus G SVIVG01033649001) derived from phytozome v7.0 (chr-ID chr8 ; pos 18937606 to 18939833 reverse strand)
ggaggtttttaattattactcagctttttgttgtgatttagtgtaacttggtttggattgcattgttagggcttcatttgagactgcggattgttcacaactcgaaaaattataaattttgatgtagattagaacatcaatgatggtttctaatgttatagtgttactgaattacagtacccaattcagaatgcagggtgcaaatcttatgagaaaatatgaaaaatgaaaattccattgagggagataaaatgaaacagaatctaataaagtgtggaccggaatctattaaatccaggcttggataggaatggtgggaatttcaagacggagtataaagacttgttgcaataattttggttatattgtcttgagttggaggtgtgttttttctgaagaaaaatgctactatcaccacccctcttacacctaattttaccaccttgtcaggtggcagatggtgaccgagtgtcaaaatactctttcattttcacatccaatcgatacatattgtagtggtaaaaatggtagtgcatgtaacaccgtgcatttttcttaaatgtacaccatgcattttgcttaagtgtatacgtgaaattaccactaatccttacctattcgggtgggtgaactagtgtattaattgttgccatcttggacttagtgtatttgtgagttctttatgcaagttatggattctagccaattgaaaggatcttcttgtcaaactagagatttgattctattagtaccaaggatttgaaatatctcatattaatcaatcaaagagagattctacaactaaaagaaggtttgataagttaggatccttcctttcttcaaacggaacaaacagagttagaattagctgattcctgaaatagctttctggatattctccaatgtcttgactattatgcttctggtaggcccatgattctcttactctctttttcttttctataaagttcataaatttttcttgtccatttgaaagaagtaaataattaaatttatataaaattaataaatatatataaagctaatataacaaaaatatctacaaggccaggcttttgttagttatggttattaacctggtatgcattgtgggtccattttcggacaacttaagcttgtagatcagttgatgcttgaacaatgatgttagaactctagcttcaaatttctcttgctgtcaacaactaatgcaaattgaaattcttacttgcatacggataatatactaatccccaatacaggattgctttcacttatgtataatatatagaaaacattaattcatttgttattatttctttaactttttcagacaaacctgatcgatcaaccaggaactgatctatatctaacctcctccttacattatgtggattagctagttgtcttatttattgaacatgtctccctcaacctatcaaataggctagtttcagtcagtgacttaaaactctcaagtcattttaatgttagtaatcatcttcacttcctaaaaaccatacagatgaacattgtagagttgggtggtgattggaacagaactactaacttgtacactagttatacatgtgactcctcgaatctttcaaggaaggtggggcaaagtttactaactaatagattaagtttgtgaaccactttggaaaagtgagggaaatcaatattataaccacctaagaaatgggaggatcactcaactttatcatactgtagcttattatgctaaagtttttttatgtaacttttcttttataagaagcttactcaaaatgcttgttttcctttcgatatcaactttcttaccatgtatactatgctttaccaccctcccttgtgtgcagcccctacaatgtgcagaaagaaatcactaacttctatgattgcaaataaatgggtgaataaatgataaacttgagactttcaagcaatcagagctctaataccacattgaattatcatcatttctaaaagcttaagctgttaggatttaggtccacggtgtgtacaatgttctaacacctttgattaaagagtttcataaagagtgatctttttatgctaaaatgtagcaaatgttttattgagctgtaaaaatttgtggaatagtttccttgtctgtaaatgatttgcaaatttgatctttgtagttacttgcctaaaaaaattctataggacagatctcgcaaatattgtcaggcggagaggat

SEQ ID NO: 10393 - DNA, 11639 bp, Vitis vinifera
  Intron number 3 from transcript GSVIVT01008876001 (locus G SVIVG01008876001) derived from phytozome v7.0 (chr-ID chr1 8; pos 3024285 to 3035923 reverse strand)
ttcaatactttcttctctgttgcaaggtaaagttcctcattttctctttacatttagctctcgaatttccttattttccactcaaataaaagatttagatattactgtatgtttgatagtgtgcttgttatttcaattatttgaattgtcaggaaaaaaaggttgtttgatatgcttccaaatgctattccttttcttgtttaggacaccatgctgatatgccttttgtggcaaactagttgtttttgaacttgttctcaagtttctttgatagcatgaaacttctagtagacttttattgcctatcattgatcttgtttccttttgaaatagtatcacttgctgagcatcaaaatgacaattaggaagcacctttctttcttttgaaagcaaaaaatcgagcaactgaaaagcattaaaacttctaaatgagataatattttttggatagataaaaataataatatattaaaaagggctgccaaaaaagcaacccatggtatacaaaacatatatagctaccaccaaccaacaccacaataagccaaagttacaaaataaaaggaacaaaaccaacccaccctcaccaaaaggcccaaccaatctagaaagctaaaaagagttagaggaacatcatctatacacccctttgtttccgaccaaagacaacaaacaaaagaattttttagattttggattgagagcttttccccatcaaaggcaattctatttcttgccttccaaactatccaaaacaagcataatggtcccacttttcacaccttcttgagcttcttgtccacaaacgaaccttgccaccctaataaagtttctttaaccggtgatggtagcacctaagacaccctaaaaagggcaaaaaacaactcccacaagactcttgtctttacacaatggacaaggagatggtctatagattcttcctcgatatgacacaaaaacatttatttgccaaagaccacccctttttgtggacttgatccaatgttaaggcttttccttgagtcgcctcctaagcaaagaaactgactctaggatgcatccacgacttccatatgttgctccaaggaaaagagattgatgttcccaactccaaagccatatagagtgacttcatagtaaactttctattcttagtctttgtccaaagcaccctatcttccttgttgttgtgctccctcatcccatccaagcatgagataatgtgtcagttgtggcctagacatgttaaaattgatatatttgggattccatgttgtttcaaatctttaccctacttcttgcccatttgaaagggaaaacaaaaggcaaaaaagcaaagaaaaaaggaatcttctcctatacagcttcccgaacaaaaaaaaacaagtatttattctcttaaaagagcatttgatccctagacctccattgtaggaaaatataagacttgggtagttaaggaaatgtaataaaacttttggaaatgcttcttctctatgatccctccaaattgatctattggtcctttcttctagagtttcaccttataaacaattcatcttctctagttcccattcttgaaaaggccttgaagagcaaggcatctaatgaatttggcaccccctttcattgttcacattttttattgataactgcacgaagtacataagaagtatacaagtacacttctaagcaaaaaacaagaagatcctcctcttattggcaacctaaccaattgataaaatcaaacatagacaaagactcaactctagaccccctttggtccattcttaaaagttacacaaaaaggagaactttagctcctgattagatagcttaacattatcaaaagcccatctatttctctctttccaaatagtccaaaacaaacaaagaggagcgacattctactcaatgaaatgattgtgctaactttgaaacatttctttgattgaggcatgcaacagccaaaccactccaaacaagtagaagaccaattgccataacacacttgccttagagcaatgaagaaggatgcggttacaagattcctccttgcctttgcatagaaaacatttgtgcaccaatgtctaacctcttttcttcaagttatccgtagttataatccctttccaagtgtcatcccaaacgaaaaagctcacttttgtttgagcccaagaattccaaataagtgttgttggggaagattctaaacccctttgaaccatcccataatagaaagagttaactgaaacttgcctcctttcatggccttcgatattgccctatcatctaccttcctacaaattgatttatcctgcaaacacaaaaggagagcttcaatacaatccaatttgcagccttggaaattccttaagaaacaagggttccaagcacatattcaaaagcgcatttcagtgcctttgtgctttacccttcgtgtaaagctcccaagcatgttgtacatggcttgcatgtgttgagaatattaaaatcacttttgtaatattacacaaatttaggacatgcaaacaatagaaaaaatgtatgggaaatattgagacattttatatactatacccttgtttgggaggatgtttaactttttagtagtaaaagaagtaattagaacgtgtgattgaattttatgtttgggaattatattttaaaacgctttcattaaggataggattattatgacatttgaaaaaattttagttaaataaaaatctgtgttataacaaatccttgtttaaaatcctcctagtttcatgactttttgcaaactcaaccttaggccaccttcactttttttgtgctttaccttccatgtcaagcgcctaaacatgtgttatacatggcttgcacttgttgaaaaggattaaaattacctttttgatattatacaaatttaggacatggaaacaacagaaaaatctgcatagctcaccactaattctcaccacttttacttttctctttccctttcctagttctctagacttccaccagctaacacaaatatagagattttaaagtcaactctgtactaagagtctatctctttaaggatcctatttctatcataaaatgtcacaataagttctctcttacaagaaacttttatttaaaggattcctaaataagataggaacttaaccaaattagcattgatgtagtagaataagaatgcaagtcatctcacaatgtataatttattgcttcattcatgtagtctttgcatcttattttataaaaatttctttttgttggtgtttccatagcacatcaaagccatgcacttcatctatactcatgcaaaatatgtagttttttggtctaaagccaaagaaatttctctagaaatgccaattagtaatgctttgtcaaacttgtgcttatatttttccatgacactgttttttaatcaactataccatagtgtttgtatccatggccttgtatatatcgtgtatactttgggtgcttttaatacaattgctcttacctataaaaaaaagtatttgtatccgtgtttatgccatctaactccatcttgtaaataagatgcactagaagcatgtcttatgactacattgctaatggtgaatcaatgatagtgattcctagcaaagtttgaaaaaacatatcttcttctactagtgtttttttgcgaattctatcatggttttaattttttgtcctcctgccccttttattgtcaacttgttaaaatcaaaattaatgttggtggaaataaaacttttatatgtttcatttgctaatcaattaataggatttcttcaattggtgtagggaaattctagtgcttgaatggaatatattgtctcttttttgggttgtgccttttggtgcctattttacgcaacttctatactttagtgcgctttttataaatttctttttatttacccatccacaaaaaaaaaaaaaaaaaaaggaaaaaaaaagaaagaaaaatgcttgaatggaatataagttattttaggcattgattggattacacattggatggtagacaataaggttataaggctggaaatccaactaatttttctggagcatttgaagttttatttatttattttgaacttctttgatcataaacaaaagtgtgtgtatatatatatattaaaaatatgaaattgcaagagaaggatgagaaatccttccttaataccaaaacttgaacaaaaaaatggaaaagaagtgtgttgtaatgacatcaaattgactcgatatcaatgtttttagaaccggaccggtcattgaattgaaaaagttactggttcacggttcactggtcgaaccggtgatcgaactgatgacgtcataaatatatatattttatatattattaaaattaaaaaaaaataataaataaaaataataagttccatgtaaattttgataatatctactttgtttgttgagtttttttatttttttatttctttatcaaattgtaaacaaaaatcacaattttaattataaaattaaagaatcaagtcattaacaatttaattttaaaaataattcaaatcatcaacaatttataaaaaccccacattaatttagagaatcaagtcatcaatgattaaaaaaaatcaaagaattaaaaattttgaaatttgttacaattttttttttcaaaatgagaaatttactatcaaatcaaatatttatttaaaatttaaaaattagaatttcatttgaaaatcaacaaaaatttcaataaattgaaatttcaatgtgcaataaataaaaaaaagagaaaaaaattataaaagttaaatattaaacataacattaaaattataatcaacaaaaaattaagacattaaaataaaacataaaaattacattttttttttaatttaaaaaatgggagtttaagattttagtttttgcttgtcgacaacagaaaggtgtgccgccgatgggtggagctggttcggggggctggggcaaagagtggagttggttcgacgggtggagtttaagattaacttttctctatgcgtggggggaaggggctcgtaggcgataggcagtaggtagcttgccagcctgctgctggagttggggcaccgcagtacagattgctggtgctggccgttgggagtttggaacctgcgtattcgaagattctcttgcgaaaatcatctggaaagaattcacaacattgccccaaccttctatgggcaattgacaagatggacttattggcggcatgcgagccgccgacctgctgctggaactggggcgtcacgggggtgggtttgtttggggtcatcaaaatgtttgatgttgtaaaaaacaaaaaaaaaggttgaaccatcccgttcggagagaattggccggttcgtcggtcggaccgtcggttcacctggtctaacgggactggaccaaaaccatgaccggtcggtggttggatcggtcggaccggctggtccggtccggtttttaaaactatgctcgatatgttgagaaaaatgcctgaatcttaatatattgagagaaatgccctttctttgatcggtaaaagcaattacattataagtgcctaccacaacattgtttaattgcttggttcactatttcaaaaatttcgaaggcttttctatttttctcttttcataaggtccaatataagtacaaaggagttgctctccaagcttttttccttttctccccacaaaagctccatgctagttaaaaatgatatcattgactgaggtattgaacactaaacagagcaaaaattagttgtcatagctggttgctttagaacaatgaaaaaagatatgatttgttgattctttccctcttttgcacaaataacccttactctatagtctctaacccctccttttgagctggtccaaagtcaaaattctttatcatacaacttcccaagtaagagaactaactttcatcgggacccaagggttccacacaatacctgatggaaacgccttcaatctacaattttttaaggaagagtaaaaggatttaattcttttgtgtggctttttgttagaagcgtttgacctctcatcattttcttgtattttttccttttctaatatattttttgttttcgatcaaaaaaaaaaaaaaaggatttagttgtaaaattgccttcctttgaaacccacaaaaccatgacatccttaacctctcttctaatcacttgcccttacaacttttggaaaaggccaccatctctcccgactcctagtcattaatttgtcttgtaaacattggattccaacaaccaccttcccttaattgatctcataaatggtctacctaggcatctttagtagaggctaaagagaataactctaggaaagcctcttccagggaatccttaccattccacccgtccttccaaagtcttatcctcctatcatttcccaccctaaattcaacccttctatcaaactcttcccacccattctcgatagccttttaaagctccacactataaccttcctttaaaaatccaaaacaccaacccccctcttcctcctcatacttccctataacctttttctagaggaactcattctcagatgtaaatatccaacaccattttctaagaaggtttagagtagacaaatttctaatgcccaagccctcttttttttttcatgtagacaataattgaccaatttactagatgaggcctactttgtagctttccttccttgcaaaggaagttcctatggatcttctccaattttaaactcaccttttgagggataacaaataaagacatgtgatagattggtaagctagatagagtgctctttaccaaagtcaatttccttccttttgataagtaatgacacttccacataacaaactatttatgaaatatttcctccattacatcccaaacttgcaatgatttcaagaagctcccaatgggaggcccaaataggaggatgggagataaccaactttacgcctaatgctttagccagatcctcagaaatctttaccattgagatcaacttgcttttatccaaattgatttttaagcttgatattgcctcaaaccacatgaaaaccttactcaaaaactccaaatgctccttactaaattgcatagaatcaaggtgtcatcgacaaataagagatgcgacacttccacacccgcacttcttctctcgccggccaagaatccctttagaaagccctctttcttagcccttttcaaaatacaggaaagtgcctccattgccacaatgaaaagaaaaggggaaagagagtcactttgtcttgggtttatagaactttggaagaaacccattggggattcaccacttcatccatcttaccttcttagcaccaaaactcattttttccataattgctaataagaaaccctaaggcacatgatcataagccttttcaatatccatatttcatattaccccattctttgagccttttagttgagtcattgacttcatttgccacaaggattgcgtccaaaacttgtctactctcaacaaatgcatgttgggattctggcaccacttttccatcactttttttagttcgttagccaaaactttagtttggagcttataaggcccctccatcaaattgataaagttgaaggtggtgtttgtttttttgactaaatagacaaagccaaaatatttgactttttctattctgctaaaataatttgttgatatcaaccaacatatttaaagtgaacttgtcatcaataggttcaatttagtcatattggttgatatcaataggttactttttagctgaatagaaaaagtcaaatattttggctttgattcaacaaaaaaaaaaaaaaaacaccattgacttgtttcaaatcttaattcaacatcacttttccatcactattttcgatttgttagccaaaaatttatctaggagcttataaagcccctccaccaaattgatagggcagaagtttcaaatcaacaccccttttttaggaataagcacaataaaagtcgtttttaagcttcttttgaaaaaaacccaaattgtgaaactctgcaaagaagcccattacttcatttgtaatgatttcccaacaaaattattaaaatgcccttgaaaagccgtagtagtagtagtggcccaaaaagatgaacaaatatatgattagatcctatatcatctctaaagtcctccacttttcctcaaatatcatcacgtttctctcttgtcatactcttcaaatcagtgtaggaccggctatttgccattgaacttttcctctaatagtgctccccaagtccttaaaagaaattgtcaacacatcactggtacttctgagaggaacctgatccactcattgtagcatttaaagttttagctgtaggcatgtgtagagaatgcgagtttagtagaacatgttaggagcttctttcctacatcatgagttcttctctgtttaggagtgggtgggctcaactggttgctgtgccagatttttttcaatcagtcctaaaatccattgaacaaacatcttgggatgctctctaattttaagttatgcattattgattttttaaacttttttttttgttaaaagtggaggaaataagacactaggtatgcctaacaaaaaaaatgtacaagccaagtgcactttggtatcttttgctcttttgcctatcaaaaaaagtaagtgccaatggatgagcaaagacaccatccttaaaagagaacagaaaaatctgataaaaaagggagagaaaaaggaccattttttttttgataggtaaagagaattataataaacagaaagaggaaacaccaaactagtgccctctaggtatacagggagtatacaaaagcagcccacagactcgaaattaaggaaggggaaagaaacaacaacccctacccttacttagagccttgccactcaaaaaagctaacaagagaaaaagggctcaaaactataaacaccctaacccaagatcaaagattacatgcaaaaaaatgttttagcctttggagtgaaagcacctcattcccaaaaaccaacaaatttctttccttccagactgaccaaaatatacataagggggtcatttgtcacacctttttacggtttttccccacaaacgctccatgccatccaaggagagtttccttaactgaaccagagagaacccaatctagagagaaaaagaaccatacaacctagccttatccaatccctcattgatgtcccaaaaagataggtcaaaatcgcaaaaattattagtgcaataaaagaatatttaaaaaggacatctctctgtgacagatttaatgagaggaagggccattctccatgcactcttatgctttttacccattcccttgctacatgccaaactaagagcacctctttgacaaagttatggaatatcttttaaagaccaagtgaagcaagaacaagttacttggccattatgagcttcggcacaacaaattaggatacaatccattgattcctccttgaccttgcataaactatatctatctggtgaaaaccagctccatttcatgttgatcaagcataaggatccctcacacacaacttcccatgcaaagaagcataccctcaaaagggtgcttcaaatccaaattttttttctgggaacttattgaggcattaaaaaaggaggatatgaagaatgaggttacagaagagtgcccattcctaaaaccttctgcactgaaaatccttatcaattccccatatagatattgcatgaatatgctgataaaactgcttaaggtcttcatctctatctcatgaaatgtccaatgaaagtaatgaatctgatgaccctaccttgaccatcacctaaagctgcttttgttggaggtgagtttgtagatggtaggacaacaatcttctagccaggtttctgatgcaggatcattggatttccaacaccatagaaggtttttttttttgttgtataatgagatgaaagataaaaagaacagaagaaaaggaaagaaaagatgccttatgtttatgattaaacaagaagaagaatagcaatcacacttaggtggaaaaaaaaaagatccttggcaatcatatggaggttctcaaggaatcacaccttctaattctattctttgatattgaaagacgacataggtttatgtagactcatggaaaaattagctactaaattctcaattaagtttgttcactaatattgaaagaccagataggtttatatcaatgttttaaaaaccggatcggacctgtcggtccaaccgtttcaaccgtcgaccagttgcatttccggtccagtttgctctattaaaccgtttaagttatgaactggtatcgaacctcctaaactagcggtcgaaccggtgacccgatggaaccagacggttctaaatgaaccgaacagtggaagggttccattgagtttaaatgttttgggctaaagcttgtgttggaccttgtcttattatgacaaagcccacacccacccccacaattttatgggctgagtcttgagcccaggttatgcctttgccttaagtgaggatggcttttataggcatcctttgcatcatgtttcctcttagatttcgatgtgggattcctaactaattatcaatgaaaaaaatataacaagcctccaccaagagggcttgaaccttggacctcaggttccactatcagcctaggacaccactcggctgcatgcattttgttatctaaaatgccaaacaaaataatatgtattagattttaacattttttataatattaaataaaaataatataatatttttaaaaattatagaattagtttaaattttcatttttaatatattcacatttaaatattatacatatttcatttaataaaatttaaaatgttaatatgatttaatttgataatatcaaagatatgaaataatattattgatttttaattttttataattatttttaattttaataatatataaattacatatttatgacatcatcgattcgaccgtggtttgaccatcggtccaaccagtgaaccgtggaccggtaacttttccggttcgatgaccggtctagttctgaaaacattggtttatagagacttgtgaattcttgatagtttatttctcgcatgtttctagaagttctttggagccaatgataataattttgtacagattttaatggacagccacatgtgttggagacataacttcaaattctacaaggactacatctattaaagtggccatgttgcatgattcaaacttgactcaaccttgaaagaattctcaattatccaactagaaacacacagtcatgtgaatggagagctatatccttgtaaactgaatatctaagtgttgagcttcctcagaattcataagaattaaagttattgctcaatcttgtcgtttgtaattgtcattaatcattattcagctaaatgttttaattttgagcaagttttttttctttctttctttattgtttttgaatgttgtaagtggtaccaataatgatattgtaattattacttttagagaacatcatcaacaaagtgtggttaaggcaattt

SEQ ID NO: 10394 - DNA, 5843 bp, Vitis vinifera
  Intron number 1 from transcript GSVIVT01008499001 (locus G SVIVG01008499001) derived from phytozome v7.0 (chr-ID chr1 7; pos 1314743 to 1320585)
tccactttcattagacatcgttgatcggatcgaaggtaaccctctgttctcttctttctttttttttcccttcttttttaatgtctgattgtcttgaaatgttagttagggttttggttttaggattgtttggttaggaggaaagtatgagaaaatgaaatctgtaaatcctcaaatgtttttacgggaattacttccaagccttaacagttttagatctatttttcaatagagcagtcgagtctcatttcccagtacttctctctctacaactctcattctcttctggttcacatatgcaattgctctgtttagggtttttgggttcaagtgttgcaggttcgtttcttttttaaggaagaaaaactttgtttggtgatatcttgttatttagagcccgtttgatatggttgttgtctcattgctgtttatttgtctttaattttgtgatttttattcttcacattattattatttatttatttatttatttattattttttattttttatttttttccatatgggtactcgagaatcatctccaagataaagatccactgctagcatttttatttatttatttacatttagcattttagaaatgaaaatgtaggaataggtcccgccataattcaagcttgtcctttcatcttgggatggcaattctgctcatgaatcctattgttcatttctatatatgtttttacttgataaccttagtggccttctccatgtctctgtactttcatttaacttgaatcatatctaccaagggagtacacaagagaggaaagacatgtaaatgaaaagggaaaaaaatatatatatatattcctttgaaaatttaattctttcataatggacgaactttagctgcaactcatcttgttttatttgtatcgactccaaccacatgtctttgctgccatcaccttgcttaaactagagccactagttcactgggctaaaataaggtctgaaataattttttggtcaattttcaattcaaagatgacgagccctgaaattagccaagtcaatcttgttcccaagtgaacatagtgcatatgcgatcctgagaaaatgtattagcctagaactagagaattcgagctctaaaccatgtgggttgatcatgcccggtgatggtaaaaaatggggaaccctgtcgtgtacactttgcctaacttacctaagaaggcttcaataatttcactttatcaagggttgtgcaaattagagagccaaatctaatttaagctatttgataataggttaaactagtagaaaagtaaatatgcagaaaagtaaagaaactagaatagtgtgcaggaatttgaagtgtgtagaaaattaaaataattggaaatggatgattgacaagcaattaaaagttacttccagtaaagttgcttcttgtgatttgaaaaaagtttggagtctgtaattgaagccctagacctttctggtataacctctaatcatatctatggcctttgaagagtcttgactttaataagttgccccctttctttggtgttctagatcatgaagagtcttatatgagcctgaccatgagttctatgcctattttatagcggtctgctatttgtaggcagggttctgctcaggtcttagactcatttccaagagaaacaagatctcaattctattgtcaaaaaatataagttttataacttagatactgaaattacctttcttatgattgttttcttcatcaaatagctctctaccttgccaattggaacaatccatttatcaatgatacatactaagtttttcacttgtccatctggtttaaaggcagctttttgctacttttgcttattttattttgtctatctgattatttttttgtccaattatgttggtatggtgttaggctaaactgcacagaattcctacttcatagaggccaagtctaattaaagtcatgagttgatgctcttctttccctttacttgtgtctaactagaaagccagttcattgttatcatcaacatacaaagtgtacaactgtgctcaatcaggtgcagtatatatttccatgattagacactagtgctttactccaatatctactaggccagcccaacaacctcaatttgagattgggaaagccccctggtcactgagatgacttagaatttagaacaaaaataacaatgctgatgacttcatggcggccgtgaggtgcgaggagtggagtggtgcaagacgaggcccttggtctccgctagaatctcgtgtagtgatcacagacaagtctcttgtggtagaggcgaatagacatgctaggagttctaccctcctgtctgtggaacctttgagccttggataccagcccttagtgatgttgctttaggatggcccttttttggagctttcgggaaatgcagtgaagagtccttctagtaaggagtttgtggtaagggatgaggagatggtttcaccttatgatctgggcttcgaaagtgctgcggagggggaggaatttgttagtttgcccagtagctttgtcaaggtcagtagcagtttgggggtgctagttgtgggcttagaaaaggaaatcagtcttcttcttaagaatctggatttgagaaaaaagggggtaaaggggtcagggggaaagaagaaatctttgccttctccccgttttgagaaggaaatccgaaagctagagagttaagttaactatgattgctctccatccactgtaaggggaaaggggagggggtgccagaatttagggaaggggtcaggaagctttagagcccagtaggagtttcttttttggggttgcaataggggttccttttttctcttgcgtcttagtttcttttgtggctatttgttgttagggtggtgggtttttcttttcttttctcctgcttgccaatcgaccctatttgtattgagtgtactttgttgtgccttttggcaagtgtttttaatatatcttgcttatttacctataaaaaaaaacaaataaccattgtaacacatcctggaagttacccttggtgcaacattcacatttccaaagaccccaatgtcccaagcttttaaatcctttttcaaagctttcaactttgagagcagactaaaccataagaaccataaaactcataactctatcaccactaattaaccatgtctatgaaccttccactttaagtcacatattctcaaaccaagaagggcggagccccattctcaccccacctcatctgaatgagggaaatgatccattccaaccatgctttgcaccaaattagagaagtgatcctccgaatcacccattaccaaaacctgatcaagttgatgagatcatgagagtctatttagaacccctagtttactcgcctctcatctcaggatcctccattaccctttgtctttccaacatcaaatcaacttgtaaacacttcctttgtagataaaatgtttttaatattgcaaaaaggagtaatcataatggttggatcgatttatttgatataatcactcaaattcaagcttacaaattatcataataaaatatttttaatattgctaagaggagtagtcataatggttttatttgatatcatcactaaaattcaagctttcaaacatcctctacaaagaagttccaaaagactacaagaaagagtttccacttaagacaaacaataaaaccatttccattgaagacaaacaaaccatagacgctttgcgaaacatgtatccacacagtctaacaaactttagaaattcacaaacactacctagaatttttgctaagcagaaaaaaatttatgcaatttaattcttattgttattattatttttcagtgtgaacaaatatgattgaattatgaagtatttggccaaaagaggatcttgcctatttatagtcatcaaacagccatctacaacataggttttggactttaaataagtctataaaactcaaggacttccactcaacttctagattatctccataagattcttctaaccatcagaaagaaattaccacattaatttttcattccatgagtctccgattggatctcagatgttctcaaagatccaaacagcgccttacggacgatcaaggtaatttacaacagagaaagctcaacaaaccctaatccgaacttgttttaagatttccaaaaaatggggattcacttttatgaacaacaacacagcctttgatttatgtttcagaaattttcagttcatttggatttctacaaattacttgaaaaaataaaatgaaaaagaatgaaaagagacttagggttagggttaggttaccttaaggcgatggatgattcaattgaatcgaatgagaaatgccctgtcttctcttcactcttcccctttcaaccaaacgctaacgttagatagaaaccacttcacgttgtttattaactaattttattattctagtttaagtaaaattattttactatttttgttttatttttttcccttttttttttaccaaattaaaacacacaatagtttagtctcaatcatatgccatcatagatgataaatgagttgaaattttaataaaatatttaaatagtggaaattttgttttaaaataacttatcctaattattttttatttattactcaaaccgacgttttgagagattagaaaattttgaataaaaagtatacattttatgattatttcattttaattttgtgattaattcataataattgatataattttattttatatatatttatattttggacctcttgtttgatattaactaggaattttaactacatcattataattaaagggtaaaagaaataccataatgtataattgtactgttggtgcacttaatgttgaacaatattcaatctgtccttaatgtataattgtacatcattataattgtactacagattagataaaaaggctgtgtcatcgtccacagcaacaaacccaccacaacagtcccctgttttctttaaaacctcttgactccacagatgcagaggaatgcctaacaccctcacccagacctccttgacaacaccactcttaagaaaacaaccagcctcaggggtacatcttgctaaatgcaaaaaattatccttgatccttctagaacctctggcaagcaccctctctgcctcaaatttatcctcaaattcaaataacagcaaagctcccccaaaagctgaaatcttcacggcccttttcaatgaacaaagattggtcatacaatttttcaatgaggacaaaacaggagatgtgtctgacccatccccaaaccacccaacgaagatgtgttacaatggttattgttatatacaatgaagaaaatatgatactgttttctaattaattctgttgtggcatcagcatcgtgaaatatcaatctgataatgctttagtagcactataaggtcatgtttgtaatgctagaatagaaaatgagaatgagaaagtaattccattttccattcattaatgtgtttggattgttttttaaaatgagaatataaatgaaaaattcattttcatgggaacctcatctcacccctactagaattttgattcctctcttctatatagtattataattcgctcccgtttccatcctatttccgtatgtcaaacacatcctagatgccctacgtcaagtcatgaggctatctatggtcttgtaccttgcaaactcatttttgtttaacatttgaatttcataactaatgtccttattggttttacatgaatttttttgaatgtgggcatcagaccgtgttggggttcatctcctttgaataggttgt

SEQ ID NO: 10395 - DNA, 6234 bp, Vitis vinifera
  Intron number 3 from transcript GSVIVT01038227001 (locus G SVIVG01038227001) derived from phytozome v7.0 (chr-ID chr5 ; pos 24483370 to 24489603)
ataccattccaaagggggttcgaatctttgttaacgtgtgggcaatacaccgagacccttccatttaggaaaacccattggagtttgagtggcacgtaggatatatttacgtttttacttgtaatcatatacgtacaacaatacgaatatatttacatatttacttgtaaccatatacgtatagcaacaccaacaaaaagtaaagtcctcacctaggctataaccattaatcttaatcttaatttttttttgtagagtttggctttttcaatattttataattatatagttaattgagttacatagtttaatgattggatcgatgattaaatcgtgattcaatcaatgatattataaatatataatttatatattataacattaaaaataattataaacatttaaaatatgtaaagaatttaaaaataataatatttattttatttttagtattatcaaattaaatcatggataaatataagtaccttaatattttaaattgtattaaataaaatacctcaagtacttaaacttaaaatgaaagaaaattattttaaggtatatatcctattattttttaattttacaaaatattgtattattttacttatatcttttacttattataactttctttgaaagcaatcatattattttattttaaatttgtaactttcaaggtgcaagcgtgtcacagcccatcccttgtactcaagcctcaacatgattcatattagattgatttttcaaatatatatataaaaaaaaaagggcaatagtgtatacgttcactaacaaacaaaaatataaattttttaataacttttaaaaagtaacatgaaaagcatacactaagaataattcaaacaaaatttcaacattatccttcacattttatcttttccgctgtcaactaccataattttccttttttaaattttaaattgacatgataattgaaaagactcattattgtttttttttttataagaaaattgacatgtgataatcaatcatatcatatgattttattttttctaatcatgtttattagtgtttttaaacttgacatgtgatcatcaacatgcaacattatttttattttttttctctattttataatacgacactaacacattctcataaaatatttttaattttattttattttctactttttcatttttttattttaattatttatgaatactttaaatataaaataataataataacatataataaatcattaataagaaaaaataaaataaaaataaatacataataaataaatttaactttttacttaaagacatgtaaatttgtggtggttttaacttttttttttcttgataaaaatgtttaataattttaattaaagaagataaaaacttggttatggttctactattttgatttgttaaaatttttaattttttattatataaaataaaaataacatatatttttcattaaaatatttaattatttatattaatttttttaaattttttttgaatatcttaaaataaaccaaagaataatgatatatcatttccattatagtgatgctcttaatacatgtctgtgttacttttttttttttttttttcataaaagagtgatatatatattttaaaagtctgatattctctttttcaagagttatgttgatggacgcgcaacaaaatttttattttttaacaaaattaagagaaaataatataaatgattaaatatatttttttaatgaaaaatatattttatttttattttatataaataaacaatttcaaattttaacaaagcaaaatattaaatgttaaaaccacaaacaagtttttatattttttaattaaaaatattaaatattgtaacccaaaaaaaagtttaaattgctgtcaagttaaatctataaacaaaaaattaaaatcataatcatcaattctgattttgacataaaaatttaaaaatattaaaaatataataaaatttataaaataaaaaatcttgtgttttaggaatataaaaaattttatatcctaaatctctaaatatgttaactacaaggaaaaagatatatggtgacatttataataagtcactataaacatagggtgtcactacaacatagcgtcaccttatccactgacaccatagagggtatcaattggtgacgtacttggaagcgacaccaaagtagataaatggtgacacattcagaagagacaccatatatttttagtaatgcttaatttgatatagagttgtatgagatatataaggtgtcatattaaatgcatcatctttgagttatggtgtcacgttaaatgtatcacctttaatttatggtgtcacattattgtaaatgattatagaagatatggttgttttctgttgattagtttgtagatttgtgtaatgcttattaataaataagactaacctatgtaaattgtccataaatataataatcatattacatttaacttatattttcataatgcttatgaattaatttgtaacatattacatcatccaataatatttgtatatcaaatgttcacaaaatgatagtacatcaaacacatcaaacccaccaaaactaaaaaagaaaagtgaatacacattaaaacatgatttagaaatgttaagcttcccaacattcatgtatacttgcatttcatatgcataaaaccggctaaccataaaatgacacaagagttgcatccaaaaacccaaaattctcaattccaaataaagtaacatttatgtcctataatgtatgacataagagtcatatctaaaaacctaaatcttgttgcctctttctcctttctttttattcttcatattgtcctcccaagagtgtatacctgcatttcatagtttaatgagttttagagttcttattgaaaataaaaatgtgatgctataaacaataaacaaatctaagtactaatgttttctttttctttttcctttttctcattttggtataaaaatagttcgtaaagaataagtaatgttatacaatatcaatggaaaattcaatcatataacaactaagggaattaccatgaatgatcacaatacatcaatatgattcatgattagttataacacaaaagtaatctatttttctctaatttcatcaaattctacttgagaatatgttttatttgtcatcaaactgaaatcaaatgagaataacattaatatcacaataattgaaagtatgaaattatgtacaattcattaaatgagtaaaacctttgatgcaataactgtaaaatcaacaattatttctttaatgaatctcataacaaagtagtcatatttgaactcagtattatttttttactattaaattatttttaaacaaaataaaaattattaatatattggttcatttttaaatactttcataagaatatattttaactgcaagttattttaatttatcaaaagatttttaggaaatgagctattatccatttattattttcttatttttcaaaaaatattttcagtcatttcatacacgttttcaactactaaaattattgtttttatagaataaacaaagaagcatacacttctcctccactcactaagtcaactattacaatcaccataatattttattcacctaccaatatctcattccatttagataactctctcaacaaaatcatttctataatactttttactctcctatgatattgaatattttattccatttaggtgactctcaacgcaaagaaaagtaggaatgtcttcttaggttaactaaacaaagacttttttttttttactttacaatatgtataataaaaaaacaattatttattacaaggaatgtggtagaaaggtcatttcatttttaaagaattttttagaatttcttaaacatttacaaaaaatagaatctaacaattttatttctaaaaaaattgatcaattcaaaaaagaaagaagaatgttattttttaagaaaagttaataaaccactttattcttgaattatctaaacaaaacttactaaaaaatattttatcccaaatttattttcaaaactttcttattgaaaactatctcatatataaattattttattatatagagaaattcttattttattctttttttagagaaaaattcacttgtttattaaatatcaaagaagtctatttttatgtctattatatatatatatatatataaattctcttattttcatacaagaaatttccatttatgcctaaaatacttttagaaaaatcattaccaacaaaattttatttttaaaattattttcaacattcttatttaaaaaaattatcattggattattttcaaaaaggacagtcctaaaaaaattaaccatttataacccaatttaaactcaaaaattatccccaatattattttatattcctaaattattttcaaacaaaataacaattattaatattttgattcatttttaaataccttcacaaaaatatattttaaccacatattattttaatttatcaaaatatttttaggaaatgagttattttccatttattactatcctatttttcaaaacatattttcaggcatttcattcacattttaaaatttcaaatactaaaattattgtttttataaaacaacaaaacatgtaaatttcaactactaaaattattgtttttatagaataaacaaagcaacatacacttatcttccatttactaattcaactattacaatcactccaatattttgttcacctaccaataattcattccatgtaggtgactctaaaaaaaaaaagtcatatttataataccctttacgactctgatacccaatattctattctatttaggtgactcaatacaaagaaagtgagaatgttttcttaggttaaccaaagaaaaccctaaataacttaagtgcttttggattaattgagtatcatcttgtagtagatgtcaatctctattgttagacttcaccaaaaagctcctagcacggtggaaaaaagtatcaaatatagtcaagtcttcaataaaatactatttcatgtgaaaaattactacaaactagtgtatctctcattctcaattagacaaaatttttaaaaataattcatttttcttgttttcatttgttttggggcttattagcaatgaaacaaaaaatatgttagaatgttaaacctagtttttacttccctggaactcgataaaaaacaccatttacaaaacccacatcatagatatactaaatcaagagatataaaacaattatactaacaaagttttttgcattaataaaaaaaatgaagatggtagataagagattttgacttacccgagattttacaaaacaaagaatatcaattatgggtgtgccgaccatgggtgtgagaagaaggagaagaaaacgatggttagggttaagcaataagatcttttatattagttaatgtatatatggaaacaatggacttttcataaattgttcctactcactatttttaaaaagggcccattaagttataaaatttaaaactttttatttcatatggtgtcacttccaaaaaataacaccgtacatctgaaattagcatcatctaactatcctaattgaagattttttatatgatgtgtcacctttataaattttaagttcaatggtgtcattattttaaatgcgacaccataaatagtgacatcatatattatttttgtagtagtttattatgtatttatttttatattaaatttgttctcattgataatttattatatattattattttatgtttaaaatgctcattaataattgaaataaataaatatgaaaatataaaattgtggaaaaaattgaaattcaaaatttttttatgaagccaacatatttaaaaagcaaaaaatgtggaagtattacggagaaaaaaaaatcatttgacatgattggaccggattggttgtcaaatgtcatttttttttaatattaatgataatgggtgatgagtgatgtaaaacagtaaaagtaaaaaaataaaatgatgatgacaattgaaagctagaataataacccccacaatgaatgaacttcaaaaaaaaaaaagtcaaagttttaaaaaatttatttatttttaaataacacactgttacatgattctcccttcagaaaaacacgactcgatagtcccaaagtagggcgcattaa

SEQ ID NO: 10396 - DNA, 9765 bp, Vitis vinifera
  Intron number 3 from transcript GSVIVT01024345001 (locus G SVIVG01024345001) derived from phytozome v7.0 (chr-ID chr1 6; pos 1236157 to 1245921)
agtttgaaacccgggatccctgaagacggcggtgtttgccgctccgatggacgtcatcatgaccggaaaaggtcgagagctcagatgaaaggttccgtcactactgctgcctgaatatagactctgcacaatggcctaaccaaatgggtaacctcaccaccgccgttagcgtggacagagaacttgccggcgaggatctccggcaatgctatctcaaaactgcaagcatcaaaaggctgtaacgctttctgggtggacagcgttggagagttccctggactcatgtatctgtcaggtggccctcatctacggccaggtacactatatcttgaagagccacaaagtagaaaaccacttcttgtattctgagattgcgtgcctccattggaatccatttggtcaatggctcaacattatgcagtcattcccgtgcaattggattttggtaaaagattttcaccatgcatgcaatcaaactctctatccgttccaatcccaccacaactcgtttctgaatttccatgcaatagatgaagcagagctcataataacctgtaaggtaaccttggtggtgatccccagctgaagttgttcaaaagttacctcggttaaagaacactcccaaaggatttatttgagtagaagtgaaccccgaaacttccaaaatcaccactactcacacacaaggtgagccaaatgatgacgacgagctatcaagataaaaaaaaacgaaaatagctcccaaaagtcatcactgaatttcccaaaagctggtggtaaaggagcatcaaatgcggttgtggaaggcagtaggaaaaaatgactgagttacaccaaatacaccagctgaagtgccaccattcccttccgtccatactggaaaatgtcgtgcatgtcaatcaggtcgtggattatgtacaatgggatagttgtgtaagaatcatttgaagatggtcatgtacatgggattaaggaaataagttcgaatgaatatgggaaaatgatttaaagagaaatgggtttaagggtgtggttagagagagaaaggtggtaagaaaaaatgggtaagttaggtataggagggtggtgatataggttcggagtgtatggggtgtgataaatggtgcatggaggtatagggaagagggatttaataagagagtggataatgaaacaaacttccaggctgcgtcttcatactctgaattcaggttagcatcgtcatagccacctcacatgtgcatacgcatgaggcaaccttctttgtcaaacaaacccgcgaacatggtgttgtctctacgctcagcaagtgagtgatcaatcagtcgcagtagggcaggagctataaactgtttcaaagccccaagaaccatatcccacggcattgttgcatctaggcccgaatgcattaattaaactgggccttcaatggacacagcctgtgacatgaggtctagcgacaatgatagcttgagagtgaaggcaggcttcctagatgggtccatgacttctccattgggtcgtgaacctcatatccaccatcgcggcccacccatagggccttgtatcctgcagtgattgaaattcccacccaatatcgtttacaagcctcggccactctgggatcatcaattatgtaccataacgaatcatgttcattgcggaatccttcacaacttgtctcttactgctagtcaaaatcacttaggctatgtttggttcccgaaaagtataaaggaaagaaaaaaaatgctaaaaaaaatgattttctcatgtttggttgtcctatgaaaaatatcaaagaaaatcaaatataattaaaactaattaaaaacttatatatttttaaattatttaatctttatattgatgagttaaaataaataaaatgagtttaaagtaacaaaaaaaataatttaccaacttttaatctatttttttattttccttcactttttctttccttctagttttcctttgtattttctttccctcgcattttccctcaaattttccgggaaccaaacatagccttcaggtggtataatattccatctcaaataactcccatccttgtaattatcacaaactcatggagcatccataatattaggcgtggtaaccatactaccttgctcttactcagaaaaccctcaactctaatatctgggcattgggaatatgtacacaactcttcttccatatttctgtgtgcatgtccctacattcagatgagcccacctcgtttcgacgtcccagattgcctttgacattctctagcatatatacccaatggtggtgtcaccagccagatcttttcttcagcgcaccacatatagtggcaaataagttctcagaggcttttctcttgttcgagttctgatacattcagcataaactcgttgcaatgaagacttctcaaagttcgagatcgggatgtcttcccacgtgtcaacttctttttctgattgatggtttcagcaatagcatcgaggatgagtttcccttgcagcctggagacctaggcgatatccttgcctttggggaatcgttactcctccaacaacaaaaacgcaacaaagtcatggatctgatcccagaacacgtcctctaccggccaccatggacagcttcagaatccagtcttatcaagccaatactctcctcttcatacgtaaggtgcgacctccccatgaccaaataccaagaacagaggagggttgcaaaacagaacatagagcaggaacaaaaaggactcatgaaagctgcgtttcatgtttcaattaacgagcttatgacgcagaggtgggccaaaaaaatgggtttcaaatagtttgtaaagagaaaatcaaatcatgatgaccaacaactcaaaaaaaactcaaaacagagtccaaaggacaagttagaaaccaaaacgcaggatgagggtgagcaaacacaaatactgaaagaaaataggtaggagtttcacctgctcgcattcatatgtcaagatagaatctcatgataaccagtaaacataataaaatgtcatgaacacaaaagaattctcagcttacaggaataatacatgtatcaccctcttccaaggctattcctctatgtctttcctcgaacagctctcatgaactctctctaaccagctgaaaatatccctccactgctcatttaccctctcaaagatctctgctccagactatggatccttccttaccctcagactctttcctctaaaaaatctctcaaaccaacctgaaaaccactgaatatcctcttcctctctactctctgtagatacccagaaaaatcactctctctcccccgtctggcctcctccccaagcaaaggaataccccctccgaaatatctccagccagcagcccaaaaagcaccacttctgccaacgaatcctctctctcctacgctcctccataacggtctgcagactctccagaatattctccctacgtgtcatcctcccatagcttcccaaaaagcaatgttgattctctgatggttaatcacaaggcaacacatggctgcctgcaatgctagcacctggctaaaaaaaatgtaacctgcagaaatgtgagagaaaaaaaggagccccatgtgggggtctacagtatgtggcattttcagaaaatgataatggttggtttaataaagtattttatatatatatatataatgaggataaaggtatatttggtaattatttttaaaaatagttttatgttcttaataatagaaaattgttgtaaattaagagtaatgaatgaccacattgatggtcattatgaactccatttactcatctttaagatgagtaatgggagttcataatgtgaagcctataaaaggcttcttacccctcccatgtaagagcatcccgagaaagaaagaaagctcttcctctcattctctctctctctctctctttcactttctcaattctcttatttgattccttctttcatattatatatcaaagtaagatatattttatctctactactttgatttgcattatatttgtccttgttttacaacacgttatcagcacgaattgctctgaaggtaattctcgtatcttaaacttgaagttatttacctagaataaaattttacatatttatattattgttgatttgttttgttatatattgttaaacgttataaacaaattatttgattttgtttataattaaagttatactaatgctatcaatttcttataattgattctaataatattgttttgttatatatttgaaattatttgacaatgtcgaatatcacaaaactcgaatttgtggcacttgacatttcgggaaagaactatctatcttggatccttgatgctaaaatacatcttgatgcaatgaatattggagctatgatcaaagaaggaaatcaagcatccctgtaggataatgcaaaaacgttgattttcctttgtcatcatctccatgaaggtttgaaaaaaaatgattttttgataagaaatcactagtctcgtccaattggatttgagtcattgcctgaagtgaatgcaatattgtcccaaattcatggacgtggacaaggatgaagacatggtcatggaagaaatccccgataccatggttcttatagtaataattctcagaaaatgaaagcctcattgcaccaccagaagtggaacaatactgagacaatacaagaaagtgggaagcgtttacaagataaacctcctaagaaccatgagaataattgttatagatgtggtatgaaggggcattggtcgcgtacctgtcgtacgcccaaacatttggtcgacctttaccaagcatcaataaaagctaaaggaaaagagatagagatgaactttaccgatggtgatggattggacctaacctactatgacattgatttctttggaggtcccaatgaaaaaacagaccatttgataaatgatgaaaaaattagcattgattgatgttactctatatataaaataatatattattatgtcttatatttacatcttatttactttgttatttacattatgccttgttttttttgttatatctgaaatccatgtgttatttggtctcaagatgaatgaggatgatgtatgtcttgcagactgtgcgaccacgcacacaattcttcgagataaaagatatttcctcgaattgacattaataaaagctaatgtaagtaccatatctggtactacaaacttagttgaaggctctggaagagcaaacataacattgccaaatggaactagattccatataaatgacgcattatattctagcaaatccagaagaaatttgctcagttttaaagatatccgtagaaatggatatcatattgaaactatgaatgaagataatgtagaatatatttacattacttccattatatctggtcagaagtttataatggaaaaactcccggctttctcctctgggttgtatcatacaactataaagcctattgaatcatatgttgtcgtgaaccagaagttcaacgacccaaaagtttttgtcctttggcatgacaggctaggtcacccagggtcttcaatgatgcgtcgaataatcgaacactcacatgggcatccactaaagaaccagaagattctttcgcccaatgaatactcatgtgctgcctgctcacaaggtaaattgataatcagaccatcttttactaaagtcatatctgagtcaccaatctttttagaaagaatacatggggacatatgtgggtctatccatccaccatgtggaccattccgttattttatgatcttaatagatgcttctactaggtggtcacatgtttgtctcatttctacacgtaacgtagcctttgctagactccttgcacaaataatcagattacgagcacaattttcagattatccaattaagacaatacgtcttgataatgctggcgaatttacttctcaaacattcattgactattgcatgtcagtagggataaatattgagcatcctgttgctcatacccatacccagaatggtttagcagaatccttcatcaaacgtctccaattaatagctcgaccattactaatgaaaaccaaattacctacttccgcctggggacatgctattatgcatgctgcagctttagtccgtattcgacctacaacttaccatgaatactccccttcacaacttgtgcttggaaaacaaccaaatatctctcacttacgaatctttggttgtgcagtatatgtaccaattgcacctacacaacgcactaaaatgggtccccaacgaagacttggggtttatgtaggtttttattctccatctatcataagatatcttgaacctttgacaggtgatgtttttacagcccgctttgcggattgtcattttaatgagagtgttttcccatcattagggagagaaaagtcgattcctgaagaacgacgagaaattagttggaagacatctactatgacccatcttgatcctcgtacaaatcaatgtgaactagaagttcaaaggatcattcatttgcaaaatcttgcaaatcaattaccagatgcattcattgatacaaagaaagtgacaaagtcacatatcccggctgcaaatactccagcacggattgatgtccctgtaggacagttaacaaatgaatctaagatacgcttgaagagtggtagacttgtcggctcaaaggatgtaactccccggaagagaagaacccaagaaaaacttggcactttagaagaggccatcaaaatgactgatcagtttaaaattgataaatctatagccctagaagaggcacaaataatgcagaaagcccctgaagaggtacatattgaacaagaagcccctgaagaggcacatattgaacaagaaacccctgaagatccacatattgaacgagaagcccctgaagaggcataggtacctgaaaattgtgagatctcagtaagttatgtacaaaagggagaaaaatgggatcgaaataatattgttattaacaatttttttgctttccaagtggcctctgatatcataagaaatgatgaagatcctgaaccacgaaatgtggaagaatgtcgacttagaaatgattggccaaaatggaaagaagctatacaggtagaattaaactcattaaaaaaacgagaagtttttggacctgtagtccaaacacctgaagatgtaaagcctgttgggtacaatgggtatttgtacgaaagcgcaatgagaataatgagatcataagatataaaacgcgattagtagcacaaggtttctcgcagagacctggtattgactacgaggaaacatattctcccgtcatggacgcaatcacatttcgtttcttaattagtttggcagtctcagaaggactggatatgcgtctcatggatgttattacagcatatttatacggatccatggataatgatatatacatgaaaatccccgaaggatttaaattgcctgatgcaaataatacaaagcctcgtagcatgtactcaatcaagttacaacgatccttgtatggattaaaacaatctggacgcatgtggtacaatcgccttagcgaatacttgctaaaagaagggtatgggaataaccctatatgcccatgcattttcattaagaaatcagaaaccggatttgcaattattgcagtgtatgttgatgacttaaatcttgttggaactcctgaagagctcacaagaacaacaaattacttgaaaaaggaatttgagatgaaagatcttggaaaaacaaaattttgtctcggcctgcagatcgagcattttccaaatggagttttagtacatcaatcaacatacattaagaaagttttgaagtgtttttatatggataaagcgcatcctttaagttctccaatggttgtccgatcacttgatgtgaaaaaggacccatttcgtccttgtaaaaaggatgaagagttacttagtcctgaagtaccatatcttagtgctattggtgcacttatgtatcttgccaattgtacacgtccagacattgctttttctgtcaatttattggcaagatacagttccactccaactcgaagacattggaatggtatcaaacatatattgcgttatcttcgcggaactactaatatgggtttattttactcaagggaatcaaagcaacaattgcttggatatgcagatgcaggatatctttcagatccacataaaggcaggtcacaaacagggtatgtgtttaattgcaatggtactgctatttcatggagatctgtcaaacaaacaatggtagccacatcatcaaatcattcagaaatactggcaattcatgaagcaagtcgtgaatgtatatggctaagatctatgatccagcatattcgggaatcatgtggactctcctctatcaaaggtggtccgacaacattatttgaagataatgttgcatgcattgcacaaataacagggggttatattaaaggagatagaactaaacacatttcaccaaaattcttttatacacatgaactccagaagagtggtgaaattgatgtgcaacaaatacgctcaagtgataatctagcagatttattcacaaaatcattaccaacctcaacattcaagaagttaacacacaggattggaatgcgtcaactcaaggatatcgacatgagggggagtatgcttgtaaaagggtgttagtgtactgtactctttttttccttcgtctaggttttgtcctactgggttttactggcaaggtttttaacgaggcagtcctaatataccaagaaaagaatattgtactctttttccttcgctaggtttttcctatagggttttttactagcaaggttttaatgaggcatattcttttaatatggtggtcatccaagggggagtgttgtaaattaaaagtaatgaatgaccacattgatggtcattatgaactccatttactcatctttaagatgagtaatgggagttcataatgtgaagcctataaaaggcttcttacccctcccatgtaagagcatcccgagaaagaaagaaagttcttcctctcattctctctctctctctctttcactttctcaattctcttatttgattccttcttccatattatatatcaaagtaagatatattttatctctactactttgatttgcattatatttgtccttgttttacaacaaaaataatgtgttttaagataatattttttcaattattttaaattattttcacttatttttttagagttgctttaaaaaaaatatattatacaaatatatatatatataatgattaaaaataaaatattatatataaaattatttttaaaacatattttaaaatattaaaaattgattaaaaatattttaggtttttaaatagacttttgttttataaaatattaaaaaataattttcaaaaactgtttttaaaaacaattattaaaccgggcttaataaaatatgttcgattttactcttaatatatattgctcatactatttagtttgacaagacattgtgtataaaaattgctaatttcattcttatcgacatatacatcctaactttttttttgatatattgataaaatatttaataatcacctgtattttattttttattgatgtcggcacgtgaaaagggcacgtgatgagtaggaatgcacatcccagacattacagaggctgaagcagaagccaaagtgggagacaaaccaga

SEQ ID NO: 10397 - DNA, 3873 bp, Vitis vinifera
  Intron number 1 from transcript GSVIVT01011608001 (locus G SVIVG01011608001) derived from phytozome v7.0 (chr-ID chr1 ; pos 6019369 to 6023241)
tctgcaattacatcattcaatttttcaaatgtgagtccccaaacattaccctattacatttttcgtcttatttcaactgttgattctttttatgaactgggtgatttctttgacatttgaaacacttttacgaattatggatgtacaagatttggtttctcttttgctagtctcatcatgaaagatggttttgttacataaatggatccttttctgatttcaatggatgacttactaatgtaaaatttatgttaatatctgcttgtcttagattttttgctgtgcaaaatttatgtcaatatcatagaatcttttttatttttttataattccattaatgcaaagattgagattctatatttagggagtatagtttcaatgataattttattaagtacatattccctgataactatgaaaatgtgaaggacacaaacctttagtactccataatactccatgtttgatagcagtggcaaaaggcccttttattctttgcttttttatttttaaatgagaaaatctagtgcacatagccccctggttagctcaatggcgctgccctctgtcagtgaatcaaaggtcctgagttgggtttgcttccttgacggtttagataaatgtctcattatcaagtttccaaatgggtgcaaccctgatactgatggagcatgaaagctagaccagttacctaaaaaaataaaaaggaaataaataggagcatgaaagatagaccagtcacctaagatataaaaaggaaataacacaagaaataaataagagcttactaaagatccactttttatttattcatttgagtataattctgcttttgaggcaaaataacaaaatgtatttggtgatatttcagattttattatcctttttttaagaaaaaaaaaatggaataaattctattatttaacttatcctttggtgaattaattttgggtttagtatttctgggaattgctctggcttctctgactcttaatattaacaatgtaaatagaaaagacatatttttcctctgcttggcttcacccctcaaaacgtaaatctcatatcctccatggtttcgtattccttggcttcaccaccaatgttattgaagaaattcaaaaagctgaatctcatatcctccatggtctcatctttccaagagtataatgatctcatgagtatcctcttcaacttcagaaatggtatcttggacccctccaagattcttctatatttgtctttcctaatacaccaatcaattgaatgagagttgttcaaaaaggtgatgcctaggcaagtgccttgactaagggattgaagcaataggggcagaccttctctttttactggaggtgagttgttcctttacgaaaggaaaaaaggatctagtgatgatcatttgaattccaatgatgattatgatgtctagagattctctaggatgttcgcactcttgtttttatgttacttttgattcttttaatgcttggggaactagaattgggaagtagacataataagccttttacctgtatagacttgatgctttaaacaattattattattttgttaattcccagaaatatcttaagggatggaaatttaatagtgttgattattgaatgatattattattattattattattattattatcaatgtgacagtgaaattgatgcttatgttattcaaaatgaaagttaattagttgatatggtacaggcgcacacatatgcaggccattgtttgtttctggcctttcgcctaaggcaaattatggtctaatcaccttaacattgccttcctcatttgacatcattgcatctgccccttgtccatcagtctccaccctataaatctactccataaaagtttttctccctcttccagtcattaaatttcctgataaatatcagattccagtgactttctgtgcttgtccaacattaacaatcttccctctccattttctccattgtattaaataagtttgtgatgttaccatgaaagaagtccatccatgccatgcgtgatgctggaacattcaaccttgtagaattgtatttattacgaaaatgaaattcagagaggtaagagggtgtcgtggacatagaggcagttactgcaaatgaagaattgataaaaacatgaggtgggccttacagttatgctggctgtttctcggaggtccttcatcctcatcctgggggctctacttgtgtcagtgaggggatggtcctcctaagtagtagagtattgaaccaaacaaaattaatacaagtcaaaagccgaaggaatagccaaaatttggagaatctccgttagcctcaaacctaaggtttggtcttccatttggcaacttcttgcttgagaatgaaacgagtaatttttgtaatttcacttaaaattgagtgatttggcttgggggataagctgaagtttcattttttgattggggttcaaactggggagttgctttatacatcatggtaaaaaatttcaggatctggatattatttgaattctagaatagtttgtaaactagaattaatctcataagaagctaggaagccagtgttgatggcaaattttggaaggattttgagaatattgttgggcagtgtcctttgttattttgtactttcataaggaaatttttatattttaattgttattggctgattaagcttaaaggcaatgaaagggggagaaaacctgctctctctatgctctctttccaggtgcatcatcttcttctttctcttcccctgtttatttctttgatttaaggaactcaactaatattcgtaaaaagttataaatgaatcgtaattttctgagtaatttaatgggttttttgtccttcaagggtaatttaaataatgggctttttattatcatctgggagatttttggggttttggaattaagtaggaaatttattaacacttatctatgcattataaaatggatcaccacttactcttgacaaaattcaaaatatggctcaatattttcttgaggggaataagtgttttgatgcttttggttgcttaccctgtctcttgtcaaaattttcaattaattgcttactgtggaagtaaccgaaatggttctattcttcctccttccctttctaaaaggatcttaagagttatttatttattttaacaattgaatacatgtgtttgaatttgaatttgaatttgtagtaacttaggttatcatttggtgctcaaggcattgtatacagggtcatcatctattatacagattatggtttcttgccttgccagtgattgcttcttgtcatttatgacatgcttttaatacatttgaaacgagtgtttcaatttttgcatgtagccttttggtaattcagcaattatttggtaactactaactagtcataccaacttactaagtgttaattccttatgcaatcctccacaagttggcccattgttgactggaaatctaaaagatggccatctgagatgataatgatggatatatgcaatgcatatgttgcaatggaaactgacccttagcagtttacatggagattcttcatttgctcatgagaaatgtgagcttagtcctttttggctagttatatacattctaatgtgttaagtgacttaaagcttattgaaccagttgaatctcctttccatattaggggtataagggtactcagatgcaaataggatctgtcacctttcctgctttctctgcttgagctttttatcatttctttaacttttgctgttgtttgtcaaaataattctattgcttatagttatgtagtgtacttggttggataataaaagcatctaaattgatggtttttgctgtcaacagacacag

SEQ ID NO: 10398 - DNA, 3503 bp, Vitis vinifera
  Intron number 1 from transcript GSVIVT01035999001 (locus G SVIVG01035999001) derived from phytozome v7.0 (chr-ID chr4 ; pos 7000016 to 7003518)
gaacaagcttggttgatctctcaggtactaggtttattgtttttcttttggttttctccttgtgtttggttttgtgattcttagggttttggtgcatgggaaagtttggccggaatttcttttcctggaatttgtttgctctttgatttgtattaagtttgattgattcatcggttgattggtctgaatttgtgagaatgattggtttttccccaaatattccctggagctttgtttattttttagcttatcaaaagcattaacagtgcttgaagaacaaagaaggggcggaagaaaaagacacttgtatttgctaatgttctccagcactatattttggatcaaatttttggtttacgtttcttatatcctaaaattgtatgttaattccaatgtggctaaaaaagaataagtgaattcaaccacgttgatgtctaggaagcacttctgtacctccaaaatgttgtcctagattatgttggtagctgtcatacattaataatggttatggtaataataaaaggaggaaaattttacttccaaggtagaaaaattgatgtcttgcttccagaattagaaagtcacgtgtagagtgattatcacatccaactttatggtccctttttattcctttttgcttttacaatcagaataagtatttttgaaatgttaactaaactttgctttagttatttgttaattttttttttcaatcacatgttagttttccttttgtataattaggattaaccttgatctaaatttctattttgaaatggaattaatgagggtattatggtgttctactattcttctgttttcaagatgtaattgtctcaatttctatatggttggggtatatgtggaagatagtagactgtagtactgaactttggtcattatttttttttataaccgagtaaccttgcatggccaaacccttaggtctctccatgggacccaaaccttggggtgtatgtgggagatagtagtgaactttggtcattattttttttttttttataaccgagaaacctttcatggccaagcccttaagactctccatagggatccaaacctcagggtgctaatggtgtctgcaaaaaccaacactgggtaaattaggatatcattagtggcaagatttgaacctaggactatgtgcctcttattaagacctcacctcccaacattcaccctgaccaactgggctaccttaacaaacagtgaattttggtcattatagaatatttttggtgaatagactgaactgtaagctctcaatcctctttttttcttgtctctcattttcttctctcctctttgttgtcaaccctgcctccccaagaaaggcaatacacttatgcatggggaccccacccttagctatttttagcggtcatgaaagccctcagctgcttgttttaagggcagctcaaagggttttagcaatggtttcaatgtgggggtagagggagagtggttatagaggtctctcatctcctctttgcagataacattcttatcttttctggtgcaaatgtggaccagctagtccagttaaggtgggtgcttctatgttttgaattggtttctggtttgaaagttgatctgtagcagagcaagcttgttccacccggcgatgctttgggctgtagggtgggagattccccatgtcccatataggccttcccttgggagccctgttcaaatctcgagctgtttggaatgtggtggatgatcatttcaataggagattggcctcttggaaaaagcaatatctctctccatcttgctaatctattatatgtcatggtttgtcattccaaagacagtcaattggagaaactccaaggaaacttcttttgagtggaaaagtcctcaaaatgcatcttgtgaagtgggacatagtctgtaaggttaagaatctgggtgggcttggtttaagaaggcttgaaaagtttcaacaaggcccttcttaacaaatgggtgtggagtttttctgtggaggacacttgtctaagaaagaatgttgtagttggcgagtttgggtgagtgattatatggatggtgttcaaaaggagttggagagccttgttgagtaggattttggtgtggtcttgttcagagttgtttgctagcctagggttgaattagaagcccagtgatgaagcctctgttgcaactgtaaagggcattttgtcagatcattagttcaaatttgaagaaattcagccagattgatgagtgaatgatatggaaccttgtatttattcctgctgcaggaccaggactgcagctaaggatatcaagcttttgggtgtcagagatcaatgatgggcgcatcctattcatgtctccatccttgttagtgatcatgttttgtggaaacactagactagtgtgagccagagagaggaagtttacctctcttgttttgaagtgttaggggcagaaaacttttgattttatggtctttcaatgaagagatttttttgagggttttctcactattgaagaaagtttgaagggctttttaccctgacatggtttatttagttgatgaattatatatccaattgtctgctagttctcctcttgtgctgtccattattggactagttatgtgctgtccattattggaaacacattattaatttagtgtatatttttcacattcaatgagatccccagccacacataacttttttctatgattgagctacttagtaagctgaaatgggttatgaaaatagtcattcatattgttaggttacaatattatgatttgaaatgagttgcaataatgtgatatgaaaaaacagatcattggacaacttcttataataatattatataagccttttggtctacaatattcaattatatgctttttggttttaacccaaattgacaaaaaaagttgatttttgtcataaaactgaatcaaagcaaacctaaacaaaaaaacctacttagatcagttatcattatttaatcaaactgaaccaaaccaatgagtttcctctttaagttcaattagttcagttcttaatgcataaaagctgattagatcagtttggtttgattttaatattcaaaaccaaattgaatgaactatgcactcatagatacaaacatttacagtacccaaaaattggtgcttggatactgttttactagaattggctgcatttgagctggtgaatgctatttgtcactggtttttcttcaccgcctttgcttttgttctccctttttctatgccagatgaatgaagtgttgctaggccatctaggtgataaagttggctattgaagaaaaatgaagtatatcactattctacaagcctcatagcaaatttttaaagactcttatttatgatacaattacttaccatttttatcttctttttttttttttggtcttttcatagtttaatcacccaaatgtttgtgatgcatgcagcaaccgaggccagtttcttgtacttcctgtgaaac

SEQ ID NO: 10399 - DNA, 2376 bp, Vitis vinifera
  Intron number 3 from transcript GSVIVT01023725001 (locus G SVIVG01023725001) derived from phytozome v7.0 (chr-ID chr1 1; pos 10163061 to 10165436)
ggtgagtagtatgatatgtacacagttcttggtctgcttttgagttaaccatctttttatagcatagttggatgcatgttttgttgctgtcctggataggcatggtccagataaaagtgctatttgctgttttatttctgggatatataatttgaatgctatcattcttaatattccatttttcttggtgcctatttattcttaatgtatgattatgcataagattctcttgttttcaaacttataggtgcttatatgtggaatgaaattgaggaccgaaccttgctttctcctttagggtataccccagagtttcatgttctgctggtgtttatcacatgatgcttgtattgtctgcttggagttggaacagtgatatacacttttgttttcaacatggatatgatgagtctgttagagcaatgtacagaagttcattgctcgtttgttgggctatgatgagtctataggcatctctggcatagtaacaaatggtaaatatacaatttaccttgttgggctatgtttggaaagagttggatttataactagttggttttagatttagtcaatataatgtggctagttgaattctcctagattctttcgctattctggtctgttgtttggtggattctttgacttccattatctggtgatttgtgacacaaatctagatggtgccagtgacgaaacaaacttatgaaggtgttcagtgatagaacatggtgggacaggcagtggttgtggttgttgttgggggattgggaaacagtgcatctctaaccgatctcagtcctgcagaggaattacacatcccattcctagcttgaatctacagtgggggaggattgtgagtcccatcccctaaatcaggatgggtagggttgggacattggtatattgattaaaaaaaaatttctaatcatggtctgtttgttttattggaaaatgaccaaaaaaaaaatcacaagaaaagaaaatctatagctatggtaattcataaaacaaccctaaaaatagtctcattttcttagaaggaaaatcaatctttttaaatctagcaaatttaatgaatccgaatcaatcctactcaagccactcttaaaaacaaaagaggtattaataaaaaatgaaaataaaataaaaggggactccgaaatctagtaaaaatctaaacccaatatagaaatagttcaatctctgaaacaatctttcaattggaagtctgcaataatctgatctcaaaaacaacccttgcacaaaccaaattgaactgatgtcatgtcccaatgtcaaaaacagagctcaaacaaacccaatctgatatcttaaaaatgaaaatcaaagtaaaagtaattgaaacaagttgaagattgcagaaaaattgaaataccaaacaagaaatgtgaaagcttatagaaacatgagtgcctggcaagactttgattgcttggtggatgctttgattgctattatgtagtagtgtgtatatatatatatatatattgcaaatggataagcatttgcttaaatataagcactgaaatgtatgctgaaacattggaggaacagctttttgacaagcgactgaatatttttctttatgataacaaataacaaatcaaaggccttcaaaaagtaacaagcttaatttttttaacatattgattttttttattttttaaagtgttcttgtttcttttgtaggtttctttatttttatccattgcaaccatagcatacaagaaaaagtttttccaatggagtagaagaagcactatccacctttgaaacaatgaggggtagaaaaaaaaatttaagtttaggttgcaaacaatgaaaaccccattcccatttcaaatctatcgtcataggtggattgtagcatttatgcaggttttaatttcatgcaatatgttcaaaatatgagcatacagatacgacgtccatatcattacatgctgacaaatgaggcaccagatactccatcttgaaaaactgtgggagacttgggtttcatactacatcatctataaaaaaaggaagaaataaagaaaccagattgttatttactggtgtgggtcaacactgctaaagtccaatagaacatgtgatttataaaaacttgatttttggggtcaagatcattctctccatttcacttcccttaattcttttattggtaactaattagtaggttttgagcatgataaagttactttctccttttatttctatcaaaattcataccctctttcagttttttgccagtgcttggattttggtgaaatttacttgtgatgggagatttccttcaattatcttgaatttttcctgtcttaaatccatggttcaatggctgcagattgagaa

SEQ ID NO: 10400 - DNA, 6666 bp, Vitis vinifera
  Intron number 2 from transcript GSVIVT01008255001 (locus G SVIVG01008255001) derived from phytozome v7.0 (chr-ID chr1 7; pos 4013881 to 4020546)
ctcccaaggctgtttttccctctgtaagtgttcgcattgcggtgattctacttcgttttgtcggttgtcactgtctgtgttctgttttgctgccgagaaattgaggagaaaaatatgaaatgagattattattattattattattattattttttatgtttttttaccctaaactgaaaacaatcacattttaagtgtttggaaaatttataattgttcaagtcttgccttttttaaacatgctcattttttttttttttacttccaaaaaccaccccatcccaccccaacccgactccacacacacacacacacacaaaccctcatttggtccaccaaacagctctgtacgtttcattgtttcagttcccaccaaatagctccgtacctttcagtgtgtggatgtgcgacgtgtatacttaagttatcaatttcttcttttttacttctagtactcctttttttttttttaattcggattaaaggaaaaatggtaatatcataattccggaaaaatcaaggttgtttaatgtgggataattagaatatagctgaaaggaaaaatagggaggataatgcaagataaggttcacatagagaatgcatgccactcatcttggatgtatgtacatgttttgaatccaaacattatgaaatgttttgaaaatattgtcgttagtttcctttgcaattggccatttatattttaatttcacttaaatctactactttaaatttaaatactaatatttatgaacttattgcatgttttagaattgatgtcatctgattttgctacttgatatttccttgacttatatgtaaactactaatacgagaatgtaattttgtatgtatttacatacatgacgtatatatgtatgtatgcatgtaagtttaagtattggttatctattaacaccaatgataaaagaactaaagacatattttcaaaaagttaaacacaaataatcgtttcaatatagaatggggtttggccaaaggtggattagatggataaaatggtgtatctccacaacaagcttttttgttctcattaatggaacttcgtttggtttctttcagagttttaggttttgaggcagggtgatcccctatccccttatttgttcatcttggctatggaagcttttagttagatgttggctagagctaagagtggaggcttcattttgggttttaaggtgggaataaggggtggggaggggatggaagtgttttatctcttgtttgtcgatgatgctatgattctctacaacaccaatcgtgatcagttgagatatttgagttgggtgttatgtggtttgtggtgatttttggtctaaaaattaatttggattaaaaattaatttggataaaaatgaggttttttctattggagaagtagctaatgtggaggaattagatttggtgttaggttgtagaatagggaagttgcccacttcctatttgggtccccctttgggagcctcttataaatcttccaaggcgtgggatgtagtgggggagagatttaggaaagaattgtcgatgtggaagagataatacatttctaagggtatgagacttatcctgatcaaaagcactttatcaagccttccaatttatttcatgtcctgatttgtcatcccaaaaaatgtctgttcaagacttgaaaagatccaaagaaacttttgtgtgggaggtggtgtattatagaaaagaccatatttagttaattggaacatagtttgcttgggaaaaaaggatgggggtctcggaattcaccatcctctttgccttaaacaagacattgcttggcaagtagaattagaaatttgctatagaacgagaactcttattgaaacaaatcataataaggaagtttgaagaggaggaaggggtgggggggttgcgtttgagaggggtgagagatggatatggggtgggggtatggaaagccataaaagacgaatgggagggtataaaaagtaagtcttatttttcaattaggaataggaaaaagtttaaattttggaaagacttgtggtgtgaggatctaaccttggaagaagccttcccgaacatattctcttttgcttcttacaaaaatggatgggtgctagctacatgggagtagtttggggaagggggtttggaaaaatgactagtttaataattgagagcttgatgaagtggagattttatttcaaaagttacaattgctgtcaattaaaagggaagtggaggactgactgggttcgaatgaattcaagagtgacaaattttcaccctccaaggtagcccggttggtcagggcaaacactgagaagtgtggtcccagtaagtggaacatgatcttggattcaaatcctgccactgaagataccctgaatttatccggtgctggttgttgtggggcggtcaacaccctgaggtttgggtctctatggagagtcttaaggacttggccatggaatgttcctcggttatcaatgaaaaaaaaaaaaagtgacaaattttcaattagatccctttattcttccttttctagggatataaagagcctttcctgagtagtatagtgtggatcacttgggcattggtgaaggtcgatgtctctgcctaggaaccatcttgcaaagatgaaaaggaaatgacataccacttgcttctgcattgttccaaagcaagaatgttgtgacaaccgatttattctcaatttgaaatggtttgggtgatgcatccttcaattagaagaaacctattaggtcgatatgactctttcatggggaagaaacgaaagaaagcatgaagggttgctcccctgtgcttgttgtggattctttggaatgaaatgaacgagagggcttttaatgaagttgagcagtctgaccaagcaattaaatccacttttatatatacttttatgaattggactaaggtgtatatagaggatcatacaacgtctatgatagattttgtagattggtttagcttaaaggaaggtgagaggtttattatttttatctttcttgcccatactgaatgttttttgtatactttgtgtgtattgtgcaatgcctcgtcttagatgcttttaatatatgctctcttttccctataaaaagaatataataatgtcttcctaatccctatttagtataatagattatttagtacgtagtgatgtttttaggctttatttttgttttcttgtttttttaaatcaagtgatattagaatgaaacatataatgaatgaacaaaagaatacagaatcttacatattgaagtcaaaaataatatttacttataggtagtattctaaatacctgataatttctgttgccaatggtaactacggtctactagttattacagagtctactgcgtgtaattttagagagtgaatccttgggtggacaaatgtaggattgtttttcaagttatagatgaagctaatataagcaggcagtagtggcatcatgtatctataggtgtgtgttatgtttatgttcgtttgtttgtttgtttgtttgttttttttttttttctgtttgcttcttggtttttggtgtgggtaggaggggtttgtttataggtgtatgctatgtcactcaaacactcaagaatgtggtttttattctttttattttgttttattttttttaaatttttattaatgcatttgggaacctgtgaatgcatgttgactctcgaatacttgcatattactcctttgacttactgttgatgcttctaggtaatctcattcaatttcttgcattggtttgctgacacaattgtcatcattaaggcatgcctagatatagtactttgaatttttttattttacagatttataaattatacaatatttttatattttgaatttttaatatgattgatattaagatatgcctgtgtttctgtgccatcattttattgtggtttatgcacatgggaagcattggacatgtggtataccattttattgcatgttgatacatgtatatattagggcatgtctgtctctgtatgagcgtgtgaaagatgaggttagggggttggtagaggggatatggttggtttttgcagtttgtgtatttgtgatgtgtgggcaatgacacctgtgcatcatgccactttgttagggattgtgtatattgaatctaaggtgctgtgtgttgtggttaaaagtttgatctgaaaacacagtcataaacaggaacctttttgataagaaacaaagataaaattttattgatagaagaaagagagaaggatgaggggtccttttctcaaaatacaaaacctgatcaaagtaagagtatactcctttactatgaattacaaaccgaaagccaaattagttgaattacattaagtggaactcccttaaaagcgttgaaacaagaggcccaaagggacgagtagaaatgaagtacattgcacaatgtctctccattctccattaatcctaaaaaatcttagcgtttctctcttgccatacaatccaaagaatattgaggcaagcgatttgccaaaaagttctacctcttaatgaatttcccaatcctctaaaagagataaacaccatatatttgatactcctcggcaacacccaagccaaattggctaaattgaagagcttatgccaaagcccaaagttaatgggcaatgtagacaaagatggtcgatcaattctccactttctttgcataaaatgcaccaatgtgtactaagggatttgtagggtcttctcacttgtagcaagtgattggattcaccatcttgtgcaccaccaaccaaacaaaggccttggcctttgaaggggtgtttgatttccaaacaaaattggttggaaataaaggggttggatatgaggatttggacaagacataaagaaagactttactgagaaaaagccagaggaggataaagaccaaacccttgaatttgtgatggtgggagtcaagcataccgaggtgagtgatgacataagtctttcaagagaatcaattttaggattagtgaggttgtgacaaaagttaaaattccaaggcaagtaggaagtactagggatgactgaaatggtgagatttttaactgagataactttttcataatcgggaactttgattttctatggtgatacatgacattctccacagtaaatggttgtacattgtaacctatacccatatgttggcccaagatgtacatagttgtaggccctatgtccctttgtgactttattgattggttgggtcatcactaagggaggggagtagttttttgtttccctttccttttttggccatctcttggcggccattgtatatgtcttgtgtactttggtgcgctttctttttggtgcttttaatgcatttcttgtttacctataaaaaaaatatttattcattgcaatttaattggcaatggtatattcgttttttgagatttttttggtttgttctttctacatggtaaaggaacacacgctcaagaggtacttcatacatggtgtggaacacgtgtgcttatagataggattgttattgacgaggatgaatctccaagatttatatcaagaaagggaattagtattagttgcaattaaagtataattagtattacttggaattaaattaggattaatatttgttggagtctaattaggattagctagttaagttataatataattagaatttgaatcatgataggttattagagttctagtagactttggatgttataattagaattagaatcataataggttattagagtcctattagactttggatttcctagaaaagcctataaataggttaatcaatgtatgtcaaagggataattgattattagtaatattatgttttttttcattgcaaggttgcaacccttaatggtgagactccattgattttcttctaggtgagactcctctagtaggccttagtgggactctaaggttttcgatcttttcttcgttgttttttctttttctccatttcttatgttatatttttctctaccataaaatttattccttgttcctcttcttacaccctaaaaataaaaccctaacccacctacccttgagtgtaggcaaccatcctagggttgtcctacatcagttatacataggatgagagcttgagaaagagaaaagtaaggttgtatgctttcgagtgttcctctttaggcactcttaatacaattgcttttacttatataaaaaaaagtaaggttgtttatggaagaagtaacaccggattttattgttgtggccaattcttatgtaataaatttttattatctttttctttctttctttcttctttctcttttgttttttctttttctttttcttcccctgtttttaccattagagtgactataactgcgagaaagaattcacttgtgaaaaagaggcaggaccttgaggtgagagagatttttctgttccttttttcacaataatttatatatgcctatctctatagccatctacgctcatatgcatatgtagttggtagtttccaaattattttgttttattttaatgtaggtatgtatggtgcttaattttttttgtcttgctctactgtaattcgtgtatatgtttgttaaggttgttggatcaattgatcaa

SEQ ID NO: 10401 - DNA, 1147 bp, Vitis vinifera
  Intron number 9 from transcript GSVIVT01038219001 (locus G SVIVG01038219001) derived from phytozome v7.0 (chr-ID chr5 ; pos 24450868 to 24452014)
atgtgagtctacttaaccagtaagagggatgcattggtattagaagtaaatatcattaatcagattctgttattttgttgtttctgcaaggacaggggataatgccatctttgtttgcctatgtgtgggtgatatatctttcttcatgagtgttgcatatgcaacgtgctgtgtaacatatggttataagcattattaagagtttatctatttattgtttactattattttcccctatctctacagggattggttagatgcatagacacccaccaccagcacctggcattggccatggccaaccaacagacccacctctcccccgtttggggatgctgttgaatctctctgtaacttttatatgacttggtcccccaattttgtttgcacattttaactgatcccccacagaagtagtgttttcactttggcccctcctggggaaagttcctggttttgccactgcacacatctgcaactgtaaaatgcttctgagtccatttaacattgggagaaagtagaagaaaaccagaaatgaaaaattgtaataagaagtggataatttttctattggacaccctgtcaagcttgaacatcctggcatatccaaatttgtgttcagcttgcctctatagatgagaatgggattaattgagcagaactgcaagttagaaggctctttgttcctaaatatgcttgcttaggaaaattttaatgggaacgatctgcatctaagtctcatacttgaaggacgagggccaaagtagctcaacttgacatgtggtttatgtctagtatcgtgatattgtcaccaagtgtgtgcaaggttggggattggcaatttatagatctttccaccatattttaaaaccttagtttctaaatttttgttcactaaaatatagcagtgaagcatttgcactatatttgtctgctaccatatatcctaggtagaacattcattttgaagattccttttctcatacttgcaggctgaatgtaccatagcactctttgtagttcacaattagatgaatgattgctattgaaattgacacggatatctctttaattgtaattgcactggatgaaatagttgttggttccttcaggttcgggatattacccacttaccctttgctgagcg

SEQ ID NO: 10402 - DNA, 30727 bp, Vitis vinifera
  Intron number 4 from transcript GSVIVT01001469001 (locus G SVIVG01001469001) derived from phytozome v7.0 (chr-ID chr1 3; pos 21320630 to 21351356 reverse strand)
ccactgaaatctggtccccccggtgcagtaatttagttatgaagaatgcatcctgcacagcccctacatcactcagtttgaaccagccacaacccacaaaacagagtgccattcctcagctttctcctatgccagatgccaccatccagttccattctgaagtgatgcagcgctcaacaaaacagcgaaaaataaagagcataccaggattggttcaactatttcaggagctgagcactgaaagcagtccaacagtcttcagcattgattcagctatttcagacattgaaattagcgtgagcatctcacccttgcctactggaaaggcaaatcatcacagcataagcttcagtccctccaaaaccaatcacaatatgcatcctttgccaaaaggacaggcaggaacataccagaacgtctcaaaagccatccctgaacctcatccaaagaaacttctatgttggaattgtcgtggagcaggtgagctcaagttcatgcgagctataaaggatctaatcaaactacacgagccatccatagtagttcttcttgaaccaaagatttctggtggtgatgcagaccaggtcatcaaggaaattggcttctctggccaataccatattgaccctgagggctttgctcatggaatttggattttgtggcagacagaggatgtccgtgctgaagttacttcatctaccccacatcagattcacttgtcagttcaagtcctctctgaagccttcgatggtatgctttgtggagttggtgctgatactgatgccctcaatgggattccatatgaagtagatgacaatcttgagccatttactcaacattgggactcaagtttcttttatacttcagagagcctgatgtacccaccaacctcagaatgggttcctttctcaaaggaagttgaggtaggacagatttcatcttgggcttaagagctctatgttttctcattgccatttgcctggagctttgcaagtttccatccatattcatagtcattctctcaattaattgagaagaagcttcatgcttgcattttagaagaattgtttctcaagaagggagttcctctgttatgatttagaggggaaagtgttgtattccgaatatgtacgcataatggagtattgttttgagtttgtggttaccctttgcacttgagggttccatgctaaatttcctttcttatgttttaggggggaaagtgttgtatttggaacacaatgcataatggagattgctttgagtttgtggtttcccttcacactgaagggttccacgttaaattttcgtgtttgctgtcttgtcgtttgtttgctagaataaatttcttctcagagaatatatgattagcagataaaacattcacctgattcgtaagattaaactgccatcaccctccaaatggattagacttcatgcttggcctagcactcaactttttcccaaggactatgaagttgatctattagtttttctgttcatcttttagttttcctactgtatgcaaacacattggtggatccattgatggtttcacaaaaataattaggttcccccatgatttttagtcaagattaagattctcagtagtgctatttcttggtgattgcttgattctaagttaccagattccttgtaagttccaaagcaactacagtacccatccatttcatactaaaataatcagaattgttatcatatacagaaaagatggcataccttgctactgggttaagaactcagagaattgcaggagcttgtgggtgtgaggctatcatcaatagaatgagaatttggttactagtttatgcatctttcatctcctgactgagtggtgactcttctttgttagtctgaaaatatactcccaattcaaagcttccatttctggatgctcatgaagctggttgctagaggtttgattgcttggtttgcattctttgtatatggtgaaaatccctttgttttcaataaagggttgatttaaacattttttagggtgcatttctttactggatccaccccaaagctggcatttatcccaaattgggattgattctgattaaagtgtttttgttagtagtgcttttattaaaaacgcttttaaaaatgatcgcataatatttggatgcaaattttaaaaaattgatttgatagtatttttataagaataatttattatgtaatattccataaattttaatagtgatttaaaaaacttgtttttaaaacgtaataattttttaaaaatgtttgaaaattttattatcttaaatgaaagttattactatttttttttaatttttaaaaataaaaaatagacgtgtattcaaatcaatgcttaaataattaaaagtctatttggtaatgcttttagttgaagtatttttaccaaaagcgtttccttgtgtagtgctatgtgaaaaatacttttattagaatatggaaaaatgattttaatagtgttttagacaatattgtaaatgtaaaaacacttttaatgttgataaattaccaaaaagacataaaatttaattataaaaaaatattataataaattaaaaaaaattttattataaaaatatatataacacatttgtgttaaaaaaaatataaatatttatattattaaaaaaataaaataatcatttttatgattacaagaaaaatttgaaaaatatattttttctaaaataaattaataaataaatatcgtcatgatataataaattttctaaataaaacaaattatttgattatatattagattaaaaataataattttttatcaaagaacaatcatcaacaatgattcacaattcttcttaaataaaacctacttcctctttttcttcttttttttttttttaaaaaattttcaatcaagtaaaaacaaactcaacatccgcaagaagaaagtacaaaaaaggagacccatttgtggtcaatgtaaaaaacaaaatggaaaagttcaagaactgaatcatctctcgttgtggatttattgtatcataaaagagggagatctgtccaaacatgaatgtatatgtatatttggattgaataaatattcactaatttgagtaataactaccaaaagtatttggacattgatagtggacaacataagtatctagaatgttatttaatgttcaatctcccttttaacttccatgtcaacaacttaataaatgagatttgcataaataaatcatcacaaactatccattcaatccaaaaacctaagtgtttgtttgaataaataagtgtttgataaaatttaaaaaatatttttaaaatctaaaaaattatttataatatttttttaaagaaatatttgacaatttttagagaaaacactttcaccataaataattcaaataaaaacattatcagacagactctaaaattcattgtatatctttatcagagtctctcaaatgatgattgatgagcctctcaaatgcttatcgggatttatcagtctcccatgtcatatacaaaatatttagactatgattatttcttttgttcatattccactgtgatttcctcaaaattttcagtgacaaaatgaaacaaggagtccatttccataaagttaatgaaaaatatattcataaagttaatgaaaaatatattcaagtttatcaaagattttggttggtttagaattgctgatagttaaaaaaaatattgattttttaatcaattatttagggattagtgcttaagtttgcttttgtcaaaaccgcgttcatccacaaccgcagccgccatcgaaaccactaaacgcgttcaagcaccacctcattcaccactgaaaccagaaaaacagttcctccaccgccacagtcaccactgaaaccagaaacaccaccagagtcatggcttcgccaacctctccctccaatccaacaactagtgaagatgctcccactgatgggacctcccgcattcctaattcagaccttggtgatggccccaaattgaggtattccccaaccgaattggcacgtctgagggagcaatggaagtatagcctcatcgccaaggtccttggcaaaaagctccagctgcaatactatcgtgatcatcttcttcgcctttggtccgctgagggaagtctgaaaatcattgaacttgggtgtgagtttttcgtgctaaaattttcggaatttctggattatgagaaggtacgtaaaggggttccatggttgatccatgggtactatattgctattcgtccctggtctgagaatttcaagccttcagaggccaccatcacccacacatgggtctgggctcgcctcccagaactcccaatagaatattacgacaaggaggtgctgtttgaaatcggagaagctattggcagaccaatcaagattgatcccatcactgaaagacaggaaaaaggcagatttgcgagaatatgcattgaagtagatctaaggcgcccgcttattgcccatgtagatcttgctgggctccagcagaagattgaatacgagggtcatgttgggcaactgcagcagcttcctttaccacaatcttcacaggctccaagtcacagagccaacagtggatcaaagtcaggtttaagggccaggggccttgaacaagtaaatcctctttttccagcaacagtactcaaagaaccaagagggaaatctgcaattacttctgtgagtataacctctccttgtgttgagatgaatttagaatccaacaagttgttggggaaaaaacggcatctccaacctggcgaaggtacatcctcatatgtccgagctgaggatgtgccacttgctgtggggaagttgccaagccccatggagactcctaccggtcatttgcctccatctttagagcctaagatgtcatctaaattgtctggtaagtcggccaaattgccacaagattccttgcagcaaccacagaatcaccaggcttatcccctgcttccttccccaacagaatcctgttccaacattgtagcttcacctgtcaccaacaatccaagaccaacaaaaggccttgtggtttctccaccgcagaaaggctcttgcttccccacttcctccacctccaaagcttcactcaatttggaccatattgtaacttcatctgtcaccaacaatccaagaccaacacaaggccttgtggtttctccaccgcagaaagcctcttgcttccccacttcttccacctccaaagcttcacccaatttgaactgtattgtagcttcacctgtcagcaacactcaaagaccaacagaaggcctagtggtttttccagagcagaaagcctcttgcttccccacttcctccacctccaaagcttcttccaatttggatcatattgtaacttcatctgtcaccaataatccaagaccaacacaaggccttgtggcttctccactacagaaagcctcttgcttccccacttctttccctgccgccattaatgcatcaaaacagactgcctctcctcaaccttctcctatgcccaacttcaatttccattccctggaaataaaagacttttcagatccagaagatgcagaaaggaaaagaggagaagaaatggagctgagctctgagaaccatccaaacgacttcagcattcaaagaactccacgggtcttcagaactgaaccaaacactcccaactttggaatccgtgtcaatttctcaagaactgcacatcagcacaagataagattcatccagccagaaaccagtagcactatgcatcacacttgggcgaccatccctgcatcttatccaaaaaaagtcctagtttggaaccatgctgaagcaggcaacctcaatttcgtgccagcaatgaaggaactaatccaaatgcacaaaccctccatcatacttcttcttgagccaaggattttcggtgctgatgcaaatcaggtcatcaaggacattggcttctctgggtcacacctcttggtccctgatggtttggctcatggaatttggattctgtggaaaggagaggatgtccatgttgaagtttcttcatctacatcagctcaggttcacatagcagttgaagtaatcgccaaggcccagaataggatgctctatggagatacatgtgctcaaccttgggggtcagcaggctatttttataatccaaatgagccgcgttactcatcatccccggaaagcgaattctccctttctgagaacgaggtacgacacagaatccccgccccattactagattttctatttgagagacaaaagatgggtgcaaccatgtagcttctgctcccccagagtgatagctcaaaaaatagccctatcatggatgtgaggtcaaataccattcctcactagacatcaaggtatatttggtacgcgggaatgacattcccattttctattccaggtttcaaacatggtctgattggttttgaggttagatggtgaaagcccgtcgaaaagcatacttgtgctttgagagagaagtttgatgttaaggacgtccctctatttttgatttagaggggaaagtgttgtatgtgaactgttttcacgtagtgcagattgctttgattttgtggtttcccttcacagaagggtttccacgtgaaatcttggtgtggtgccttgtttgtttgttttcccgcaaaagtaaaattctcctaggatgatgatatggaaatgaaattacttcatttctacaccagatcaggttgaagcagcagttgaagtcttctctaaggcctggatgttttatgaagttggttttaccggtcactgcaacatgatgcactgtgcacatacatctgctcaactttgaggcccaaattatttttataatccagaggagcctctttgcccaccaaccttgcaaagggtacgcccactttctggggatgatgtaggacatagaatcccatctccatccatagattttctatggtttggggagccaggatgggggcaacagtgttttccatctcatgataaatcaatgaaaagaattttgattaaaatcaaaatttaaaatatcggtaaatacaaatatattgatagaatagaaatggttcaaaattgcttagaaaacttaaaaaaaaatatgataaaataaggaataatacatatattaaaattattttataagtgtaattaatataagtatgattaaagataatatttatcaaatttttataaaaaaattagcttaaattcctttaatatatttatatttatttattttaaaaatctaaaaatacttttattaaaacatgttttattacattttaaataaaaaaaattataattgatttatatgaaatattttatttaaaatttaatttctaaagttttattacaaatatatggggataattttttctattaatattaatttatttaaataattaaaaattatattaatagtttatcttagcaaattaattttaatttacatataaaatattataactttattattattattattattattattattattttcatattttagcaaaatttgactaaatttatatttttaattttttaaaataaaaacattcaaaattatatatgattttttatactatttatatttttaatattcaattatcatataaatgatggttttattacttttagtaatcaattaaataaaatttaaaataaaatatgtgtaattaatttatttattaaaacatagattgaaatcaagaaaactcatctgtgggtataaaatcattctttaatatagtattggtagtttgattcatgtaccttaacttataacttctttggaaaaatgtaaccatccctatcaactaaacctccattcattgataccctttgagatccaaaaaaatggataagttcctttcgagacagaatctgtaacttactatcctctaacctagtagatattattttcattaaaaagattattcattcatatagacacaagagtccaactacattacattattagaatctatgttgtatatttgaaagatgagaggttggtctccttgctttttttatggtacaatcctcttcctgttaagcctatacatatatataaaatgattatgcgtatttaacaataatattttttgttttataaaatttgaataatttaatcattcatataattaaaaaagaaagcaaacacttgccaaattatagatagtagaatgacttccaatttttttttttttttcaaattatcgaacactaagattttgtatattatttttttttcactttttattgtatgatgtataatatcttattgagtataattatttgttatttctattaattacaatatccaaaagatcatagacagtcaaaattataatgagaaattgactcttttccttccattttttaacccttgatacaagattttaatatcaacgcttcttccaagtgagaggttgaactccttgtccaatcaaaaatagatataggttatgtttggttttgggaaggttttaataaaaaaaaatgttaaaaaaaaataatttttccatatttggttatggtatgaaaaaaaaatcaaatataattgaaaatttatatattttcaaattatttgatctttatatatcataattaaaataagcaaaatgaggtttaaaatataatataaaaataatttattaactataaatttatttattttcattttttcttttccttcaatttttcttcactattttctttctttaatattttctctcaaatttattggaaaccaaatataaccctaatgtatcttgccgatgaaatcccctcccaatataagtacctttgaaagggttttgaagatctttgtttaatatgtaatgttgaaggctcattgagatgagattaagaaaaacaaccctttcaaaatttccaacaagcccaaaaattctacgagtcccaaaagtcttcaaatccaaagtttcaaacccatgacatgttctctctaccataatgggtaaattctacgttctttccttggataattaaaagaaataaaaaatgatgtgcctatcatacgagctcgcatttcattagggaagaaagcttttgtcacatcagccaggaatatttaaaatcaagatagctctatatgtattaattggtttctccactctcttgccagcaatccaccatggaaaaacacaacaccacccccatccgccaccatgcatggaagcttcatccaccataaccgccataagtcaacctctttcaccacaagccttcatcactctcctagaattatctccttttaagatagctcatcctatttctctctcacctcttacattgttgcattctcctcttaaacttttgacaatcaactgatgtaaacaaccctctcaaatttctaagttcacagacctaaaattcttttgttccaaactcaacgaactcccagacatccccaaaacaactgttacttccattaaatttgaattatagagggtgggggtgggggtgttacatagactatgactattctcttgtccataatccataaattctttgttgtttcctcatgacttaattgacaaaatgcaacaaccaactcattggcatgaaattaatgaataaaccttgttaatcaattaattaattcttatcattcaaaaggtatattaattgattctaatattaattagaaaggaagttgtcacatcagccacaaatatttaagattatagatggttctctatgctttcttgctagcaaacccccatggaaaaacacaagaacacctccataggcgaccatggaagctccatcccccacaacaaccataacagtgaagctccttccccacaacccttcaccacccaaccttcatctgcaatctctattcccaagccaaccagtgaaaaaactgccattcatgggacctccctcatgcgtaattcagacccctcgggtcctaatggtgacgatggtactgattccactgtcccaaacatcaagattccctcaaccgaattggcttctctaagggcaccatgggagcattgccttattgccaaagtccttggcaaaagggtccggttgcgatactactacgatcgtccttcttagcctttggtctcctaagggaaccctagaaatttttgtacttgggtctgattttttcttgctaaacttttcacttcctatggattgtgaaaaagtacttgaagggggtccctggttgatccatcaacactatatcactcttcgtcaatggactcctaacttcaagccttcagaggccatcaccacccatttaaaggtttgggttgacctcctggaactccccatggaatactacgataaggaagtgctgttaagggtcggagcagctattggtaaacctgtcaagatccaccccatcactgaaagacgtgaaagggttagatttgcccggttgtgcgttgaaatagatctaaagagtccatttctttcccagataaagattggccaaccctagcagcaaatccaatacaagggtcatgttgggcacctgtagcaggacctttcacctcatagtccttgcccctagtgccaactccatgcccaaaccaaaagaaagaaagtcagaaccatatcagaaaggctgccttggaaatgaattagcactatctggttcagggtttatagtctttgaacaagagactcctcttgatccaacagctgaatccaaggctacaaaaggagaatctgtagctactacatctgccagtataagcttcccagatcatattgggaagaattgcagacccaataagtcaatagagggaaagcaacatctccagctcggagaaagcacatcatcgtcttcaatgaatataaaaacgtcatttatcccagttgaggaaaccctttctggctgctcgaggacaccttcagaaccacgacaacgacagacgtctcccccatctcttttcccgaccctgacaaccatcaataagaatccagcaccaagacaagaccttgttttttctccaccacaacaagcccctttcgttgcctcttcacaaaaaccaaacaatgatttatcagtaaacacatcattcaattcgaacttacaccaaggcccaaaacaggctgctgctcctcccaactttagtctataacgctttatggcacgggtggtggcacgcatcgcgtgtcttgggtgggctcattggcaccaagcaaggcctcgtggcacccatcgtggcacggatggtggcatttatcgcgtgtcttggctcgattcccgagcaccatgcaaggccccgtggcacgcgtcatggcacgtgtggtggcacaagtcgcatttcttggctcgactcacgagcaccatgtaaggccccatggcacgcatcatggcatgggcggtggcatgcgtcccgtgtcttggctcgactcttgagcaccatacaaggccccgtggcacgcatcatggcatggtcggtggcacacgtcatgtgtcttggcttggctcgtgggtaccacccaaggccccgtggcacgcgtcaagacacagatggtggcacgcgtcacgtgtcttggctcggctcaggggcaccatgcaaggtcccgtggcacgcgtcatggcaagggcggtggcacgcgtcgtgtgtcttggctcagctctcaggcaccatgcaaggtcccgtggcacgcgtcatggcacgagcaatgacacacgtcgcgtgtcttggctcggcttgcgggcaccatgctaggccctgtggcacacatcatggcacgggtggtggcacgcgtcccgtgtcttggcttggctcgtgggaaccatgcaaggcctcgtggcacgcttcatggcatgggcagtggcaagcatcccatgtcttggctcggctcggctcgtaggcaccaagcaaggcctcgtggcacgcgtcatggcccgggcgatgggacgcgtcacgtgtcttggctcggcttgtgggcaccatgcaaggcccagtggcacgcatcatggcatgggcggtggcacgagttgcgtgtcttggcttggctcacgagcaccatgcaaggccccgtggcacgcgttaaggcacggatggtggaacgcattgcgtgtcttggctcggctcccgggcaccatgcaaggtcccgtggcacgcttcatggcacgagcggtgacatgcgtcacgtgtcttgggtgggctcgtgggcaccaagcaaggcccgtggcacacttcatggcacgagcggtggcacgtatcgcgtgtcttaggtgggctcatgggcaccaagcaaggccccgtgacacgcatcatggcactgatggtggcacgcgtcacctgtcttggctcggctcccgagcaccatgcaaggcctcgtggcacaagtcatggcacgggcggtggcatgcttcacgtgtcttggctcagctcgtgggcaccatgcaagaccccgtggcacgcgtcatggcataggtggtggcatgcgtcatggcacgggcggtggcacgcgtcgcgtgtcttggctcggctcgcgagcaccatgaaaggccttgtggcacgcgttaaggcacggatggttgcacgcgtcgcgtgtcttggcttgactcgtgggcaccaagcaaggccttgtggcacgcgtcagggcacgagcggtggcacgcgtcgcgtgtcttggcttagctcccgggcaccatgcaaggtcccgtggcacgcgtcatggcacgggcgatgacacacgtcgcgtgtcttggctcagctcgtgggcactaagcaaggccccgtggcacgcatcatggcatggacagtggcacgggttgcgtgtcttggctaggctcatggacaccaagcaaggccccttggcacgcatcatggcacggacgatggcatgtgccacgtgtcttggcttggctcctggtcaccatgaaaggctctgtggcacgtgtcatggcacgggcggtggcacgcgtcatgtgtcttggcttggctcctgagcaccatgaaaggccactgtggcatgcgtcatggcatgggcgatggtatgcgtcatggcacgggcggtggcacgagtcctgtgtcttgactcaactcggggacactaagcaaggcctcgtggcacacatctcgtgtcttggctttgctcactggcaccatgcaaggctccgtggcatgagtcatggcacaggcggtggcacgcgtcgcgtgtcttagctcatctcgcgggcaccatgcaaggccttgtggcacgcgtcaaggcatggatgattgcacgcgtcttgtgtcttggcttgactcttgggcactaagcaaggctctgtggcaggcgtcatggcatgggcagtggcacacgtcacgtgtcttggctcagctcgcgggcaccatgcaaggccctgtggcacgcgtcatggcaccggcgatggctcgcgtcatgtgtcttgactcagctcgtgggcaccatgcaagaacctgtggcatgcatcatggcacgagcagtggcacgcatcccgtgtcttggctcggcttgcgggcaccatgcaaggcccatggcacacgtcaaggcacaggcggtggcacgcgtcacatgttttgactcggttcatgggcactaagtaaggccccgtggcatgcgtcaaggcacggtcggtggcacaagtcacatgtcttggctcggctcgtgagcactaagcaaggccccgtggcacgcatcatggcacgggcggtggaacgcgtcacgtgtcttagctcggatcgtgggcactaagcaaggccctgtggcatgcatcatggcacgggcggtggcacacgtcacgtgtcttggctcggctcgcgggcactatgcaatgccccgtggcacgcgtcatggcacgagtgaccgggtagtgcctccacccattttcctttggcttgctccaaccttttctttaaggctgttagtagggttttgttcgttgtctctatcgtccattgctttggggatagcgtggtgtggaatacaaattgtttattttgagttccgagcagaaatttccgaaggcaatgctatcaaactacggaccgttgttggctatgattgcttgagggattccaaaccggaaaatgatgttcttccaaacgaatttcgtgacatctttgtccttgatgctagcatacacctctacttctacccaattactgaagtaattcatggcaacgagcatgaatttcttctaggcagctacgacggacgggggtcccactatgtccattccccattgcgcgaacgaccaagggcttgttattgggttcaacgttttagatgtcacatgcgggacgggtgcatacctttggcatttgtcacatttcttgacataagtcgtcgcgtccttcttcatagtgggccaatagtacccttgtgagtggacgcaacgcgctaaagatcgtcctccagagtggttgccgcatatacccttgtgtagcttcgctaacacgtactgggtttctgagtggtctaggcacccgaggtaggaacttgtgaaagatcgtttataaagacactctccgatcagggcgaaacaggcagtctacttgggttcttcaggtagagcgcctgtccagaggtattcctttataacgcctgtccactattggctttcttcaatagcattgcaagcaggcgcttctgagatggagggactagtttgcacatatatgggcaataatatggcttctttgatgggaagcgaggtagctattcctactagggcgttagcacgtacgttgtcagcccgggggactttttcgatagtccactcactcaaccgctgcaaggtgtctcttatttttattagaaattgcatcacgtgctcgtctctggctccgtattcctcctgtacgtgtcttacaaagagttgagaatcgttgtagattctgagcttagacgaatagtgcgagtgctaggtctaatctagacataatggctttgtactcggcttcgttgttcgacgcaggaaatcccaatcggatggcttgctctagttgttcaccagttggagattgtagcaacagttccactctggatcctgacaaccgagaggctccgtcgacttgtaaggtccaccactctgccttatccgattccctgtctcgagcaggttgttggggagattctaccacaaagtcagccattacctgccctttcatggacatcctcggtcgatattcgattccatactcactcaactctatgacccattggagcattcttccgaatagatccattttgtgcaggatgctacggaggggctagtcggtaagtatgactacgggtgagcttggaagtatgggaggagcttctatgcggtactccgcaaggctaaggcagtttgctctatcttcgaatacctcgtctctacatcggccattgctatgctaacataataaacaggtttatgctccttgtgtgtcaggcaaagaaacaaagcagcgctaaccgcccaatccgatactgctaaatacatgtacaaccgttctctaggctgggggctgctcaagatgggtggttgtgtaaggtaatgtttgattttctcgaaggtgctttggcagttatccgtccacccagttgcgttggctttccttagcaccaagaagaagggtcgcaatttgttagtgaattgggctatgaaccgtcccagtgcgacgagttggccagtgaggcgctacaactcctttttgttcctggggacgggtgcctctatgattgccttgatttgattaggactaacttctattcctttttgggtgaccatgaatcccatgaatttccctacgcttacgccaaaggcgtatttggacgagtccagtttcatgtcatatctccttagcaggtgaaaaacttcttgcaagtggtgcatatgatcttctctatttttgcttttgaccactatgtcatcaatgtatacttccactgtgcgaccaatcaagggtctgaagatctttgtcatcagtctttgataggtggcgccgacatttttgagtccgaaaggcatgacttggtaacaataaagcccatgcggcgttataaagacaattttttctttgtctgcgggggccatggggatctgatggtatccggagaaggcatctagaaaggagagcatcccctgcccggcagtggagtccacaatttgatctatccgcggtagagggaagctgtcttttgggcatgcattgttgagattggtgtaatcaacgcacactcgccacttcccttcctttttggggaccaccaccacatttgccaaccaatctgagtactcaacttccctaatgaatccggcttccaataatttgtccacctcgtcccgaataatcttttgcccgtccgggtgaaatcgcctaaccttttgctggacaagtcttaatgagggcaagatgttaagtcggtgggaggcaactgatggatggattccgatcatatcggaattcgcccatgcaaaaacgtcttggttttgtcagagcgcttccttgatgctttgagcctccccgggtgccaaaagggaactaatatatgtgagatgattgttcttctccgagatttggacggttcgcaagggatctgccactgggggatctttatccgttgggttctgtaattgctattggtcaagtgtgtttgcaggttagggaagtagctcgcgatccttgctgggcccgacctctcgtgctatctgatagcattggtgggctactaactggctgccgtatagatcgatctgtccatcttcgatgaggaagctcaccatctgatggtatgtggaaggaatgactttcatgtaatgcaactaggtgcgtcccaaaatggcgttgaagggggataaatcttctactattgaaaattgtacgttaaggatgattgggcctgcttggactggtagcacaacgtctccaagggagctggttgtcgctccattgaatcctgacaaaatccgtccctggttttctaggctggagggctcgagtcccatttgtttgattactgatgcctgcaagaggtcggccgagttgcctgggtcgactaggatccatctcacgtcgaagtctccaatcccaagagatagaataagggcgccgcggtgtggttgcaatagtcttgtggggtatactggagggaaaatgattgtctgtatattgggtgggcgttcttgtcggttaacccgggctggatggaattgataggttcgcgtatcgacgctgctcgtagcagcctttgcctctttcatttggaatcgtattcctcgtccaggggtcctccattgatgtagtttattacggccctgggggcgattggagccctaggggtcccggaggttcgactctgggaagtctctcatctcctggcttctgagctgatgtactactttaggtgcctcgcttttatgagtctttctaccaagtaatggagactcctgcattgctatgtagtatgcccatgcttttcatgataagcacatttcttgctttgatctctcttggctgggtccgctttgatgggtctaggccacctgaagtcggatagctcgcggatcattggaagaagtttctcatatgacacggtaaggggtgtaagtggtggcagctccgggtggctttgctcgccttgtctgcggtcggacgacctctactggttcgaatgtttggaactcctttccgcgtcatttctggccaattgttcggtaaccaggatttgttgggtggttgcgcgtacatcatcttccagcattgagtatttgttcacacgccggaacaggtcgtccatagttgtgggaggctttttagcgagtgattcgaaaaacgacgtgtctgggcatatgcttcgcttgaaaatttggaggacaccatccatgctataggcttctacttgcaatacagtttgaccaaaccgtttcacgaattccctcaataactcattttcctgcatttttatgttttgcagagtgctgatattctgtttatgtcgtgcgaaacacaagtattgtcccacaaaagcttctgatagatcctgaaagttatcaatagaattcatagggagtcgatggaaccacgaaagagcttggccttgtaggttggcggggaataccttgcacaacagacatcattccccatatcgagagtcatgagttgctggtagtgcatgatatgatcaaacggatcactagacccgtcatacgcagaaaatttcgaaacgagaaaccctcttggaggctcgtaattgataatacgctagctaaaaggcgtggagagcatgtcgtccaaccgcctattgatggagcctgggggaggttcatttgatgaattccctccattttgtcgcactgcttaatgtaggggattgcccaaggtggtgggtgcaactggggggttgggatacgtctcccaggtcgcagccgtaggtggcctctccttaccaggatcctatggtcccagcctcgcacacattgtgtccgacaactggggtcttttgtcacgttatctctttgatgagacacgagtggagtctaagctttcatcctatggagcatgatacgtaggtaagggtcattcattaggccgctcattacccatatcaggggcgaccccgacgattctaggatatgctgtcccttggttatgcctagaatttgccccttgacctctcaattgttggttgtgaggaggtcccaaggacgaaacttggatccgtaacacatcgttttcttctctaagcctccttgtttcttagagcagggcttgcatttgtcattcgctttccaactatcgtctttccatggtttcgcgctagtcaaaatagccctcatctctcatggccgacaaacggcttctggaaagtgtggacatctttgccaatgttggttcccatagacgatgccaatattgagggctggcgttaccaaaaccactacagtttgcctgatgtactctccttctcaactgaagatgatacttccttcctttgacctacaaaagatgtccagacaaggggtccggacacaccctctgatgcctttgttagttttgctttctaacatcttgatatttttatggggcccttcttcttaggaatgcttaccttctctgactgggtgggggtcttttatagtgccaagagcattgtcccttggaatggtgggaagactttttggttgtcatgatggtgcttagagggtggcaaagccatcattatcctataggcggcgcaggacaggtcgtggcaggtcgcctgaagtgacccaggaaggtcatgttgagcatgcttttggtaaaatgaataatgattgcccgcgaaacgcggtcaagactcttgtttgagacactagccattgagtccggacaagacattcggacaggggaggtgtgtatcgcatgccaatcccatggtcgtccggatggaggtttggacgtgccacgtgttagtccatgtgcacatccggacagagggttggacgtgccacatgtccaaaagaggagtgctttgtgaggtcgccacgtgtacgcttaagggtggtccctacaacactcataaaggaggttagggtgatgacggccgttataatggtgaaaggggattttgtagtggaatgaataaagaaaaggtaacaacgattgaagagtggtaatggtgttatggtttgttaagctaccaataatccgggtgtaacctgagaatttcaagccaaagcccaatccctcccacatctaaacccgcttttagcctgcgccactgggcatgagcttggctgatctttgctttgaagagcaatgttttttagaactagtccgaatattaaactgaaaaagttatcggtttaaaacaaaaaggtgggggtggttactggtgaaggtgcaaatattgcttagtttaatttccatgggactctataatagtacgtagttaatgttgaatattttgactatgaaaaatgggtttggattgtacataatttttttcaggataagtagaagttaaaagacacatgtactaagtactaggttgatctttttcttactctaggttggaattgtgaatgcttgggaatctaaatttaatttctaacaaaagtatttaatctttatataaaataggtaaaataagtttgaaataatatataaaattaatttattaattttaaatttttttattttattttttatttatttattttcctcactttttttttttctaaaactaaacataacttaggttatatttggttttggagaaattttaaataaaatataaggacaaaaaaagtagagaaaaaaaataaaaggaaagacaaccgttaagtttagatttacttggaaggtggtgatagcttagcctcaaaagagtcaagaaaatatttttgctcaatttggtcatttctctattctgccaatcatattttttcccatgagaattttacttttgcaaacaaacaaacaaacaaacaagacggtactaggccaagattaaaccccttcagtgtggagggaaactaggagctcaaagaaatctccactatgtggaaatgttagaaatacaacagcttctcctctaaaaaaatagaggaatttgtcttttatgagaaacatctcttccaaaatacaagcatgaagcatctttttaataaagagacaatgacttaagaatgtggatggatacttgcacaaaaccctgtgctcttaagtctgaaacaaaatatgttctgtctcaccctccttacccagaagaacccattctgaggttggtgcgtgaataaattcctctgaagtataaaagatacttgggctggaaggttgagaaaatggctcaaaattgtcatgtactccatagggcattccattgagaggattattgcaagcttcagggaagacttgaaccgatgcattgatttgatatggtgcaaatgaagtaacttcaacatccacatcttcttcttgccacaaaacccaaattccataagtcaagtcggcagggtctgcagagaagccaatttccttgataataccatatgcatcagcaccacaggcctttgggtcaataagtactacgatggagggcttgtgcagttggattagacctttcattgcttgcatgaacttgaggtcgcctgctccaccacaatcccaactcagaagcttctttgtataagatgcggggttggtcttcaagttttgatgggtagtcatgtgattggtcacagttgtaatgatgcttatactggaaaactgtgggatattgttcaccctgatttgaatgtttgaaatagttggttcaatgttgaagacgattgaagtgcatttaatgctgaagaccattcgattgtcttcactagtgcccaattccattttgcggtctggggtgctttttataatttgcagttctgttgcgtgttgcatcgcatacgggaccttgcttggtgcccacgagtcgagccaagacacgcgatgcgcgccactgtccgtgccatggggccttgcatggtgctcgggagcatagccaagacacgcgacgcgtgccacggggcctagcttggtgcccacgagctgagccaaggcacgctacgcgtgccaccgcctatgccatgacgtgtgctacgaggccttgcatgatgtccacgagtacgcgtgctatcatttgtgccttgaagcgtgccatggggccttggatggtgcccacaagccgagccaagacacacaaagcatgccatcgcttgtgccatgacgcgtgccacggggtcttgcatggtgcccacgagccgagccaagacacatgacgcgtgccaccacccatgccatgatgagtgccacggggccttgcatgatgctcgtgaacctagccaatacacatggcgcgtgccaccgcccatgccatgacgcgtgccacagggccttgcttggtgcccacgagccgagacaagacacacaacgcatgccacaactcgtgccatgatacgtgccacggggccttacatggtgcccccgagctgagccaagacacgcgacgcgtgccactgctcgtgccatgatgcgtgccactacccgtgccatgatgcgtgccactgcccgtgccatgatgcgtgccactgcccgtgccatgatgcatgccacggggccttgcatggtgtcgacaagccgagccaagacacgcaatgcattccaccatctgtgccttaacgcgtgccatggggccttgcatggtgcctgcgagctgagccaagacacgcgacgcgtgccaccgcatgtgccataacacatgccacgagggcttgcatggtgcccacaagtcgagccaagacacgtgacatgtgtcatcacccgtgccatgacgcgtgccacagggccttgcttggtgcccacgagtcgagtcaagacacgtgacgcatgccaccgcccgtgccatgacgtgtgccacggggccttgcttggtgcccaagagccaagccaagacacgggatgtgtgccaccgcctgtgccatgacgctgaccacgaggccttacatgtgcccacgagccgagccaagacacgtgatgtgtgccacctcctgtgccacgacaactacaatgaccctcgacatggtgctagaggttgtgctaggacacgtgccccatgccatgatgcatgccacgacctccatgccatggtgccacgctccgaggcacgacatgtgtcgcgtgccaccgcccgttccacaacacctgtaataacccattccatggtggtagagggtgtgccaagagacgtggcccgtgccatggtgcgtgtcatgtctggcttttgaccctaatgtcttgacaaggttcgggattatggtctattgctagtcatggaatgttatttatccatggattcatgttgcaaaggtttttcgctattttttttgtatggttttttaagtaaattttttttttaaaataattcttttttttggacaatccttggattcttttttaagaattttttttcccacatcaaattcaaattttaaaaatatttaaagtaatttttacttattttcctcatttcccccctatttttctaagtaaaaaagctaaaaaaatatttttggccaagaaagcttcaccaatccttgaattcgtcttccataaaattcttccttatgaaatacatttttaaaaaatatttacaatatttttttcctagtttttactattttttaagtaaaaatttgcattaattcatggattcctatttcagatatttttcccatgtgaaatacaattttttaaaatattttcactattttgaactattttccatatttttcggacaaaaaaattaatataaatattttctaggccgaaattttttttccatgggttcatgtaattattataaagagattcagcataaaaaaaaaaacggaattaaaaactcttttttcattaaaaaaatggcattatgtctcaaggaatttccaaaaatggctcaaaatgctctttaaggggggggggggggtgtcgtcctcaatgggctaccacccgcccaagcacgttgcaacgcatgccgcccttggcgtgtaggccgcccatgccaccctaagcatgcgaccacatatgccaccctcaagcccatgacacactaatacgaagagagcatgcccatgacatcattgggagccctcgcacgcaacagcagtcacctcgtgccctgtacacgttgcaccccggacgcgtcccatgcctcccatgcgaacacatcctactccccatgcaaagagtgccctccccgcatactcaaccttgtccctccttgtctcggctcgacccttcgagcgagcatgttgcctcagaaaaacgtgccaatggccaacgtcgcggctcaccccaagggctcacccatgccctccgccagacgttgcccatcgaaaggcacatggatgcccctctccccatgcaaagagtgccctcctcgggcacttggccccgtctcggctcgtcgaggagctctcaagccctcaagcgagcatgttgcctcagaaaaacgtgccaatggccaacgtcacggctcaccccggcccgctcaaagttgtccatcaaaaggcacacagatgccccttcccccatgcaacgagtgcccttactaggcactcgaccccgtctcggctcgtcgaggagccctcaagccctcgagcgagcatgttgcctcggaaaaacgtgctagtggccaacgtcgcggctcatctcgggggatcacccatgcccctggcccgaagttgcccatcgaaaggcacacgaatgcccctcccctcatgcaacgagtgccctccccgtgcactcggccccgtctcagcttgtcgagaagccctcaagcgagcatgttgcctcggaaaaacgtgccagtggccaacatcgcaactcaccacgggggctcacccatgccaccacccgacattgcacatcaaaaggcacacgaatgcccattcctccatgcaacgagtgccctcatcgggcactcggccccatctcgactcgtcgaggagccctcaaaccctcgagcgagcatgttgcctcggaaaaacgtgccaatggccaaagtcgcgactcatcccgagggatcacccatgcccctcgcccgaagtttcccatcgaaatgcacacggatgcccctcccctcatgaaacgagtgccctcctcgtacactcggtcccgtttcggctcgtcaaggaacccttaagccctcgagtgagcatgttgccttggaaaaacatgccagtggccaatgtcgcgactcaccccggggagctcacccatgcctcctgcctgacattgcccatcaaaaggcacacggatgccccttcccccatgcaacgagtgcccttcctgggcttcttatgggcctaccggaccggccacgggcgacccacaggaaacactcatttctctcttgaatacggtatggatgcagtcatccccacagaaataggtttgcccatgatccgaactgccgtacaaggtcagaaggatgaaaacctagagttagaaaggaacctaaactgggcgaatgaagtgagagaaaatgcgtccatcaggatggtcacttatcagcaaagagcggctgctcattacaactgcaaggcacgaccctgagtcttcaaggtcggaacacttgttcttaagaaattttttgaaaacaccgccgaaaagggagctgggaagttccaatcaaattgggaagacccttacattgtctctaaaacaggcaaaaatagggcttatcatttacaaaagctagacggaaccccattactccgtccatggaatgtatctaaccttaagcagaattatcagtaaagagaaacaatgggtgagaaaagagcaaaggaatgtaacatttataaatgactgtaaaaattgtctttacaaagttggccggaccattacggtaaaagagaaaactataaaggagaactacaaataaaggaaaaacatctcatcgcggagggccttcgggtatcatatcttcatcatcaaaaggaagggaaggaataacgtgcataataccattcttcttcatacaacaatggtagccaaagaagtacatctcgtccacctgcctctgatattccgtctccagcaccttttgagtggcaaaaccggcctccaattctttcctctgggcaaacaggcccacttacacctccttcatctctttcttttaggccgcgagactggctcggagttcatccatctcattcttcaactgggagttctcctgctccgctccattctacttagcctcaagggcttccttttcctccttcaactggtccgcttcagccctgataactcctttctcccctttagccagttttagcatctccgccccatccgcaacagcttccaccatctctaacttcgagcgcatttcttcaaggtcgcccgggtggttggagatgaaggctcgcatagcctctgccacctccagtcgcttgaaaagctacgcacatgtacgcatcatgtagtggatgccaactacaacctagaagaggcaacaacaatcaaagatagtaccaagcgatggagtatgtgttgctaaaaaagaagaagaaaaagacaagataaaatggattaccacttctacagtctttggcatcatccattcctacagatactggatacaagacacgacggactcggggatgccaaaagggagttgggctgaagttggacatcttcgtgaagggagcttcggcgtctgtaaagcacgacactcccttcaacatctctatcagttcctcctagcttggaggagttgtaggggttggactactcttctcatccggggccctctcaacaatagcggcatccggactggccttcgccccacgggcctcctcttctgcagccagagcgttgctaggcttagctgcgtctggttggatcgcaatcgttgggctaggccccgccatgtcgggctgggtcactactgctgcgctaggacccgcttcgtctaagtggggcacggtcgatggagaagccccccgccggatcctcctgagtcttctccggacaagcccttttggctgggggagggacaatgttgatagcttcatgtaaccgtttgcgatgcctctccagaaacctggttcttaaatcattcatgtcttcttcttcctccggctcatttacaactctcaagccaatgaattccggtcggggttgggaagggccaatccccggattgacagtgtcaagccgtggtgagctagaattatcctcggacgcctgggtagggccgtctgatcggttgtacgctgaatctgtggaagaagatgaaaaattaggaatcggggacacgatcttgagtgcttgtgcaatggtcttatttttcttctttgcagcctggggacgaaccgcaggcgatgaactataacctttctcatcagacactttcctcagcgtcatctcctaccttttctcctcccactgatcaaggagctcttggcatgcctttgcgtccgcctcgcgagccttttcataaaaggggaggtccttcaacacgaaatgttccctaggaaccacaacctttggtagccgcctaggaaggatgttgaggacgtatggctgaggttcccggacaaccaccaatagattccgggcagagaggagcgtctggtggtgtctttcgatggcaataatctcgaacaacttgtttaggcggtcgaatgaagccttcttcacccactcgaccaagcggcccctcttatgtgaacctgcattagccagaacaaaggaggttagtcatctaatgaaattaacccaagtctcaaaatccaacatggaattgacactaaaagttgcccctacctggaagcttcaccgaatagttggggcagaaatcccttttcgggtgttccgacaaaccggcccatggtcccctgaccagtacgtgccctttggctccccctttgtttgaatcaggaaggttggtcatcagttgaaaggacggaatatgggcaaacatgctgaagatgtcctttttttcccttcttgatggtgtaaacaaagaggacctccagcagggagaggtccaacttgaacagcatattcaagatgttgtaccccatcagtacccgtacgatattgggatgaatataggctgaaggaatttaagtgtaatggaggaattctttgaaaatggatggaagaggaaaacggagccccgcattgaactgctctttggtgaaataaatagcgttgtgcgcactttctttatggacatggggttcccatccactagctgaatggagatggcgttcggaaggcagaagcggtcgcgaaactctcactcattcagcacttcaatgggcttccccaaataagggagtctagatccaccattcccacgtggtccagctgcgttggacgaagctacatcttttttcgcaggcatggtggagcgtggggctgagacaaaacctgcatggcccgatgccaacagtcaaaagataagttacccggccccaccgccctatggacaacaacccaagaggcctaggataactaacctgcccaagttagcaacctccctaagttcaactcctaatcctacctaagaggcgattcaaccatttacagggacgacaggagggcaacaaaagttgtagtaggctcaacaaaaccttaaaacaacaaaataatccagatgcccttgcatagacctatgcattccccatccgcaaaaaccagtaaagctatttcccaacccaccgaaaaccctcaaacatcatccctacctcccaatcgcaaacaaacaccaaagaatccaaggaaaatcgaagaaacaggaagcagaagacgaagggatagaaacagagagcatacctagcagaagcttgcaacaagaaggaaagccaagttgcagtcgcccaaatgcactggtcgtgaaatcatgagaggaacactgctgacgaaaaccctaggaagcaatgctcagtcactgccagatgagggagaaaaaaagagaaaatgcagccgcgagaggtggatttcctatttataagatggaacccttcgggaccccaaacgaccaggcgcccaaccgcattgtgatcgaaacgacacgccgcctggtaaccatcccaaggatggctgctcgtcataaatccctcccccctttgggcgccacgtgtcatgcgacccccaaaaaagaaaagaggaggctaaatgcatcattttaacccgccttttttgcccgagcaaaatagccgagttaaaaaaggagcattgtagggaccacccctaagtgtacacgtggcggcctcacaaagcactcctcctttggacacgtggcacgtccaaccctccatccggacgatcatgggactagcatgcaatacacacctcccttgtccggatgtcttgtctggactcagtggctagcatctcaaacaagagtcttgaccgcatttcgtgggcaatcattattcattttaccaaaagcatgctcgacactggatcacttcaagcgacctgccacgacctgccctgcaccacctgcagagcaaaaagacaaggatgaccacaaatcatccctccagcaatctctgatagcgcctataggatactgatggctctgccaccctctaagcaccatcatgacggcaaaaaattcttcccaccattctaagggacaatgctcctggcactataaaagacccccacctagtcagagaaggtaagcattcctaaggagaagggccccataaaaatattaagatgttataaagcaaaactaacaaaggcatcggagggtgtgtctagaccccctgcccggacttcttttgcaggtcaaaaaaaggaagtatcatcttcagttgaggaggcgagtacatcaggcaactgcagtggttctggtaacgccagccctcaacaagtgtgacccccaaatttcatggtgggggttttgtctgatagtcgtgtacaaacccatttacccattaacccaaatggttataatcccaccccaagaatgattttgcaggtgaagtgggtgtatgttgatttgtgggtgcaattttgattgtagtctctgtgtcacttgcactgctattgaaatgaaaagcaaaatgattcattttctcaatatcaatggcttcttcctcatgcctttttatcaatccattgccatgtcttatatgtattctttgcaggaagcacttacgtggcttcaagcatttgtactgggcatcatttgagccgggcaggcaattgtaccgccattgcctagatctttcttcccagagaattttttttttttttttttttggagaaaacgagcctttactaatgggctgggctatctgtcataatagcaccaggagctcttgaagcggcacaacgcattgggcggataacctttacgaggcctatattatttccatcaaatttcaatgtcggaccgatttaaattttttaacaccactccaccatttgttcttcttatttaaatttacaaaccattaaatgaaataacaaaatttctttcaaaatttttataataatataatgtaaataatataattttttttaaactataaaataataagatataatgatatataactttaatatatattaaatcaaataacttttaataaaaatcttcatatttaaatattatatgtgttttatttaacaaaatgttaaaatattaatatttttatatatttaatttaataatattaaagttgaaaaaaaatattaatgatttttaatttttttatttatatttaaaaaaaattataaatatttttaattttattaatatgtaaattatatatttatgacattattaggagataccgatattagataactttttcagtggagacccacgggcggtgaaaacagcgatatttgttagtctttttttagtgataataagaaatagcggtccggggaccacgtctaggtcaatgacctacaatgggtttcttctaattatgggttcacaacttcacaccaatgccttctgcatcctttctttgacttctctctttttcatctatccctggatctgtggaacaccttgctcaaggagaaacaattgcttttgagctctctctttattgaatttcctttttgtcaactggaaaccatgcctttgggaagagcacttgaatctgcttctgtgaatgtgcttcttaacaagttggcttcccaacaattcatcgatttcttctttaa

SEQ ID NO: 10403 - DNA, 3933 bp, Vitis vinifera
  Intron number 20 from transcript GSVIVT01008260001 (locus GSVIVG01008260001) derived from phytozome v7.0 (chr-ID chr 17; pos 3907736 to 3911668 reverse strand)
catcttatttctctatctatctgggaagagttacggtatgcaccctttcattttttaccggtttcaattgttcatttgttcttattcagcttcttttacacgcacttacatttggatagctgctggttttcttttaaatttacttatcatataggttatgctgttttgtatcatttcctgaaattgtggatattgatacattgttaaggtatctattatacatgtcctaatcaatgtacatttctgtcgcatgggtttgggtgtcaagtacaggtatgcgtccaagtatataatccttcacaatcaacaaatttaggatatgggggcttagggatgaaggatcttagtaacaagtatacagacttgaatataacatcaataaaaggaaaatcaattagaaatgaattaaaagtaagaatatctttgatatttttttttttcctaatgtaaccatcttctaaggaagttgaaaacaaataaacaaatcaattttaaattgtcatactaatgcaaggtgggaagccaacaaggatcttgcacccatgcctatgccatgttatgtcgacatcagaatgctaggtggagttggagaatctgattatcatagatgtatgtggttggtaagttgtgtattctatcaagggggaaaacattattcttttatcctgtgtgtttcttattcaaataaactattaaaataacccatttataaatttcataagtgataaaatatgagaatgattaaaaatggaaatcatcccttaaagttctcctaatgttgcatcttttaagaatattgttgtagcttttgaaaaatcaactatgaggtaaagtagttgaacatttggtaactatagttttaaaagcattgtaagcttcaagtgatatttaagtgtttcgtaaacttggttgttaaactgatgtaaacgtgttagaaaccaaaagagggatgccaaaattcaaccaatttcctttattgtgatataagaatctacctttaattaaataaatcattatatcatttagaaattaattctgagcattttaattgtttttgatcttttgaaagacattttttttttgtctttgctatattcaactaaacattatttgtaataatgctatattcaatcaaatatgcttttttgtgtacttttggaaattgggctagaggatcacataatgtctatgttaggttttgtagattggttgaacttaaagtaaggggaggggtgtttgtttttgtttcgttctcttgtcaccattgggcgttttttgtatccttcgtgtgtactgtgctttgcctccttttaggtgcttttaatacatgtttgctcatttgcctatataaaaaaaaaagaactcttgaattttacatttttttgataggtaatattgtattttacattttaagatgagtactatcaattataaaacttgaacaaatatagcacattgataataaaagattttcaactaacattcaatgttatgtgctgattaaagtttgaacatattctttcttggatgattttatctaatcttagacaatcgctaattaatatcaactataaagaattttgcttcaaagaattaaattgttgaggaaaaagaaataacataatttaaagtattattattctatataataaaatttagtcaaatatgcaatggatataaaataatttcatatatttaatatatataatataaattgtaatatgatttaataaaaaatatttaataatataatgtaacatttttttatgatgtactatattaaataatatcattattaataaatttaaaaaataaatcatcaaatagttgctcatattctttttattactcggtacttgtcttgagtgtaaagttggtgtttcataaattatttgagagcatattgcataatttaaaatatcattgaaaaagatatcttgattttgggaaaatcacttttgacctcttacttctcaaaattacttctagagtgggtgaaattctctgacaatcacttttcttttacaccaaatacgttagttttaaaaaaaatcatgcgaaaaatgattctaaaggggtctataatcaaatcccatacaggcccttcatgacttatgatgtggagttggtgtatctttcttttagaattttattgtagtgttataggaagtatgaagtctttgttgacaatggttattatattgtcattattttttcattagggcatggtagaaaatggattggttggatcaaatggtgatttctaccatgagattttttgtatagaagatgtaaaatagctattgtgctttctataaaaccattgaacaattgatttgtcatttttaaatatagaccttttttttttttttttttttttttatggggcgaaatgacgaaaaaatattggtatatcagtttgaaagagatgatggagtcagaattttgtttttgtcatggtactgggaaatggaatcctagaatggcattctatatcttggaaacataatggaaatacccccccaaaaaaacaaaaaagaacataaataaattaaaaaaaataaaaaaaggaaaagaaaaagaaaaaaggccctaataagcaggacctgcatataaatacaactaaaaaaactgattaacatggtctgcctattcaaagcagaattgtagtaatgtttaatttttgttatataccaacatcaacatctacaaaattagttgcccagggcttattcatattttgcaattcctctcatttagttggtcataaatcactttataggagactaaaaataatagtaacctgttttcttaaatttgggcaacttattgccttaatcctaacttattaaaccttttttttttttaatccacaaccaccaaccttaagagtgtttagttcatgagtatctcaattggggactgagtatcttatatccacatataagattgtcatgcttgagtgcacataattttagaagttttaatttccttgaactgcacccatgaaaaacttggcatctttttattcctattcctagggaatgaagacataaaatggtgcaacaacctttttttttttttttttgttctttctttgtttataactaggtccaattttcataaatattatttgaggagttgttttataaatttacattaattcccaagttagccaaatactacaataaaaataaaatttggtgagaatttcaaattcccaactttgattaaatattagaagtaaaatttcatatccattttattccgagaatttatctctagaaatatgagtttagttctaagtttagatgctggaaaaccaaatgcaccattagtttcagcttgcgttacttctttccagtcatcctaattcttttatcaacacctattctaaattttgctcaatcattgaacaaggactgttttccatgcgagagagtagtgaagaaaggccatcggtttgggactctgtttgttttaccatgaagcttaagtgtatgctgtgttcaattgcattggtagccggagagggaaggatgtggggaagttcttgtgtttttacagagcttatgcttttattgaaaaagaaataaacatagcttctcctatctaaatagataataaacaaaaattgtatgccaggaggtgaaactcactttctgctgatttgctcctcttgttgtggaaccatcatgcttctattcttttgagattagctgttggactagctttagaaagaagatactatctagtctttgttaccatgacaaagggatttaatatggatgttcttcaaaaaattgaagttacttctagtacttaaacatcacacttcattctttggtttagttgtcttattcaaatttaagatatgaagtttcctttatatgattctgttgcaggttttgggaaggatactttgactatcta

SEQ ID NO: 10404 - DNA, 13275 bp, Vitis vinifera
  Intron number 4 from transcript GSVIVT01001121001 (locus G SVIVG01001121001) derived from phytozome v7.0 (chr-ID chr1 ; pos 22783337 to 22796611)
cttcttggtgcttctctatctttctggattggaaggttcgttttcaagagatctctgttttgatgcttttgaacatggttatttaaatagattgatctgcattttcagttccctctctaataataagagaatagggctagtttttcttcatgtttttttgcactgtggttgaatggtacaatgcgtttgacttacggatggaagtcaatctttatggagattctctctttctgggttttgcacagtttgaaaaatttcttgattttgttcctgagtttgtggaactaaacttagggtccaaaaggttccacttttatttgggtggacctttttaaatctgaattaccattctcaaggtgttgctttcttccatcagtccatgctcctcttgtgcttctgttagcataatgcggggtttggattgaatcaacattgcaatataattttataaacaagcgctaaagaaagagcacatcattggacatagggtgtatgcaccaaagaagcaactaaaatgagagtacaaaaaacaactccctcccttaatgagaacccaatcaatcaacaaaatcaattaaaagtattgagccttcacctatgtacaacattgtccacaaaaaagaggttactaaggaataagctcttcaaaacatacacaaattgctccccagtctcaaacaaccttctattcctctctgtcaaaattgttcaaaaaatacatgaaggagtagctgtccaaaccttttagcatcaaccctataaaggatccacaccaccctaaaagagtctttctcagtatggtagcacccaaggaacactaccctgtcctcctcttttctatttgccaccttaccttgtagtttagagaataattgttctacattatctagctccaagtcatttagatctaagaaaaacaatggctctaataacccatttcgcctatctggtctcataaattcatcactcacgcctcttttgataaggttaaagcatatggagatagaaaagaaacatataatagctcatccccacacccaccattcttccaaaacttcactctcttctcattccccacaaaaagagaaattctactattaaaattgtcccaatcctttctgatagtcaataccatgcctttctcttacatctcaagattgtcaccccctttcttcttcctcatattttccacttataatctagcttcaaggagctccactttcaaatgcatatcaccaactccactcacacaagagagccttattaagaaaagaaagatttctaacacctaatctcccctttcttttctctgtgcagatagttgaccacttcactaaatgattttcttttttcttttccaaagcactgcttcaccaaaggaagtttctttttttttgataagcaagcacatatattaaagaaggcttaaaagccgcaaaacatacagggagtatacgaggcggctatggcctctcaaccaaaaaataaaacaacccaacccctaattggaggctaaccattccaagaatcctattagggaattcgactccatatcaatgtacactttagcccaaccccaaatattgtacacaaacgaagtttttaacttctgaaaagctaacacccccccttaaaagctagcctattcctctccttccatattgtccaaaaaatgtatagtggaatggacttccacaattttttcttttttttccccacaaaagagccctttcagctacatagaacctcctttacagattctggaaagacccactgaacaccacacaacacaagaatgatatcccacaacccttttaccactgtacaatgaattcaaatatgattgatcgtttcctcttcacacccacacaagaaacatcggttagggaattgccaccctcttctctgcagcctatccaaagtgaggaccttcccccaagcagcttcccaagcaaaaaaagcaattttggttggaactctgtccacccaaacattgctatgagggaatttagctccttcagtatttgccaacacactgtacgctttcttgactttaaacagcccgtcctttccttccttccaaaacaccgagtcttcctccaaagttactctatattccctcaactcaactaacaaattgcccaccatacctaactcccaatcattaaagtccgttaaaagccttaaattccaccctccttgacccaaattctgatcccaatattcctccactgtgacattcctttgggtagccatggaaaagaggtccgggaagccttgggacaacacattattcccgcaccaaggatctatccaaaaccttattttattgccttttcccaccttgaacaccatattttcccaacaccaagcggactccttcaagatctccttccaaactccaactccaaacaccccatttgccttccttgtcctccacccaaaatcctcttgcccatactttgcctcaagcacttttttccaaagctcctccttagcacgcgcaaacctccaagtccatttgcctaaaagagctttgttcaaacaaacaagcttccttaaccccaaccctcccttttctttatccgcgcacaccacctcccatttgactgagtgtgctttgttccccccattggctcctccccacaaaaaatctctttgaagcttttcaagccttcttgccactgattttggcatatggaataacgaaatttgatacaagggaatgctggccagcgtactctttataagagtgattctccctcatttggacaaatattggcgtttccaaagggcaagcctcctcctcactttctcctccaccccatcccactcggaagaggccctattagacgccccaagaggcagccccaaataaacagcaggcagctgtcccaccctacaccctatttcagcagccatctcatgcaccccttccacctctcctaccggaatgaccatacttttgtccaggttaatctttaaccctgaggctgcttcaaaccaaaagaggatccaagtcaaatacgtcaaaaactttctttgcctcacaaaatactattgtatcatccgcaaacagtaaatgagaaatattgatagcttgccctcttcctctccatatcctacagccatagatgaaccccccttcaacggccctcgtgattagcacacttagtacttccattcccatgacaaacaagtagggggaaagagggtccccctgccttagcccttttgaacttgaaaaaaacccagccgacaccccattcaccaacactgagaacttggcagtggagatacaactccacatccatcctatccattttggcccaaatcccatcttttgcatgacctttagcaaaaattgccaattgatgctatcatacgttttctcaatgtccaatttacagattaggcctttctcttcccttttttgccaagaatctattacctcatttgcgattagggaggcgtcaagaatctgtctccccttaataaaagcattctgatcagaagaaaccacctttcctatgacttttttaagcctgttggccagcaccttagctaataatttatacaatccctctagcaaactgataggcctatagtcacccaagtcctccacccccctttcttcggtaacaagaccaaaaaagtatgatttaggctcttaatgaaggagttctgttcatggaactccttgaacatatccaagacgtcctccttgacaatctcccaacatctttgccaaaaggccaccgtgaatccgtccggacccgaggctttgtccccattcatccccattaaggttgcataaatctttacctcagaaaatggaagctcaagggcttccgcttctgattgactgatttgcttcagcaaaagactccctatattcgccttccaacacgagctttccgagagaagctgctggtatgcatttgcaattccttccctcacttcttgttcctctgtaatcctcaccccatttatcttaattttatccaaggcattgactcttctacgggcattagccatacggtggaaaaaccccatgttcctatccccttcccttagccataattcccttgatagctgtctccagtgcacttcttccatcgacacccactttgcataatcctccttggcttcctttttgtgacttaattcctcctctattaagcttctctcttcttccactaaatcccaacgctccacctgctgaagagcttcagctttgtttctctccaatcttccaaaaacctccttgttccaaatttttaaattttgtttcaatcccttcagtttaacagctaacctgtagctcgacctgcctctaaccactatcccttgccaccacccctctatcaggtctttgaaccggtcagctttgagccacatattttcaaatttgaaaggggaaggacctctccttagccctcccccctcaagcagaaccgggaagtgatccgaggttgggcgggacagtcttctttgataaaccctactgtattggtctagccaactgggagtcgctaggaacctatccaacctgacccacgattgattattgagccccccactccaagtaaaagatcccccttgcaatgggaaatcaactagccctaagtcatctatgatctgggcaaacctcctcatagctgaggtaatcctcccatttctacttctttcaaattggtacagaattgtattgaaatcgcctcctaaacaccaaggctcctcccacaaacctctaattgccccaaactcctcccacaagcactccctttcttctttggagaaaggaccataggcccccgtgaacacccagattcctccatctcccacatttctgaatctacaggagatggaaaattggccctcttccacccccaaaatctccagcgattttttgtcccaacaaatcaagacaccccttgctgtccccatagcattcaacaccctccagtcaagaaatctcctcggccctaaactcctcaccacctcttcagacataacttgcatctttgtctcttgaatacaaaacaaatccaccttttgatttctgataactgacttgattactttcctcttggacctatcattcactctcctcacattccaactcaaaattcttaaattcattggacaactgcactctggttccctctaccctgggtagggcctttcttcttggtatccccctcataattaacagagcattccagtctcttgagctccctttcaaaccttgaagtctccaacagacctttacctaatatcttctccctccttttcctgattttgcccaagaaactcaagatttccttctccaatccttccgttgagaaacccagaaagtgactgaatttaaccagactattctcctcccaattaaactgttcttccttcctaccctcttggaattcagtctggcctatagtccaccccgaatttctttccaaaggattgacactattgacctcaaccaagtcccaacaaccatcccctctccctacgtgttcttctgcacttggtcttcgtgacccacttccattttgaaattcctccctttgcaccccagaatggtcgtaaaactccctctccggagtccgaccaaaacaaaagaagttagaagaggatgaccctcgtgccctaaaaccccccagattcaaagctaaaccatacctcacggcttcttcctctagcatcctatctgcccttggatggtttaaatccggctgctgccttctccctatttcttcttctctgaatctgatgaattctatctccagattgtcgtccttattatgaccattggaagcagagggacaagcttttaaaaggagcccactgtccatgagatgagcctgggacggaatggccttccccttatgaagatcgcccagtccagagcctgcaacccgccccgagcttctgggctgcagcggcccaagcagaaccccctttgaggcttcacattctaatggcaaagagggcccattagcccaattcaactcccggcctggaactgcgggcccagtcttcaagccgggcccctgcaacaggcccacttgcgcctgggagcccatcgcagcagagcccacgtcctgtgtcagccgtccagtcccatcctctgactgacgctacgcctcgaatcccgcacacgccatctcctccactcgcgactcgacgcgtgcatcttcatcacctctgacctcccctcttggacgactccacaggccgcgcctcctcctctcttcctaccttaactacggcaccgcctcccaccatagggttaggatataggtcatctcttcaacccctatctccatcgagccagggagattctcgccgtccgatctaaccaatatcctagcccactgcaagtcctccatgctctccgtctgtgggtcaacgtctaaaaacccaccgcacgcatctcccacctttctcaacaccgacgggacccatagcgagattgggagccccaatatcctcacccacacttcctttcttacctcgccttcttccaagcaacaggcccacttgcgcctgggagcccatcgcagcggagcccacgtcctgcatcagccgtccagtcccatcctctgactgacgctgcgcctcaaaccccgcacatgccatctcctccactcgcgacccggcgcgtgcatcttcatcacctctgaccttccttcttggacgactccacagaccgcgcctcctcccctcttcctgccttaacgacggcaccgcctcccatcatagggttaggatataggtcatctcttcaacccttatctccatcgagccaaggagattctcgccgtccgatctaaccaatatcctagcccactgcaagtcctccatgctctccgtctgtgggtcaacgtctaaaaacccatcgcacgcatctcccacccttctcaacaccgacgggacccacagcgagattgggagccccaatatcctcacctacacttcctttcttacctcgccttcttccaaacaacccgatcttggattccaacgcgacaggtccaactgaactcctcccaccgccttattaccagagaggagaacccgccttgcttcttccgcaaactctaattccaataatactcgtccttttcccagacttgccaccgccatcttgcctttcaatccccaggccttttccatttcccaacccaagctttccaaatcttccccttttgcattgctagggatccagcttccaatcaggcaatgctccagcctgctaaggtttctatttaactcctcccgttccatctccactcgaaggttattagaccccttattccaccaacccttcaccgtgtcctcaaacgatcttcccttcaccatatccggacacaaccttcccaataccctcacttcttcttgttgttcctttttgtcaatactgttatccatcttgcgaagagcctccaccatcgccatccatccccccttatcccctttgcccttcgggatacatatgctgtatctcttcatctccaaatcgacgacccctaatcgcaggaagcaacccgccctgtttgctttgaatcttctcaaacatctttatgatttttcttggaatgggaaacaaagacatgaaatagatggacaagctagatgatgtgctctaaatcaaaataactgttgccccttttgggaacgtagggagaaagaggattcccttgcctcaatcccttggagctttgaaaaaggttagaaggggtgctgttgacaagaataaaaaatttggcaaacaaatgtaccatttaatcaaacctatccatttctatccaaaattcatcttttcaagaatcaatagcaagaagttccaattgatgtgatcatgttctagtgtgataattggttttaatgtcacatgattggaccattttacataggattgagatgcatataggtgacttagttacattacctatccctatatggatgggacttatgggcatagtttaactgtgggtttagaattaatttctaaaaccttagtgaggtttgggttgggttgaaatcagttgcctcaggcagattgggtttggggaatgggtgcagggttatctagctgccatttcacacaaatttaacaagatttgcttccaatatccaaaatttgacttttaaccaaaatctaatatatcctgaacaagctggtattagtttgaatttttattacatttttgagattcaaagttaatcaaaatttaaaatggcaattttcgacaaccatcaaagaaagaaagaaagataaacactttgacacacaagatctatctaattatcaaatccatgaattgttatcaacttgatcatcctttttttttttaataggaaaagtgagtatatatttaaagatgcctaaaaggaggctcaccaaagtacacatgatgtaactttgacacacaagatctatctaattatcaaatccatgaattgttatcaatttgatcatccctttttttttaataggaaaaatgagtatatatttaaagatgcctaaaaggaggctcaccaaagtacacatgatgtatacaatagctgcctaggcttatcaacttgatcatcttactaccaagaaatcttcctatcatcatcatatgaaaccatagttaatgaatctctgacctcaactgctaaataatcctattctatttaagagaaagaaaaaaacattatccaacctaatgatgcatgaaaatggtggaatggatgaaacctatttattttcttggtgttggtttttgctacaaatgcagcataaaggttgtttgattgttttgataagttgtcaatgattgagacatagtatttaaaaccctagatgttgtttgctgtgatttccaatggataaatatgttttctacctagaaatgagaaagctgtgcaatttggtttgggttgtggagcatgtatggttattaaaaaggtacaaaaatatccttaattaagtacatatacgaggctcatagtaatataaatatcaaatgtgttattattcatacatgtaaatggtttgatagcataattaatttcaatataataggagaaaactccaattttccaccagcttaggagattaggtaagaatcttgccaattagtgttgcttgtgcaaattagttgttagccaatcattttttttatccattgcggaacatctcaaagtctatggttcctattttcatcctttggtgctctttggtgttgcctgcgtaagtcagttaaggacaccttgactggttgaaaagggaggtctgttctaaggggatataaatacagctgctgtgtttattttggtgtttgtggaaagaatggaacagaaaaaccttagatggtttggagcagtggtagttgcagctggaaaatgttcttatgaattctttatttgtttggtctttcaggtctgtgggtatgggaagttgtcttttatagatcttattgatgtattggactatccttgagttgtgaagagttccattttttttcctatcttttgttttgttggttcagtgctccttgtataccttccatgtacctaagttgcaccccaatttattacgcacctattgctttaaattcttattttcctaagaaaaattaatttcaatattatgataatcagatggtccagaattttgtacacccatttggtgtctgttttcaacattctcttctcttaactataaaaggaactcataagacaatcagaatttgttctgtttaactagaatttgcaaattataattggattagctgattcttctgaatagtattgttaggttggccattttcttaaacagatttgattcgggttatccaagtctgactggattagagaatggttggcaccttggttaagtttgaattgatcgggtttcagcctgaccgattctggttggaaccaaagctattgccagctagagttcaaatgactggatctgtaatcagttattaaagtataatcaagctgaactcatagtgcagttggttattaatctgaaccatctatatcattactcataaatgtgatgcaagctaatgattgaatttgaaaaggtttataattttgaagtgtttgatagaccaaaatttgggatggggctgttgcacatgccattcatcttgtagatgacatttataagattgtggataagaagtgtaggaaggcatgggttttggcttttctttgtccgttaacttaatatgaggacttttgaggaggtgtagtggttggttcagaggcaaggttcaaagtattggttgagtttggtacgtctcagccaagtcatggatccttgagcctttccgctctgagtccgatactcgataccatatggatcatagactcagccaagaactggttaaacccagttaacttggttgagattccgggttgactcagttgaatatccaaatattctccaatttaacctggaaatattttttttccttaaaatcacgacaaaaaaaaaagacaaaaaaaaaaaaaaatgataaatctctgaaataattagagattttcgaatagttttaaaactcattaccttacctatgatgaagaagaagaagaaaagaaggagaagaagaagaacaacaaagagcaaccaaattgagaaatctttgaaaaaatctgagattttggaagagttttaagacccattaccttacccatcacgtcacccatcgacgatgtcattgtgaagaagtggtatgaatttgaatatcattattttatatactaagctatggtatgaattgcttcaatttggttaatgtattattttatatggtaatcatattatatataaagtatattattttatatgctaatttattgttaataatatattgaaaccgtttcatttattattatattaatatgtttttatatttattagtttttaaagtttatttaattatatttaatttttaaatatttttataattttgtgaaccttttaatccatcttatttgtatatcgtccaataccgagctgagacatcaaaaccaatgtggctcggaactctccgagtgaatgtttgttatggcgactttgaaccatgtttagaggttgaaaaagttcttccttgtgtcccatcttgagtggtgaatggttcctttgggttttggcaacttctctatttgatttatggttgggttgagttgcccaataggaagtggtcatctttctttttcctacctctattcttttctattttacatttgacactttttaaatacttcttgtatacttgggttgcattcccttcctttcttaggtgctttcttgtgataataatctttatttgcctattaaaaaaattactaccttaacttctcttgactgatgggagttttctttcattctctatgcctgaaacttaggtgtaaaactcaccatattaggaagctttgcattggtcaagaggactttagtatcacaccaaacatatcggactcctttccttcctgccatttttctttcttctttttcttttttgagactttggcattggttaaaattaattggagaatctctgataaggcaacttcttgttataaatttcccttggtccggtgtctcttcctaatcaagaagtcatggattgtgatagtgcacttcatgggaaattatagaaatttgataatgattagagttttactctaataggaggaatatggtggtgatttaagagataaatggtatcaggtgagatataaaatatgtgcactttgggttagctttaaagccacctcctaatttgacaaaggtacagtcttaaggagtcatggtcaggtgttatattggaggctagggcttggggaaggttggcatattatgttgcttccctgctttggattttgtatcatgcaaacacagaggtatcctaataaaatatggcattctggctttactttagtgtcttattgacttttgctgttctcaagggtacatattggaggatttggtccctgaaagctcttcttggagggatctcattctcaggcttgcaagtggatcgtggaggaaatttcttgctcttccttttgaccagttagaagtatctgattcttttatctttgtagttttagagagtacttgtgcagttttatatatagatctatatataagcataatcatggtaaattagtaggcatgttatatgctctcacaaaggctttgcattgcttaatgtatgtggattattttaatgcatgttttattatatgtgatggttttaccattgtgttctgtcaacatttaaacaaaattagttttgaaagttgattttatttcttaataaacttggaatgtttgttgctgctagatggtttggctaaggcaggaagtttattagttgataaggtggtaacaagactgcacaatcattgcttgaagccatcactttacatgtcataagttatcctttatcatagctgctctattgagtgtcctggtacttaggtttcaaatgatgaaacaagagtgagtttaaacttggagtattgaggctttttaattgaagcaggactaagacaagatgagaaaaggtcgcctttgttggttttgacacgtgtaatgaccaatgattacactactaaggattaagaagtgacttaacactggatgggcaaaagccagattggacaggactctcctctggcacatcctgacatgtattggacatcatctagagactgcccaaaattttcaaatttatttttgaccttatacagatggttgatagtgttcaaagtgcaggccatacatcactacataaaaaggaatgttaaaagatgtaaagaggcagatagtaatataagatgtgtggtagtagtgtagtgtgtgtcctgtacttggcgatgtgtttatttcgagttatgccattctcgatgaatagattaaggtaaattaattcctatcagaaaaatgaatcagatatatgtttcctgtctcacttatcaaatatatatatatatatatatgtttcctgtctcagtgcttgatgttaagtattttcctctctgatgctactaacccttgaaagcaatgcctgattttagtttctccacgtatgaatgaaaggttggaggttgccttctgtagttttttttttttcccctttttaacgccatttttgctggtctctttctgtttgtctctttagttactccaataactgttgtaacactgggagtttgttcaggctgatttttaggagttcaagtacagca

SEQ ID NO: 10405 - DNA, 16946 bp, Vitis vinifera
  Intron number 2 from transcript GSVIVT01037216001 (locus G SVIVG01037216001) derived from phytozome v7.0 (chr-ID chr1 8; pos 27894079 to 27911024 reverse strand)
gcttctttttggcgctttttcatcttgtagccctagccggtgttgctagggttcttcagtcttcaggatttgttcaaactcgaaatattaaattttgtcttcaatggctcccactttttcttcaatgggtttaactcactggatgatgaacattgcagcagacccaagccaaaggagcaaagtatttggtgtgtttcccctgcaaaaccaattcataagccagtggcgcggacttagacttatttataggccctgaaaccctagcaaaaccaatttataatcatgtgggacaaggattccaaaaaaataacaaacactaattaagtcaaaaactgaccaatctccaccttggcaaattagtcctctactaccaactaccaaaattcttcttcacaagtgaactaattatcatctcctccaaatgaacctttagatgcccgtacacccgaaaggcattcaaactccaaggtttaaatcaagttcaacaatgcttgaactagaatgttagtaccaccgtaataaagatatctgccggattatttgcagtttcagttttttggatgtaaatatttccttcaataatttcactaaaaagtcaaattgaacattgatatgcttcaaatgtatgtgataagcttgatttttaactaagtgataacactttggctaccaaaatacacactaatacgtttttgaacaacttcaaagttctaaagcagtccatgtaaccaaatcaccttcttaacaacctcagagaataccatatactctgcctctatttgacaaggcaactataagattatagagtagacttccaacttgcaagtctgtagcaaaagtaaatacatgacctataattaattgacatttattttaagtcagttgtataatcagaattgacataactaacagtacatttacctataccatcatcctactaaaaaaccaagccaacatctaaagtgtgcagaatgtacatattgtaaaatccatttcatagctcgccaatgtccttcaccaagatcatccagatacctgctaaccaaactaacaacttgtgaaatatcaggcctcatacacatgataacatacatcaagctatttactgctttagaacaaggaacttgcgataggtactcatgttttgcatttatgccaccaagcttgaaatgagaagcaagtgggtacttacatgtttggattacttagtcatgccactttgtacgtgcttgtttattcaaatattgcttgtgtcaaactaccctagcctttgactctatctttgcatatttctgtgccaagaatctttctttttcttttattccattttgttgacttaactgagttttcagtatttcaatttccatttttcgttggatgctaccaatatattatcattatataggagcaagtatatgaaagatccatcatatagattgcgaaaacatacactatgatcaaattgattttttgtgtactattgtctagcttggattggagttgcttaatccatatagcgaatttctcaatttgcatttcagacaaccttaaaaccatccggcttattcatatgaatctctcctttctcatgaccattttaaaatgttgtttttatatcaagctgaacttgttcaaggtccaacaatacaaccaagactaacaaaatttggatagaggaatactttaccattggagaaaatacgtcatcatagtcaatgccttcttcttgaggacaacccttagcctagaaattgtcttatttttgtatatacacatttgcttccaatttttttcttacccttgtgtagttgagataactcccacgtctcattcttttgaagggactacattttctacttccgttgcatgcctccaatgtttactaaatttattttttcactgcctctttgtaagaagaagtacatcctcatctattattggaaatacatatactatcatatcaacaaatcaagtaagcatttgaatatctcttcttggtctagtaactatagttgaatcttgctattgtggaagtacttgagttgcagtatcttcttcatgtatgatatctttatttgacatttcaaggttacttactagtcgtctcattgacattttctaggtcaattgatgttttcagaactccacatgttttgaagtaccatagtcttctcttcttgagaacaatttttcttcacatgattgttgtagggacccctccctccaagaacatgtggcacgcatcttgcagtgacacgtggcatgcatcttacagtgacacatgacactaattgtcatccgagtcaccctcatccggatcttcctataaagcacacatgacatgcttttccggattacctcaaggaagatcaaacgacatttataaacgtatcatccggacggcttacacaatacatccggatgatcaacatatgccatccggatacaatggtccggattattgactgaagtaagcaagtctcacacgttaccacaacagcctgtcatggcccacgttccgccacctgcagggtgagaggacaggatgaagtgacaacaagtcacttcctacgatcattccacatgatcacttcccacgatctctgacagccgcatcacctgccacgatccctgtcagccgcccgtagggtgatgatggccatgctgccacctaatgtcatcatgacaaacataaaatatctccccaccattaatgacaggaacaatgctcctagaactatatatatcaaccttcacacaaagaggaagtaagcttgctatacctagtaaaaggccaactgatttgtccctctcccaaaccatggctaacaaaaccatcggagggtgcatccggacaccccgtccggatgtcctttttgcaggtataacgactgaatcaagaacctattttggttgaggtcgcacatccatccatttggcaactacgtgaaacaccaggagcgcgaggtatcaacattggcgccgtctgtgggaaaactttttcattcagtcactagcaaagatggccacaccttcccgaagtcgttcatctggtaggagagaggaagatgattttgaatggcgtcagaccatcgaaaaaagacagttggcaagcgaacgacaactgaaagctctcctctaggagacagaaagattgagagaagaaaacattgtattacgcatccaggcttcaacatcagggcctcctcgacgtcagcgttcaagaggccaagtagcaaactcgaggcctcaacaagaaccagaatcaatatatcctgggaccacaggagccatcccaggagcatgcaacgtgaggcctcatgagccacacacgcctatgccttgagctccccgtgaggaaagctcagactctactcacttttcagcaaaaagacaactcgatagaagacctcagttgtcaaattcaatgcgcacaagactaggcccacaagagcctggaaggtcaaggccaccagtagccacaacctgggcaccacgccctgaccccatggccacccccatggtgcagaacgtacacccgcatcgtgaccccatagtcacccccgtgatgcggaaagttcattcgcacccagcggtacagcaggctgggggaaacctcccaaatgagccacccattagctccatcagcagaaggctggatgacatgctctccacgcccttctgctctcatatcatccattacgagcccccaaggggattcctcgtgccaaaattttccacatacgatgggactagcgatcccttcgatcacatcatgcattatcgacagctcatgacacttgatattggcaacgatgcactactatgcaaagtatttcccgccagcctacaaggacaggccctctcatggtttcatcacctacctcccaactctgttggcaatttcagggacctgttcgaagctttcgtgggacaatacttgtgctccgctcgacacaagcaaaatatcagcaccctgcagaacataaaaatgcaagataacgaatccttgagggaatttgtgaagcggtttggccaagccgtacttcaagtagaggcttgcaatatggatgttgtcctacagatcttcaagcgaagcatctgtccagacactccatttttcgaatcactggctaaaaagcctcctacaacgatggatgacttattcagacgagccaacaaatattcgatgctcgaagatgacgtgcgtgcagccacccaacaagttttggttgtcggacgaccatctagaggtgacgcggagagaaatgctaaacctccggatcggccaaggtcgtccgatcggaggcaggagggaccgagtctcccggataggccgccccccacgcctctttccatatcatatgaaaaacttctccctatgatccaaggtttgtctgacttcaggtggccaagaccccaaggaacagacccatccacaagggatcatagcaagagatgtgtcttccacaaggaacacggtcacacgacagaaacatgcaggagcctctagtatctggtcgagaagctcatcaaggcaggacatctaaagcaatatctccgctcagatactgaaggaaaagtcacttctcaacatcacaatcctagagcccccagggccccagccgcccccaaggccgttataaactatattaacagaggtccatctgacgaggagtacgactctaggcgaaagaggcaaaaattgttgcgggccgcatcaatacgcgaacgcatcaattccatccggcttgggctaactggaggggaccctcgccccatagatgggacaatcattttcccaccagtagatcccacccggacactgcagccacatcgcgacgtcctcatcttgtccctggaaataggagacttcgatgtgcggcgtatcttagttgacccaagcagttcggccgaccttatacaagcatcggtcgttagccacatgggacacagtctcgcaggcctcgaaaaccctggacaaatcttgtccagatttaacggatcatcaactacgtccttgggagacattgtactggcggtccaagtcggctcagtcactctcaacgtacaattctcggtggtacaagagttatcacccttcaatatcatcttgtggcgcgcatggctacactacatgaaagccatcccctctatatatcatcaaatggtgagttttctcaccaacgaagggcaaattgacctgtatggcagccagctggccgctcgccaatgctatcagataacacgagaagcaggggccaaccaggaagatgcatctccccctgaacccagccatgcacatgaccaatagcaattattgggtccggcggacaaagatcccccgacagcagatcccttacaaacaatccaaatttcggaggaaaacactcacctcacgaacatcagttccctcatgacaaccgaagaaactcagagcatgcaaaatattctcagacaaaaccatgacatcttcgcatgggcacattctgatatgaagggaattcatccctctattgcatctcacaggcttaacgtcttttcaactgtcagacccgtccaacagaaaattaggcgctttcacccggatagacaagaagtcatccggaatgagattgacaaattgctggaatccggattcatcagagaagtagcttatccggattggttagccaatgtggtggtggtacccaaaaaagaaggaaaatggcgggtttgcgtagattacaccaacctcaataatgcatgtccaaaagacagtttcctttgccacgaatagatcaaattgtggattccactgccgggcaagagatgctctctttcttggatgccttcttcggatatcaccaaattcccatgtccccagctgacgaggaaaagacagcattcataacgccacacggcctctattgctacaaagtcatgccgttcggactcaaaaacgttggcgccacttatcaaagactgatgacaaagatcttcaaacctctgataggtcacacagtagaggtatatattgataatatcgtggttaaaagcaaaacccaagaggagcatgttcttcatttacaataagtttttcacctcttgaggaagtatggcatgaagctgaatccttccaaatgcgcctttggcgtaagtgctggcaaatttctgggttttatggtcagccaaagagggatagaggtgagcccagaccaaatcaaggcagtcatggaaacacctccccccaggaacaagaaggagttgcaacgcctcacgggcaagctcgttacattagggagtttcatagcccgcttcactgatgagttgcggcccttcttcgtagcaatacgaaaggctggaacacacggatggacgaacaattgtcaaaactcttttgaaaaaattaaacactgtctcatgcacccacccatcctaagcagtctcatcccaaaagagaaattatacatgtatctggctgtatcaaaatgggcaatcagcgccgttctattccgctgcccctcacctaaggagcagaaacctatctactacgtcagcagggcattggcagacgtagaaaccagatattcaaaaatggagttaacagccttagcccttcgaagcgctgcctagaagctccgcccttatttccaagctcatccagtgatcgtactaactgaccagccccttcgcaacattctgtacaagctagatttaaccgggagaatgctacaatgggccattgaattgagcgagtttggaatcgaattccaacccagattgtccatgaaaggccaagtaatggctgacttcatgctagaatattcccgaagacccagccaacaccacgaatcaagtaaacaagaatggtggactctgcgagttgacggagcctcatgctcatcaggctctagagttaggctcctactacagtccccaactggggagcatttggagcaagccatccggttgggattctctgcctctaacaatgaagcagaatatgaggccatcttgtccggattggacctcgcccttgctctatcagtctccaaactccggatctatagcgactcacaactcgtggtaaggcatgtccagaaggaatatgaggctaaggacgcacgcatggcgcgatacttagctaaagtaagaaacaccttgcagcaattcaccgaatggacaatcgaaaaaatcaagcgagctgacaataggcgcgctgacgccttggacggcatagctgcctccctccctatcaaagaagtcattctattgcctatacatgtgcaacccaacccctgtcacagaaatttccacctgcaataccattgaggcaaaccaaacggacaggtaagaatggacgtatgacatcgcagaatatctccagatagacactctacccggagatctcaaacaggcacacaaagtccgggtgcaagctgcccgtttcaccctgattggggggcacctgtacaagcgatccttcacaggaccttaccttcggtgcctagggcattcaaaggcccagtatgtgttagctgagttgcatgagggaatatgcgggaatcattcgggaggacgatctctggcacatagagctcattcgcaaggatactattggccaacaatgaagaaagacgcggcagcatatgtcaaaaggtgtgataaatgtcaaaggtatgctcccattccacatatgccatcagcaacgttgaagtcagtctcaggcccatggccttttgcgcagtggggcatggatatagtaggacccctcccagcagcgcctgcctagaaaaagttcctccttgtcgccactgattactttagtaaatgggtggaagctgaagcatatgctagcatcaaagacaaagatgtcaccaagttcgtatggacaaacattgtttgccgttttggaatcccgcaaaccatcatagctgacaatggtccacaatttgacagcattgcattcaggaatttctgttcggagctgaacatccggaattcatactccacaccgcgatatcctcaaagtaatgggcaagcagaagccacaaacaagaccctaatcactgccttaaagaaaaggcttgaacaagccaaaggaaagtgggtggaggagctacccggcgtcctatgggcctatcgaaccacacccggacgaccaacaggaaacactcctttcgccctcgcatatggaatggatgcagtcattcctactgaaataggtctacctaccatccagactgacgcggcaaagcagaacgatgcaaacacggaattagaaagaaatttggattgggcagatgaagtgagggagagcgcagccatccggatggcagactatcaacaaagagcatccgcccattacaatcgcaaagtaaagcccagaagcttcaaaaatggtacactagtccttagaaaagtttttgaaaacactgctgaagtaggcgcagggaagttccaagctaactaggaaggaccctatatagtgtttaaagcaagtgaaagtggagcctatcatttacaaaagttagacggaactccgttacttagaccatggaatgtgtccaatttaaaacagtactatcaatgaaaaagcaagacaagttcaaatggaaaaaagaagtgttttattgatatatgtaaatgtatgtacaaggaggtctccggaacacaaaaaatacagaaagaagattacggaaaaaattgcaaaaagaaaagctatcagggagcaggcttgtcaagaagtttcttctcttcacccggaggaattgaagggacatctcgctttatgccattcttcttcatacaacagcgatagccgaagatgaacgtatcatccacttgttttttatagtccgcttcaagttcctccctctctgcagcaaactcccactctagctcttctttttgcgctgttaagcgcagctgcaaatcttctttctgcttcttttcaattgaagcctctatctggagttgcctcacctcccccctcaaccgggccatctcatcctctgcctcatgcaggcgggcctccatcgattcctctcggctctttggttcagccaaatccgcccggagggcctcattctccccccgagcggtggataaactggcttcagcctccgccagtctcaggcgcagctgatcttcactatttttgtgtcgggacgcgaaggccttcatataatcaatggttcgcagcaagtcactgaataaatcgtgttgttgagccatgccgcgaagaccacttaccagctgcatccaagcgcacaaacgagaaaagcaaagttataaatcacaccacaaacacatatcagaatgagaaagaatcaagaatcacaaaaacagtataccgtttccaccatctcgaacatcttggctgaaggtatgatagtagtcaaaccgggtggaatctgtttcagcttatcttccaactccgcgtagctaaaagggctagcggatgtgcaagccgcgtcattaacaagatccccacctgatgaggcgacagaaggcgactcttgttccggattcggggcctcaacatttacggccgaatgggtctccctaggtgcaacctcatccgggaccatcaccgggacggctggagtctcagttgccatctctacttcgcccccctccggatgagcgtcgtaggcggatgagcaactaacttcaatctcttgctgacgatcttgaagccgcccgatgaatccggaccttagattgcgcgccgaacgcggcctctttgaaggtggccccttcaccagaacaagagtcagacggtccggatcgtcaaagggctgactctggctttctgcccctgcttcttccatcggggtcgcacaaacggcttcagctgcatcgacatccggattaggggagcccggatggtttatggacgcagcttcctcagccaaattagccagacgggcaaccgctaccaaggaggtactcgagtggttcaaccccgcgacgtgtccaggtccgcttgagatagaatgaggagcagggttcactggctcctctattattacctccgcctcgtgagtaattggcggaagagcaaattccttgggaggagtgggctccttcactctcttcccatcttcaccagcttcctttttttcgctggagctttctttggaggagaggctgcgccgcgtttctgtccgggagctttccgaagggttccttcattttttctcttctcccgatcatccaggagtgctcggcgtttttcagcgtcagcctctttaaactcctggtagatcgggagatccttcatagtataatgctccccaggcactacctcctttggcagcttcctggagagaatattgacgacataatcctgggacttccggacgaccgccattagattccgcatagaaagcagcgtcttgtagtgcctctccttggcgtctatctcaaataacttattgagacaggcaaaagacgtcttttccacccagtccacgatgtggcccctcttttccggacctgcattgacagcaacaaaagatgagaataccgtccggaaaaatcaacaaaaagacaacaaagtaaaagccggacaaaagtcgcaaagcaaacttacccggaatcactaaggagtagtttggagataagggcctcgccggatgcttcgaccccgcccatgcaccccggaccaccacgtgtcccttcgcacctcccttcgtcgagtccggcagctccgtcaccaattgaagggagggcaagtgagcggacatgctgaagatgtcatttttttaccttcttcagagaatagacaaaaaacacctccagcagcgtgaggtcgaggttgtacagcatgtttatgatgctgcatctcatcagcacccggacgatgttgggatgaatgaaggcgggtggaatctgggtgaaatggaggaattccttgaacaacgccggcagagggaaccggagccccgcgttgaattgttcctttgagaagatgatagtatctttttcagccttctcagtcggcacaaacacctcctcatcattcagcaattccacaatcacgccatttggaatgcagaaccggtcctggaattccttcacatccagtttgtccgtcgctttttcatgagcatcgccgacccgagtagatgaaacagttttcttctttgaagacatttcttagcccaaagctgaatcaaaaacctacatacaagaagcgcaacggttaaacacaagcgatccagaaaactcacaaaccctaaaccaaaacagtcaagaataccctcgaaaaaaacccagaaaaccaacaaatcccaaacattcaacacacagtcgcaagcgatttgcccaaagcaagtcagaaaccaagctaatgaacaaacaagcgcaacaaagggaaaacaagaacaaaaatgcacgtaccaaatggaaatgtggagaagaaaggttgttgttgcgacataaaagcaccagcaggaaaaactctaaggttttttcactcagaaaaagtaaagaagagcacaaaaggaagaagaagcaatctcagaaaaaacgcagtaggaaaaaagtaacagtgggcacagtatgctatttataaggggacagcccttcggaaagccaaacgcccaacaacgccatcattgaaacgacatgctgcctgggaatacccagagtcggcggctcatcataaaagcctttttggctcccgcacccccactcgccacgtggctgattactactcaaaaagtgctatttgatctataattaatccttttaaacacttttgagtagtagtttaggtcttttaactcaattggcatgttaaggatcctttaaagcaattttgatcactttgtgtaagttttggtgtttttgttagtattttgatcaccaaagcaagtcaagtctgaggagagctttgaggaatcttgggcaaagttgagaagtcatttgccaagagtaaatccggattgcaaggagaaaaagcaaaaagaatctgccataaagcatattcttgatgacagtcgtagcagccacttttggagcactttctgatgtccaaatgatgcatgctatatatcatttcaaagctcaggaagtcaacaatccaatgcttcaaacggtgtgcaattcggagttgaaacgaagaagttgtagccattacaagccaatcactccgagctgaaggaagcattttgcaaagtgttgcgaaatcacccttttgttgcgaagtgatttcgcagcctttttgaacagtgtgatgtttctccttctgacgatgcccgatttatgccgcgagaaggaagctgggaacctcaaggtggaagccaacttcgcagccctgtgaagatagcttggtgttgcgaaattatttcgcagccctcttgagtgtctgcgaaatctcgcagacaccatttttctcctgcgaaatggttcctgaagcctcccgatatttactaccaacattgggagatattttccattagatttttgttgtctaaatcccaaaatactccttgtaagccaccaattacatgattccttagtttttaagttagtaaaaagactaaatatctatgtaataattagttttatattatgttcatatatatacctctcgggagcctgttctcggagaagagttccttctgtaaaagtttgggtaagcaagtaaagtttattttctttctactgccttaccttctcactttgtattttcattttcttactaagttatgaactctctgaggagttttccctagaaaatgagtaactaaacctctaattccttggagctaaggttgccgaggaaggttccaagtgcaagaatgcaaagctctgtggttttagctattaatgaagagaaagtgaaatcctttagtgatttttatgtttttagttaacttaaaacactttaaagtcacctgggccaacacttggtaaggcaagtgatttccaaccatggaaatgcactagtttaccccttgcgagcctctgggaggtgacttcaaggtaggattttttagaatagtcaacacttggtaagcttttagactcctaggagacatccattagttatctcttgcgagcttttgacgggtaatccaaggttaaagatcaccttgaatggttaaggcttagtgagaggcttaaaccattgcaagttgcatcattgagagaattaaagtgaaatctaattgaaggagtctctgtacatcaccaattagagaattgactatatgttgaatctctaacgcgaggaaatgaaccatctgaccagagccgtgtcttttgcatgaggaaccaccccagtgaacctaaatctcaaaggaatgcttttcttcctaaattattccaaacttctgttatgttagttagtttaagtctaaacctttaccaatcaaagtttgtgttttacttcttaagctaaccatgaaatgaaacaaaaccaattcacttggaattggtatcattgatagcttgttaatctttcccagtggacgatcctagagccactatactatagtagctttttctttgctaccctagtatatggtgttataggttacaaattttgttgattaatccctcaatcaaggagcaccagctggacacgaatcagctgagacaccaattgggcacgaatcagtggcccaaccagacaaaaagtcgacttcggtttcaaaaaaaccaattattttttaaccaccctttttgctcaggcaaaataggcaagttaaaaatgggggcattatagggacccctccctccgagaacacgtggcacgcattttgcagtgacacgtggcacgcatcttacagtgacacatggcactaattgtcatccgagtcaccctcatccggatcttcctataaagcacacatggcacgcttttccggactacctcaaggaagatcaaacgacatttataaacgtatcatccggacggcttacacaatacatccggatgatcaacatatgccatccggatacaatggtccggattattgactgaagtaagcaagtctcacacgttaccacaacagcctgtcatggcccacattccgccacctgtaggatgagaggacaggatgaagtgacaacaagtcatttcctacgatcattccacatgatcacttcccacgatctctgacagccgcatcacctgtcacgatccctgtcagccgcccgtagggtgatgatggtcatgctgccacctaatgtcatcatgacaaacataaaatatctccccaccattaatgagaggaacaatgctcctggaactatatatatcaaccttcacacagaggaagtaagcttgttatacctagtaaaaggtcaactgatttgtccctctcccaaaccatggctaacaaaaccatcggagggtgcatccggacaccccgtccggatgccctttttgtaggtataacgactgaatcaagaacctattttggttgaggtcgcgcatccatccatttggcaactacgtgaaacaccaggagcgcgaggtatcaacaattgttacaatagagaagatttatcaaaagttaatttagatttatgggcaccaaagataatatcttttcacacctatacagagctccatgaataatgatctcttggctttcaaatttaatttagattccttcacataaaaaaagacaaccaaaaacttaataaggaatcataatcatttgcaggttttttagaccgtaccttaataagagttctacctttaattatatcgggtactcttttccatcatttggcaacatatatcgagtactcttttccaacgatgtcataattgtgaaatgttgaacaatgctctcattttgacatggagaaatggatcactttttttattcacctccattttctaatcttagatagttgatcttccaactagtctgactttcaatcatctcgttctatttaaaaaacactcccaaagcttcattcttagttttcatggcatacaccccaacccttttacattacatacagccaaacccttctacagaagtcatcaacaaaagaaacaaaatagtgcataccttctaaagatgctactcaggctgatcccaaatcatctgcatggaaataatctaagataccttcagtacagtggaatattgcagtctcaaatatcactactcttgtttgctttccaaaaatatagtgctcacaaaattttccaaaaattcagctgcagtttactgaaacacaacagatattttattcctttggcttgggtctgctgctacgttcatcatccagtaagggttaaatccattgaagaagaaaggggaacagtccaggatgaattgagtatttttgagtttgaagaaatcctgaatatcgaagaagcactctagctttacaaacgagggctacaagaagtatgccattacactaagtgggcttgtttcaggaattcttgttggtttagatcgcatgaggaacttgcgttgagttctctgtttatttatagatagagaatgaaaagagaagtttgctaatttaggaaagcttttacacgtgaaatggtgacgaaaattgggaggtgtaatcagtagagagagattgtgaacaatgaaggaaaacaggaagaagatagggcagttgaaggtgttggttagttttagttgaagagaacatggaattgttgaggcatcagtgattaaagattcaatagcaatttcattaagataaggataaaaatatgttactaaatataggaaacatgcagctgacggttgcaatacatgtgggccgttgatgacatggctatttgcagccccttaagatttaaaaatggcggtagaataactccccctttcccccaaaaagttgcacttccacaacaaataattttagtatatacatacatacatagagagagagagagagagagagagagagagagagagagagagatgagagatgagagatgagatgtgggtcaaaatatcttactaaacataggaaacatgtgtgggccgttgatgacatggctgtctgcagcctctcaagatttaaaaatggccctcgaataactcccacattccctgaaaaagatttgaaaatggtacttcagccatctcattatggtcacatgagttttgaactaaagctttctaatacataaatctggattgttgaatagtgattatttttaaaaaaaaaaaaagaattatataggaacaaataattaggtgaagatattaaaaatgatatctagtatatatatatattagcccattgcaaagtacatattaagatattatatttattttatcatatgcccaaattcagtccatgttctagtcatgtgacactttccatgtgttgattcatcattgtgaaggtaggttggcctcacaccatgtgagatagataaagtaacaacttctgaagggaatatgaggttatccagggggcacagtttttttaatttcttggtaggctacagatggctttgtcattaacagcccacatggattgaaaccatcagcagcatatttgccatatttaacaacaaattttgagcctcatcttaaggaatttcggttaaatctttaattataactgccttaacaattccatgttctcttcaactaacttttaaccaacactttcaactacgatatcttcttcctctaatttttcattcttcacaatctctctctactgattacacctctcaattttcctcatgatttcacatggaatatgacgcagcctctcctctgctaaaagctttcctaaattatcaaattcctctctccatttttttgctataaataagcagcaaactcaacacaagtgcttcatatctagaccaacaagaattcctaaaacaaaacccagttactacaatggcctacttcagtagaatcatctccttttcagtgctttccctactcattgccctagcttgtgaagctagagtacttcttcaatcttcggga

SEQ ID NO: 10406 - DNA, 4563 bp, Vitis vinifera
  Intron number 2 from transcript GSVIVT01000553001 (locus G SVIVG01000553001) derived from phytozome v7.0 (chr-ID chr1 ; pos 7173620 to 7178182)
gtcagaacactggcaacttcatcacggtatgattctaatcacaataggtttggtatttcctaagtgcaagtcgtacagcatttggttgtccatgcagcgtctccatttggaggctgtagcagagtttcggcaaataggaaaaggtgcagtctgataattgatgctgaagaataggctagttggtgaatcaatcaatcagtttttaaaggactaggtcatgacaacttatgctctttgtttaattgatcataatttttaggttgagatccatttctttagaatgaacagaactccattggttggagcgccatcattcttatagcaaattcaagagtgatattgtttagtttatggtatttggaatgtggagccctagggcaggtctttatcatcagggagaattgtgatgttctgctagttttaaattgcagttgaaaagggttattattctctttttctttttctttttctttcgatatctcctgttcatcaaaatgtaggtctttgttttgcaagttttcatgaagcttttggtgaaaaaaaattgcttaattctagttggtgatacaagtgcatgtatagtttcgactagcgtttgttgtattatacttgattgtcttgtgacaaggacaatatgcatggtagaagtagtttaaagtctagtattcttgaaaattgagactaagataaatgattactttgaatgaagtggatattggctgcagtcatttaaagcatctaactgtatgatagtttaaaataattttgtgttcagtatgacaaccatgactgaaatgaagatgctatgagctgcatatgatgaataattactagttgcagccctgtgtttagatgatgaatgataaattacccaccaaaaatgatggggaagaattgcctacttgcaattaaactatattataatgtttatatgtatcaatttttatttttattttttatttttgttaattcctagacaatgttttaaccttaagaagtttgtttttatgcaattttataagaaagcagatgccatcttccttctgtgtcagaatggaggcattttgattgttggcggttagttatttattcaaaatatattaaggggacaaaagcaataaattcttcaattggatggctaatgcccataagagagtcaatcttaagcttaaagtgaatgggactggctttcagaggaagaagagttgaagagaggaatctcaactatttttcagtctatgtttgagaatccctgtttaagggacttaatatggagagacacctgttcaagtttcagaagctctattgtggacttagagtgcaagatggatatggaaaaagtttatgattatgtaaactagaacttcctccttttggtaatgaaaaaaatgggtttttgacccaaatggttgaggtggatctgcttctatatttcttcaatgagtaacggctctccaatggagctcttcaaagttgtggaggtttaagtcaggggaccctctatccccttatttgtttgttctatagatggaggctctgaactgcctaatctctaaagcagtgtaagagggtttttctaagtggctttaggttgaaggtagaggggaagcaggattggaagtcacacacttattgtttgtagatgacactatttttttcctccagccagttttaagcagttaaacattggaaataggttctgatatgttttgatcttgtgttaggtttgaaagtgaacttgtagaagagtgagataattctaattggtgaaatggcagaattgaaaatattggcctcattgtttgggtgtaaaggtcaggaaccttccatctatctcaggatgcctttgggagcatctcatgagtcttatgtgtgatattcagttgaacagagtttcaaagggaaaccggccccttggaagaaacagtggttgttgaggggaggaagattgatcctcattaagaatactcccactagtcttcccatatatctcatgtgccttttgtgatgcctatgaaagcgaggaacaggttacaaaaatatcacagaggattcttatggggaagtcattttgaggagagaaatttgcaccttttttttttaataggtaaatgcaattatattaaaacgctaaaaagggcgcaccaaagtacacacagtgtatataaacggtggccaaaaaacgccaaaaagggaagagaaaacaagaatattccctccctcaatttaaccccaagcaataaatgaaatcaactacggacatagatgaatgttctataaacaagtaagcccaagataataagctgcacaaaaacaaagacttcagcctttaaactgcaagttccatattttcaaaagatcttctatttctctctttccaaatagtccaaaagaggcaaaaagacattgctctccacactttcttcctctttcttccaataaacaagccatgccaccctaacatgatctctctaactgtagagtgaagcacccaacacaccctaaccaatgagaacaagagctcccataatagcctttttccacaatgcaagagtatgtggtcaatcgactcctcatgaacataacaaagggagcatctattggctaaaaaacaccctctcctttgcaattggtctaaagtcaaaaccctctcccatgttgcctcccaagcaacaaaactgacctttgtaggaacccatgcattccacacaacacttaatgggaaaggatctacccttccttccttaagggtagaatagagggactttatagagaaggatccactctttgtttcagcccaaaacaccttgtcctccctctcctcaaccaccacattatcttgaattcttgacaagcactccactgtcccaatctcctagtcattgagaggcctagacaagattgggttccatccacctccctcagaagagtgcaaccataagttcgccacccaagcctcctttgagctagctagagcaaacaagaagggaaaagacacataaaggctcatccccgcaccatttatctctccaaaacttgacccttctcctattccccactgagaaggaagttttggtagagattaactcccaaaaaagccttatagccttccatagcccaacaccatagttgcccctcacttatttagagcaccaccccccttccattttaggagagaaaattgcaccttatgaattgaagaacaatgtgtaaagataaaatatgtggagaattgaatattaggaagttggatgttcttaacaaagtcttgttaagggaaacggttgtggagatgtgcccttgagcctaatagcctatggaggaggataatccaaggaaaatatagagatatcaaggaggggttggtgcacttaaaggtaagagaagcttttggtgtgggtttatggaaagcaaatagaagaggatgggaggaattcagccttagaacccatattctggttagggacggtctcagaaccaattctggttagatagacaggtgtgtgagtgtggcttgaaagaggcattcccttcactattgaggattgctctattgctcttgataggaatgcaacaatagctgacttatgggtggaggagacattttcgagattggggttggggattgtgaagtaatttatgggctcatccataaggtgaagtgtcagaagatgaggatagtttacttggaggaaggggactttcaaactgaaattttcaatcactcattttatgatgagaatcaggtccttttccatcctaaagaaaattgggacacctttgcccctttgagaacaagttttgttgcttgtggggaaagatctagccattgatgtccttatgaagagaggatggttgatgaccaacagatgcagtttatcaatgaggaatcagcaaactactaccttatccgttgtgacagaaccagaaaattgttgaacatgttcgcaatttttgggctgcagtgggtatttctaaattctgtaaagagctccttctggggtagaatgtgaagggtatggataaatggcggaggaaggtttggagtgtgactcctctttgcctgttttggtgtgtgtgacatgaaaaaaatagaagggtctttgatgggaagagctccatgaccaaaagctgaaagagattcttatcaagtctgtttgggaatggtaaccttgatggcgagggactatggttctctgttgggttttattaataacttgaacagttgattgtggtttttgattatttttgttttggtgttgcttcttttcttctggaatggtgcctcttgtataccacctatatacataaggtgtgccaccgctttttgattggtaatgtttaatacattttgtttttgttggcctaaaaaagagaaaaaagaaagaaaaaaacatttaagatcgcatatctaaaagttgattttctttgaaggcattcatagaaatgccccaccaaatggttcttttcagttgcttgtcacctaaatgcatgcacaagtatgtttcattatgatagataaacttccttcctggttgcaggatcggccttcaaccaaagtcc

SEQ ID NO: 10407 - DNA, 5717 bp, Vitis vinifera
  Intron number 3 from transcript GSVIVT01009584001 (locus G SVIVG01009584001) derived from phytozome v7.0 (chr-ID chr1 8; pos 9650689 to 9656405)
gggttatcaagtgctggtgcacagaaaacgcccttgtaagcacaaacattggccccttcccagttggaggtggtgttaaatgggtcagagtacatagcatgtttccaagcttggagtgcaatgtaggcttgccgcagcctagcgttggcaaaggctactacaagatctacctcatattcaaagtcattgggcaagtcaccatctttaggaatggctaagagttggcgatgagcaataagagaggcttcctcatcagatagagccaaggagaatgatgacaagggagacgagaggagaagagagagcaacaggaagcagcctgaggcctgcattttttggagggactgcaatagggcgccaccttggagatgcccagagctgcttataggaaagagacgatcaatgtggggtactggttcaaaacttggggctcacccacgtggattggtagcttttaagaggctttgcaacaatctctctggcaccagaatacaaggtgttgtcccttacgcacaatacatttcgcgggtttcgaataatttgtttgatttagaggtacccccttatttttaagtacggtttagcaatttagcccttcaatattggtcattgcctaaatataaaattaaccgttaataaactaaccaacaaccaacgaccaagtcaaccaccaactgccaaaatgttttcatggaccaatgcctcctttgctttgaggtgagacctatcttaaggaacctatgatcatggggcgaccgttcctctggttgctactggcggatattggttagtcatcttgtgtctagagaagctacagggtaaatatagggaaattgcttaaagtccgtagcccaactagacgttccacagcaagttttctcaaaaataaaatccatttaaagaataaacttctacagaatatgtaagtaataataacaatttaaattttacttaggaggtaggaatttggactgggtctggtctgttcctttggatgtggctggatttgggcccatccgaaggtgactatggctcaatgcaagcctgcgagctggcccagtttggaccacctcgtccctcctacagagtcatgaatgatgactgatgactcgagaggcaagactcgtacaatctggacgtatcgatacagtattgcctacagaacatctaatcctcagagaatcgaactcaaattcgcaagaaacacctaaacgtacgtataaaatgcagagtctaagactctaatttcttgagatgtctaggatgactgagctttcttaagttctctgtcaccatcatcagttctttgctttccatttcaagagtttggttcctcctgttatcattggtcaacctgtgtttttcattgtaaaatttggaatctttcaactgccacttgacaactagccaatgggctcagagtttgcagtatggagtgaggctacaagttgttcatagttcttaattgattgacctaatgtggatgattggtctaacatgatctaaaacgtagttcgtatgaagcgtcatccattcattgatttatttttgtatggaatgaggacttggaccacccaacccaggacttgccaactcacattgcccacagtggcatacatgaaaatccactcccacaacccattgaaaattacatccatcttttagttgctccataagaaaagacatcacccacaaaaacttgcatggctgtctcgtctcgagaatcaaagatggatattgagcttttgtgaccccactatcctcactcacttagatattggtgaactttatataccaaagcagaatttgaatggaatcgacatcataggaaaagcgattcaaccaaaaacaaaagggctaaagcacccaaagaaaaaaccctacacatccacataaaaaataaaaaaataaaaaggcactctactcaattactcaacactcggcattcgccattgcgaaaggtgatgcctttctgctccaaaatctaattgatccacttggacattaggggccatgcgcatgctaagtgaggaactgaagcatcgtggctcgagccacacagcatggatccccaatttcggttattaattggggcacctacataatggctacattcgttcattcattcagacccagtactgatatgataacattgataaatgaccctcgatgctatgaatcatgtgataaaataaaaggcaagtaaaagcccttaatgaaaacttcctcattagaaagaagtgacattatggaattcatcagtttgcaattagactttatggaagtccacccaaattcatttattagtggatgattacgtccactccacatgtgatttttttattaattgattgtgaaaacaaaggaaggttagttgcatataagtacaaactaagcatgccagtgccttgtttcagctgctgctctgtttctcttgcattaaataaataaattaaaataaaagagtgaatcaaaatgcaaagttgaatgtcagaattgtaggtttttgctgagagatggtttgggatatgcaggcaaaagaaaggatgtgtggcacaatccaagggtgtgtttgggactagggcaaagtccaaactccaaagcacaaactaaaagaaaaaagggggaatcttgttttggggagtgtaaatactaaaaacggatttgggttgaggccaaacaatctccaaacttcaatgcaaaaattttaaaaacctctttgttgagatatttttatcctcttcccaaaaatgcttcaaaagtgtaactcaatcaagcagtgactttgggtggaagatagtgttgaaactatcaaaactccacagaaacacatctgctgacaaaccctaaaaatatattttacttggctttgaatacagcttgttgattctcaagcattgaccaaatcaaggatatgaatatttttacagagtccacagctaaaatactatctcaccttcttggatagggaaagggatttgtaacaaaattgaaagaaacatgtctatgatctacccaaaaagagaacagaaaaaatgagccatgctagtcaataatggaatggaaagagctggttgagggtgaattaaaaggtttgctgcaatcctgcccaccacaagaactgaaaaaccccacatttattgcaaatgcattaatcaccaacagaaaaagactgctaacttgtacccaatatctcgtccaaatcgtcgatttatcaccaatttgttaggctcatgtaactttcatattgctaaactcattttttacgtttgctataaaaatagattggatacgacagtttggacatggagagaaaaagcaaaaaataataattcttttttttttaaataaatattatatttgaattaaaaattaatttgtacaaaacaagaatggtgtgggaaggcccaccattagtgtagggcagagaccatgaaattcattatttgagctgtttgatttgatataattatttgcattttaatacattttttaatttttagtgaaaataaaaatagaaaaagatccccaccgtaatgcgatgggcggatatcgcactggaaggaaacccatcacgtgcccctcatggtcaacgcatagaccatcaccacctcctctggcgacgcacatgacttatcaaccatttgaatctcgtaggcttcgtcaaaccaacttcctctcgtaaagttgccgcgataatttgatatttcaacgtaagtttcgaggttaacctggccaaattatcggaatggcgttcaccttccatttcgtttcccgggccgaggcgaggaactgaaaatcttcggaaactcgtgggaatccaaagacgagggagggcggaaccgtaattaggagtgaaagcaacaagtcaatgctaaccttaatcttaaccccattggatgtatccatttggagccttcgacgccattgataaagtcaaaaaggggtgaaattacccaaatgccatttttttttctttctttttttttttgaataataatagaacatctacactttaaattgaaatacgaaaaaacaaatatgataaaatccaagtgtgtttggtcatgaaattgtcttttttttttttttaatttttaaattaaaaaataaaaactaatttttaaattaaaaaataaaaactaatttttaaaaacaagtttcatcaaatgaattcatatactctttttattcttaaaaataggtaaaaatcacttccatttattatctaaaaatcattttatatttaaaaattattttcagaataagattaatgttagaaaattttaaaaataattttttatttttaaaaacaaaaaattatttttatataaccaaacagaattaataagctcttgagaagtattaaaatcctcaacctagcgtacattgtgataaaggggataataatggcaaggaaagtgaggttagtggagataaggtgaatatccttgtcagtgataataaatgagagagtaaattatgaatgaattggaatcgagcaacttcaacatcagctttttgcaagatgcgcatctcaatttttcaaccggcagtcatgatgctttatctaatcataagtgagaaatattttaaatataaaaaattatggatgaaatagattttggctgacgtttgatgtatggaaattttcagttttctttgttgttgtccatgcattttaatttttttttttttttcattcgtaagatttctttgtatttctgaaatacccagaagctagtttttcatttttcttcaccacaattagtgctagaaaggatggaagaacaggtaggtgggtgaagtcaaaagggagtaagcttttttctgaaaagcataggaatttggtggggattcagacagcagtaaatgaggattgagcaagggaggggagtaaaaataagggagagggaggaggagcgggggagggggttaatttgggaaaaaagaagagagagggaggggggcagaggagggagtaataaatggtggggagtggggactaagagtggagcattcaatacggacatgtctggattcaccagcgcagtaaatgagacattgatggaattgcaaggctgaaggctttgccttctattaattttattattattcagctgccttccgcccacaggggtagtgttcctctgcagttgtagatgtaggtgaatgcatataggagttggtgaggggaagagagaaataagatgatgggcggttggaactgttttctctgctctgttttcagggattttccttcttctaatttggaggccttgtttttgttttctctttctcttcttcttctactacattctttgtcatttttctagggtttcggttttttctttttcttgtgttgactgggtctggttgggacgctttcttgttttctttttatttaaaaaaaaaaaaaactgtactgggtataatctagggtttcaataattaatgtggttggatgttggggttttttgggagatactttcgtcttttattttcgagtgttggatttataaaccgaatttctggttttgttctgatgtgattgaatctgagtggtgcgtctttggtggggttgaggcctggatgttgtttaatttctgtgttgcaagtggggtgttgttgaattcgaattgaaactctcaattatgggcccttcaaggatgctaaagctagggtttctctgatcgcaataaaggttatacactaat

SEQ ID NO: 10408 - DNA, 3608 bp, Vitis vinifera
  Intron number 2 from transcript GSVIVT01019602001 (locus G SVIVG01019602001) derived from phytozome v7.0 (chr-ID chr2 ; pos 1865750 to 1869357 reverse strand)
ggcaggtaatatcttgttaaactactttgcttgtaactttcctgagcttccagttaatggctgatgtgtatggatgctttgtagtagaaatctagagtagtatttgcttttgcattatggtatagggttgatctcctctaaatttagaaacatgtgtatccttattgttgctcatcatgattttattttaatatgaaagcatagaaactcaggcacaccagagggtcataaccaaagtactcagacagctgtaattaatgtggctgcatcattatatggtttgtgttatagtacctgtcacacctccaaaagtggcaaaatcactaagttgtctctacatttttggagatggcttacaatggttatggactttctgattttttattaagccaaaatagctattgaattctacaacttgaaaatggaggaagagataactatactcacattgaaccttaaagtatacataaattcttttttgtatctattttgggattgggttagattgtacattgagggtggttctttatcgttcttagactttgtggattgggtaggctctcggtagagcacagtagcaggtttttgtgtcttcacaccttttttgtcctttgtttcttcgtatacggcatgtatactttctttcttttaatacaattcttatttacctaataaaaaaataaaaaaagtatacatacacgtgtacacactattttgacctttggtacttgcttctgaacaagttatggtgacatatgagatagtttctcaatctttatagtagctagttccagacattgcttaatataacaaaatcttcagttctggagggacactgttttctttacaattattttgaccatgtaacattctgataactgtgacttccactcagtcaatttggctgtcagtttgatatgttgaaatttcatcagtagctgccacctgaacaatttttctaaacctgccttatgtaaaaaatttctgagtagggatcttttctccatggaagcatttgcttctctccatttacatgagtgttgccctttttcctgtcgcatcttatcctgtttcttctcctgacctttagttgttcatctcatcctttagcatcctgtcaatttagactatccttccctttgtgattcactttcaacatagaagtgatgctttggtgcaaatagtgatgtgtcatatttttctttcaaatttcaaaagacattttaatgccttgaaaatagcagaaacaactgctaagagttctccctgaaggaaacttttccttagaattagttactttaaatggttgctgatgctccaaagaaggaaagaaagaccacatttgtcttgtctccattctgaatttcaaccttactggctctgataaaaagagataaattttctcctttgatggccctaatgttaattttaatattgctgcccaacccaactcagcccaagctcagggggttcccagttaggccaacagaggcacagaactttagagaggattgagcttggtttgacctgtagcaggcctgacccacccatgttataaccttaacaaaaagaagcatatagtcatgtcataaccataccagctccccagcaagttcatatattcatcaagggttgccagcatagtgtcaaagattgtagttatgagatagaaaaatgtaaagggaaataaatgtaggaaactgaatcagaaatttataacctaccagcatttgtttacctgtaataaacgtaaagcacaatactgactcacggcagggccttcaagtttagcaatcacctgtggcatcacacatggaaccaaaagaataaatacatcacaattcagcataggttggtcgtttgtatattaaaagtgccaatcaaaaaaggggttccataacagaaagtaaaaagcaagaagaaacgaccaacagccagaaccccattttaatacttagagcagaaccacttggtgaagtatattaaggatagggaaccagcttgagcatcatcttgaagagactcatgagaccataagtgtagattagacataaaggaatccttaagagattagtttgtgtgttgcagcccttcaaaggttctttgattacattcctttcaatttgttcaaaataggcgaagagaagttattgttcaagcctttcctctcttcttgccctcataactctcatttcaacccattaaccaatctttaaccgaataagggagaatataggaaatgccaaataagagaatagaaatgtacacaaccccctaactttcccacaatggatgaggagatggtctactaattcttcttttttaaacatacaacaataacttgccaaaaactatcctcttcttttaagttggttcatggttaggatcctttccatgccacatccaatttgaagaaacccactttggtaggaacccaagagtctcacacttatctttgaggggaaagagacctctccctccaattccaaggtagagtaggaagaattcattgagcattccctgctcttactagccttctacaccattctatcctcctcctctcttctctgcctagcacgtttagcttccaagtggcttctcaacattatccatctcccaatcttgaaaatgtcttaagaagcatgggtttcacaagaccagccccctccaaaatcatccaaccaagcctccttgcttcatttcttttcttttatttattttttattttttaatcatttcatctttcaaattcatgaacagatttgagtggacaaatcggagcctgttagatggatgaattctagaacataatggaaactttatgatggcctttgaaattttaagttgtttccctgtgaagctttcctcattaaatccacatatcaatctgcacatgcatttacaatgtctattgatcttcaaagtaattcatttcttactgaaattcataatttaagtgcggttttaattcttgtcaacaaattataagatttaccaaaagggaaaaaaaaaaatgaagaagtagaaatgaaaagtaaaaaaaatgaaaacacatcaatcagtacttccataatctgccccagctctgggagaaaaggttgcaaacaagatgatcagacaatggtgcttatttatagtagataataatgaccctagatagaacagcaaggcataaaaaggatcatgtagccaacctcaagtacgaggcttcaaggtgtttttgctgccttatttgcttattgttctatgggaacgctccatgggctccatcacatgccaaaacaacctctgcttgctcacaacctttctccattgttctttatccctcaaatagagtttaatagtttaatgggaatccaaattatctctacttgtctttatttcaagaattatattctgtatttactaacaaacactgggttgtgaaatttttttttttgctctatcaatatttactgtcaggcttacttgaggctccactattgttaaaaccatgtgtttaatgtgttagtacttctgttactgtttaaagcaaggatgcaaatagtcatttgatgttgaatctgtgattttaaccatatcatcatggaatttatacagagtcgaag

SEQ ID NO: 10409 - DNA, 2954 bp, Vitis vinifera
  Intron number 1 from transcript GSVIVT01028394001 (locus G SVIVG01028394001) derived from phytozome v7.0 (chr-ID chr7 ; pos 7058961 to 7061914 reverse strand)
ggagaacggtgagggattcttcattctgtgtcgtttcattgcctagttgcatttgtttagattttaatttttctgggcttttgatgatttcgtttgttacgagggttttgatcattattgtgtttctttattttttcactggtttggaatttcgggtaattggttcagtggttctttacatttgttagaaaattattttcgattgttagattattttctttggtgttttggaaatttgggtttgtttctgaattttttgggctctaggtttttgttattttgtgcattcttcagtagaagcacgccattgatgggatggaatttaaattttgttaaatgggcttgccttatttttctttatttttcagtgggttggaatttaagatgcctgtttctgtagctcttaactcttattgtgaaattgtttcttttattggtaatgaatattttcttcactttttctgggattttatatcagtctttgactgttttaggttctgggattttgttcttttgtgcaattctttaatgggcttgtccaattgttatccatttttttcattgttaataattattggttttgatatccagattttttaaaataaaaattgatttttttccctttgtttttggttgtattgattcttttgtctgtatttctggactgtaatgtttgtagcttggtgttttgagttctgggtttctggtatctgtgttaatctttgattgtttttgcctaacttcatattttttcatccgatatggcattatacatgaatattcatatatctttgtgattttccctctggttggttccgagaaaactgaggaagagggaaaaaaaactacaatttggttcacatggtatttttcttgattttgctaaagaacatgaatacttggctcatctaagagaggtgattgtatcagcttgggttaagcagtggttttattctctcaggtcccaaacagtgatagtctgcacccttttttctgtcttgttgaaatgcaaatgtttgccctttctgcatctttaatggttttctcatttgttatccaattggatatttggatatctttgctgtctggaacagtggttgatgtgcaaatgaaagaaaagaaagagaataaaaaattttaaaccttgtattattatttatttatttttgcttttgacgagtgttgatgctttttttttttgggtttaaattgatctataatgtttgtgacctgctgttttgatatcttggtgtcttattttttgtgttgattggttttgcatatttttttaatcttttttttattgatatgaaattgcacatagtatttggatatttactattttccctctgtttggttgctgagaaactgagggagagaaggacaagtacaaaatgtggtcctgatggtatgttgttttggtttccttaaaagaaaatggaatacttggctcatctaacagagatatttgtatcagactcagttcactggaaatttttgtttccttgattccctaataatggatattgtacacccctttgggctattgaagttcgcctattctgcatatttttatggctgtgattgtttttatccatttttacatgtttatttgaattctacacgttttgggttttcttaccttttaagttttaatgtttgtttgattgccaacaaagcacacaggaaggggaagagaaactaaaattttgaatgtaatgtaagatttttccacatctgtgatctcaaacacccaacacttcttctggaactaagatcatattcgtataatacatagatattgagagattttattttattttactcagttttcttagcaaccagctgattgtcattaatatatgtttggtgaaatctctttggataaatagttctcttgcatgttctaattcttagggattggaaacattttcactgaattgtgagattacctttgttggccaatgggtttggttgtgtaattttttctgtttgaaaggacaaagaattctgtgattgttgatttgaagagtaattcttgtgttaatttatggattcatcaaattgggtattttctatgcccttttttcggcattcattatttctataagatagaattttttttttcaaattgaatatggtatcattttaagtgatgttgattctcgttagcggcattattatggctttctattgtagttctttggtagttttaaattagcacgtctctcttatgcttgtgcatttcgattgtccatgcttgggatgctgtggaaaatttgattacataaaatttgaaacttttctgcattgattctcttcttcatgaatgtatccatgcttactgttagaaatggtttagataatggaaaaatctgcccaccttggtagaatttcggctcaaatgaacaaaattgttttctattactattatacgtataaaaggttttcattacatataaaggggttcattggatcccaaagtttctcaaaattgtactgacatacaactgaataggtcaacaagggtcctctttgaaagattgtccaaatatgattctagacacacaaaaacaaacaggccaacatggttcctgcttgaaaggtggtccaaatatgttgaatccagctgttcccttttagtggtttttcctattttgctccattttcagctttcttgttggatctttaataagttttgggcgttgtttttattctttgtttgtacttttttcaccgcttctaggcattactaatacaatctcttagttacctataaaaaaatctttaataagttgaggcgtttgtgtgtgtcagagaacctatgtatgcatgcatgtattcatgtttctcctgcagtttgaaattacactttatctactaacctattgaatgaaaaattccactttggctactcaggtggaggctaaaagggctttatcaagagaagaaca

SEQ ID NO: 10410 - DNA, 6255 bp, Vitis vinifera
  Intron number 1 from transcript GSVIVT01017313001 (locus G SVIVG01017313001) derived from phytozome v7.0 (chr-ID chr9 ; pos 6637725 to 6643979 reverse strand)
ttcgccaactcagaaggcaacatattagtcgaacggtacgccggatcatctttgccgttgatttttcttgatcatcatcgtcttttttccattcaacaatactcatcttcttcatgtttcctatacataccagatctatctcattaccaatgttatgtttgattgttatttttattttcaacatttagtttggtaatattgatttggaatactcttttctgattatggttgattggttttgttgggagatttgtgattgtttggtattggattggatcttggtttgccttttgggtgttctatgataattcaacgaggggtcttgcactggagctgagatgggttgattatgattttggtggaattcaattttccattttatgtcgaaacattttttttttctttcttatttttcctccttttgcttgatatttaggtaataaaaaaaaaaaaaagatacagaatccaccccaaggcctaggctgaatccaaagaatccataaagcccgagaaagattacccacaaccttgaagaaggcaatattttcaaattgttcttgaagttttataaattttaagtgtatccactaacataatatgctcaattctgcaaaaatgattcttaattcttaaaatttactcttattttttacctattcataaaattgcccatgacctccaactctcaaccattgggagctctaaaaaaattgagattccattgcatctcgtccttgaacacaggatcaaattgcctagcatcacaacaacagtcatgcccatagggcacactctcatttttctgaagtcttaacaataaatgcatgataacctcagacaccaactctattacactttttgacctaactaccttgataccctgctcatatagtcatcactgaatttctacacttaatatcttctttcaaagtccatccctttttatgctaactgcaacaactactttactaataaagttcctttcatgatcaccaatgacctccaaactccttgcctcagttgaaagtagaaatagtgtcccaagtaaccccagtcaagttcttcaccctaatctgtctgaaggaaagttcattaaaactttccaactgttaatcaaggacttggaaataaggtaagaggatatcctgtttgacccctatttgtttttgggtaaattcatgagtagtttagtggaggaaggtcttatgcaaggattctagatctggttttttgatgaacggggagtaacaatttcacatttgttgcttgccgatgatatggtcttgttttgtggagcagatagaacgcaattgttgtatgtcaggagttccagttggcttttataagcagtttttgggcaaaaaataaaatttggaaacagcattatgattcctcagggctggtggaggatattcatgttctggtttcacctgttccctgtggtgtggaccagttggcatcatcctgtttggaacttcctctagggtcatttggaggtggtatcagtgctggagtttgtagtgaaatgatatcaaaaaatttgcaatgttgaagaagcaacattttttgagggatagattgacactaatttttcatataaggcactctgttgagcttattggtgtattttatatgtttatttaagattttcggcctgggtaagaaataaattaaaaaatattcaacaagaggtttttttgtggtgggatggaaacaagactcacttggtcagatggaaagtagtttctttacttgaggaggtcccttggtattagatattgagtgcttcaataagttttttggctaacttcctatggtggtttgtgagtgagggagagaatttatggagaagaataatggtgggcaagtttaacgaaaaagagaaggtttattgtctacagacggtaagaacccttgtgtgaaggagctctagaagtactttaggagtggttggaccgagttagctgaatttactattttagaattggaaatgaacaaagagtaaagttttggcacaaatgtttgatggagcaatgttctcttcaaaagttgtttcaggatgaagataatgggtacaattggaagattattggagcattgaggagggtgttggtcaatattgtgaaatcttaggtttcttagaaattatcatgattgagaattgagaatgttggattctttcttcggttgtcatattgttctggcaactttggggagtagagaggatactttttggtggcaggtagcaaaaactgtctgcttatttttagcctttaacttcttacggaaatgcttcttttctggtttcacatttgttggcacgttgtgccctctgcagctcagctgaactggcaaagtctcccactcaacaatgagagctcccaagtgtgagttcgggcttacccaaggacatggtccttggtggaggattgtgtattcatggttttctttggtcctttgaagtggggccagtgggtctgtgttataaaaacaatgtgtcaggatcttgtcttccttctaaagtggcatttttggacttaactgataggttgtgagggtattgaatttgtttgtattccatccatttccttttttttctgtcatgatatatttggatttttttttcttgcttttcttttggttgttgctggtatatatcatgtgtacataagctgcaccttttcttttcttgtatttcttaagtaaatttttattgtgttgctgaagtgcatttgtctttcttttcttttcatttttcctcttcccttttttctactgctttttttttttcatcttcctttccttttcctgttatgaatcctgtgtgcaatatgctcacccctcagtgcatctcaattcattttgtttgcttctcaaataaggctagaaatcaaggtcagccatacccctaaaaacctgctagagttctttcaaatgtgtcaatagctgagtaccaattcatttcaaacataaagaccttctataaaagaaggagaagacaagggaaacatgtagatggcccaaaagatgtaaaatccttagcattcctgacctcactcaatagccgatttcaatttgttcaactgggtatatttggcaagggattacatagaatatgttgtttgttgatgggatattataggaattgtaattctttgaaatttatgattacaagtgggagattaatgatgattgattgcaggacattgagcgttttctttatcttgaaattattcatccatagtagggactagagtaagcaccctcattgaattggagtggtatagacaaactggagtagttgttggtattttcattgttgaatgattagtgcaggcctatcagatgaaggaaggatttcatcaggtgacatgaggctaatcatgctttatgatgcataattccttgttatcattactaaactcagtcaatgagggcaagttgggcactgaatgagaagtttgaggtggatgagtaatgagactgcaaagtttaatcatgatattattctgtcatttcatttgtaagaagtttgaggtaacccctaataatggaagtatgagagagttgaatataggaccgtaaaaatttccacaactagagaagcttttctttgttgtataatgagatgggtgatcaaaaagatcaaagaaaggaaagaaaggaaaagatagatccttggcaatcacaccaagattcctaaacaatcaatcatacctaggatttcctaagcaatcacacttaaatgaaaacaaaagaaaaaatataggtctatagcaaccacacaaaggcaatcacaactttaggaaacttgattgctactaaattcttgatgaattttattcattgaatttgaaagactatatagatttacatagacttgggaatattacttgttttcctaatcaaattataaactagaataaatagaaatttaactaaaagataaactattaacactaattctaataaaataaaaacaaactccaactaaaactatgagataatacatttatctaaaagcttttttactgaatatctttccttatcattctcctgagcttggaaaaactctactttggcaatgaaagcaaatgatacctaagttcatggaaggaaacattaacctcatcaagttataatgctgtgagtaggctttgataccaaattgatgcagcactgtaaaactttccggtactatagcaattatttctttgttttatggtgggatgagagatcaaagaggacaaaacaaagggaaagaaaagaaaaaaaaggattattggcaatcacacctttaagacgctatataattactaaattctcagtaaattatattcattaacaaatgtaagactacataggttttttatagactcatgaaactccttttcctaataagactaaggggtggttgtttttttttacttaagtcttaaaacaacttgctctaagacttaagtcatttttagaggagtttgtttttttaactttttactttttttaagacaattttgtcttgatgaaaaaggtaaaatttttaatttttatcttaatggaaaagtctcttgttctcatttctcttttcaacctttaactttgttaatactcaaatccaatttctcaaaataaataaaatttatttttaaaaattttgataacgcttgtcttaaaaataaattcaactaactcaatttatgtaattagatgagaaatgaatttactacaaattagtaaagttattcagaaaaaactgaatatgattgaaataagttttgtttttatccaaatttcttttgtttctcaagaaaatttagacctaaaattttctcttgatcattactcaatagcaaaactaataaaataaaaatcacttaatttggattaaaaaaaaaaaagaatctgatttaaaataaattcacaaaattccaaaactaaaatcaaaattcactctcacgcaccactctttttgcctcataattcatctacttctcaatgaaattaaattacatgaatttttgtaaattccttatttaaaaacaaatataaacaatgttgaagtaataacttttggattagaaatgaaattactactaaatttaaattttcattttcttatcatgtgaaaaaacaaaacaaactatcataaattccactgaaattcatttaattagaactccaaaatatacttcacccttatttaaatatccactagaatcaacaattccaattaatttggaaaaataaaaagttaggatttgatatttttttttcaaattaaaaatccaaaaatttatgaattaatcttaataatggaacacatatttcaatcacaaatccataaatttgaagatacaccacatcaaaacgaatgataacttagaaaatttgtaatattttttttagcaaccaagcataattaaaaatcgtaattattatgcaattactaatttgctaactaatcacatactaaatcattataaaatttgattatagtgataaactaatgatattttgggatatttagaaatttgttaaattataattttatttttcaaattatcagttttcaaattaaaataagaagaaatatagtaattaattttataaatgtgtttaacatgtacaaataaatagattgaacacttaacaatattaagagtctaaggcattaacaaaaacaaacaactttatactttacaatattcaaacactattaaaaacaaacagttgaaacacttaatgatatttagctctattcagatcagatttcatataaaaaaacaaatactaccaagactctattctactaaaatataaaacatactccaactaaaactatgaaatactaaaattactaaagctattttgttgaatattgtatcccatcaaagttgatttccatggtgtgattttgtttgaggtagactacggttgttgaaactgcattaggaaggagtcatgtggtttttgtttgttcaatcgaccttaaatggtaaggaggcggctttgttaagttggattgaattatttagatggttcaaatgttatatgttgttataaaagaaggaaatgtttttggatttaccaaacataaattttagtttggtttcagatatgatgaatgaatgaatagctttgcttcagaaatgactgctgaatttgatcatgtatggtaagattgttgaattactgatttaaggtttatgctgtattgcagatttagtggagtcccagcagaagaacggctgcatt

SEQ ID NO: 10411 - DNA, 2208 bp, Vitis vinifera
  Intron number 6 from transcript GSVIVT01008451001 (locus G SVIVG01008451001) derived from phytozome v7.0 (chr-ID chr1 7; pos 1890321 to 1892528 reverse strand)
ctagaattggaaggaatagtggcagtgttctggcggtgagaatcattccccgattcttttgatcttatattagtgtaattagatatgttctaatgattatactatgtgtgtgcaagtgttcaaaggtactctttcctcatacttatagtggtatgtgtatttttcactgttcaaagaactagtttcactcttgttttcaagttgttattggagacaagcttctgaaaaatagaaaataattatatggtaaaaaatcagggctataagtccaatggtgtttctaggccttagaaaatttggaaaaataacattgggtagtatatgccctatagaatctgttccatgtcttcttcactatacacatctcagatcatgcccatttaatacttttgctgaatttattttttaaaaggcaaaaatttggaaattaggaaaaaattcatagaattggattttttttagggaaatgcaagtccatggatgggattttcttctaaatagaccatggtatttcgtgttaaaaatcatgtgaaaccatttaaacattgttcagaaacaatatttcaaaattaaaaaattcaagaaattaccagcgattgtacttccatacctaatgatctatgaagaagttgctgccttaaaatttttgaaaccattagtttaatttagtttaattccaggctcagagctattgtatctagatggcacaacctcatattgcaggtacgtataagctgttgttggtcaatattggttttggaagaacctttagaattttaaaggatccatatactgtttggttgtattgaatcatcccttaccaagacctatatgtctcagtgtctcagtgtctcagtgtctcagtgggtgcatatcagttttggatgaaactctgaggcatggtagttttaaaagtcaagaagtcactcttttgtgttgtttatttgtataagttttgattttttattctgtctatattcagtaagtaatttatattactgtttatttatttattataggaaaaattatttatttgatcctatgctatcccttggaagaatgggaaggcctgtactgggaagaggttgacaagaactagattcaagttaacagtcaccttggctggttaattcaatgaaaccattctgtctctccatcatagcccataacttgcccaggttgcttgcagcttgtccattcttgtggtagcctattgtatgtcattattaaagatgtccatcttacctacaggaagcttaaaaacttgggattttcgagtatataaaaaataatacaggataatcaatgaaatccttatttattgtctgtgttctgaaggaatgcatattgatggtggtttgaggtacatattatcattttatttggtacatgtaggttgttgttggtgtattattggtaccatctagcaaaagaaaatgcttacctggggctgaggcacaggggaaatttcctgatccagatggacaaccttgaggcccactgtacccattactcccccaccttgaagttgtgaggttctgtctgtgttacagcttgagaattgttttatgcctaaaatatgggcatcagaaactaaactatagctttctcaacatcctgctataatcctaggtagcatgccctggaaacaagatttgaatgatccttctattgtactcttagctcttgcaatataactgataatccaattgattcaatgcttttgctttagatatcaatatcactgtactaaataaaatctgattgggaggaaccttggattgaaatgttttgtcatatacattttcttttcaagagtgattattttggttgcctatcagcccttgaggtctggctcaagtggtaaggggttggagtgggggatttcaggtttgagtcctagtgggacaaaaaaaagtgtttttaataaaaactacttacctataggtttcgcatggtattaaattatactctgcattctgctctccagcatgtgtacttcacctttcctagtgctgtgttattaagatttgtgaactaatgtgcagttgcaggttcagacccaagcatggaaaaaatatgaagtgtttagaaatattgtattttggcttgtttcatcatgtgtcatttgtagttttaattctctattatgtaattttctgattagccattcaatgatttgatttacatttattattgtcttaggtt

SEQ ID NO: 10412 - DNA, 10401 bp, Vitis vinifera
  Intron number 1 from transcript GSVIVT01003255001 (locus G SVIVG01003255001) derived from phytozome v7.0 (chr-ID chrU n; pos 8376893 to 8387293)
ggtatgatcccactcaatctttctggtttcttcttcttcatgttcttctcctccttcatcttcttttttagatatagatttgagcgttgcttctaaattagcttcagttttatagttgataattgtgtcctaggtataaaagattggcacttttaactagtagtcttgatatttatgagtaatagggtatcacatagtttttgtgggctataggaacttaatgggtttgtattcaactaggataatccagagaaacccccactttaaagcactctatatgatgttttcttcaattagtaggtttagctgctacactgtgacaatatgttgaatacattagcttttgggtgatattatgccttttgtgttattgtgttggacttagaagcatgaaaatcaggtggaattgggtcaagtttctaaattctggaatgacaaaatggagaaggaaaactgacttggggcctgcttctcttgtaaaagtgcgtattaaccccctgcattgcttttatgttgaaaacaatgaatgatatagatatcttaataaaaaactttgcggtgtttggaacaagttaaggttgaaggtattaacgggggaatttcagaaggagcagaataatgaaacaagattcttgcaaaccccaaattattggattaaggctttgttaagttgtctgaaatgaagaaaaatgaaaagaaaagatgactccaagtttggtgaattgtgaacaaatttgtgaaattcaaaataatcaaaataataaatgaatgtcctaaaaactagttctacatgtattcatccatctgaggcagaagcaagcactgattgaggatgagattatagaagttatttatgatgttttgcttacatgcaagaagaccaatggatgtatcaatacgtaagtgatttgattcaggttaaaggtgatggaaatgagaggaaatctgtaaagaaaaagaaagaaaataaattactctctaccagaaaatgtggccccaattagagttgaagagcaatgaagcatctgttggccttagaagttgggagacactcagaaacaccttattgaagactttgtgtgatctttgaggatgggtttggtaaagttggtctatcagcttcttacctaacaaatgttttgcttagcaatattgattgagagaaaaactaatagaatgaccactgaagaagtctaaaatgatgtcatgttgcgttacacacaaaatatctttcaaaatcttttgttgtaaatgatgagaatgcatattaatcaaatttattaggtgggttggttgttgaatataaatggctgttcccattaattaatctcagtctatgtctatatataaaaaaaaatctcagcctataagcaaagtcgatatttcctactaggttgcatttgtttggcatttttgtgacttttgtttggattctgagctatgctgatgataagaaattttattttatgtgcgaatatagttggtgtggcatgccattgatcatcttttgctggtgttagttgattttctcagaaatcctatatgtggaatgacattttcttcctggttgttaaaattctatgttattgattctgtaagatggtgtgctgaaatcaaactgtatggcaggtcatgagatggtgccttaaaaactccaaaaggaagccacataaatccaataatctcttcctaagattatttgtttgtcttactctcatctgtaaaactagtttgaatatgtgatattgataaaaaatgaaagtgtacttccaagaccaatttgcttgaggaaaaagataagttgaaggaacagctactatgattgtaggcttatttggttattagattgggagtggtggctttacgaattttcaggtctaggagcttttagtttggaagaatttgcaaggagtgaaatggaatggagtatatgaaggagtttcttttattttccattttttctatttttcagctggttcagtaattaggcctgtgtcagaaatgccactacctgataggaagtcgctgttggtaatgatcagttcctcgagaaaccttttagatttaatcttctgactcatctgttcttcaattggtttattcactttccagcatcaaatatacaggttctaaatcaagatcacgacccccatctagtctgattgcatttagtttgtctaagttgattttgcaacatgtcaaaaaacaaagcaattagatttttttttgatgctgtgcttggtggtgttgtcttcatgtcttctcatcttctagaaagatgggatttctgaggtgaagtatttggttgttcaaaatctgaactagattgaattcccttattctctttgacgaagagcggatagagtgtagttatggtcaaattgaagaataaacttctataaccttaatatctataggtgtaattagtgtgcaaattctgaatataatttcatatcttctcaaaattgtacaataggtcacttagatacaagggaaccatagagggaagggcgatttacagctataacattcctaaattacaatcagaaatcaaagagaaaatctgtacaaaaaaataacaaaaaataataaaaaggttaattgggaacctatctaaatatagttaatgaattagcctagaatcaaggaagtagatccggtaagaaaataaaaatttgaaagttgattttactcacttcctatcaagctagttcaaagatatctatcatacccaacttgcttactagagattggaacactcgttttgacaagccttttgtgagaacatctgctgactgctcttgtgttctcataaatagagtacaaattaaaccactctaattttttcttgatgaggtgtttatcaatttcaatatgtttggttgtatcatgttgaattgggctatgaacaatattaataattgtattgttgtcatcatataacatcataagatttgtttttttccatcctcaattctattagaagaattctcggccataacaactcacaaattccttgtgccattgctctaaactcaactgaagcacttgacctaggtacaatggcttactttttgtttctccaagtcactagattacctccaattagagtgcaataccctgaagtaggcctcttgtcatcaatggatctagcctaatccacatctgtgttagcctctactcggtagttgatcattcttgcaaaatagaagactttgcaaacaagatcttaaacttgctttcatatgagcatcatttggtgagtgcataaattggctaactacgttaacagcaaaaactatgttaggcctagtatgatatatataaattagctttccatcatttgggttaatggcagaattataataggaaatcaaggagaaaatctgtaaaaagaataataaagaataacagcaaaaggcaaactaggaacctctctaaatacagtcaatcaatcagcctaggatcaagaaagtaagtccgggaggaataaaaatttgaaggttgactttccacaaatagatcaggatagatggctgaaatttgtagtcatttgtcccaaactactccctctctctctctctctctctctctctccacaaatagatcaggatagatggctgaaatttgtagtcatttgtcccaaactactccctccctctatatatatatatatatatataaagaaatggtttcttcctataaggtgactacttgttatcagatggtcaaatgggaatgttcagatatagagcatggatgtatatggggcttgaaaagtttgtggacgtatgataacaaggggcttgttctgtttctttatctatggaagtttgtttcataattacaaatgctttggttcaaataagaaatatctagaatttggtatctgtttatgtatttagatatttccaatatttttcacattataatagctatgggcctttaggttcagttcatatcatgtggattttcatttttcccctttttcataaaataagttctgaatttctatctgtagagttgaattaaatcacatggatttacaatgggagtcctaaattgttttttcaagttttattatattttttttttcaggaaaaagtgaactttgaaacctgtaaagcatttttatgcctataaaatatgattaaaataaatatatggtttataaattggttataatttttgaaatattaaattctttaaacttaagatttaacaattcaacaaaagattcttattcttatagggttagaaagaattatgctttacttccaaatttgaattttttttttaatcagaaacaaaagacgtattaacttgatgcatccatataatgacaataatatccaggataaatttgaacttatgttattaatttttaagttgaaaagcctctttgtgcatccatttttggcctcaattttgctgagaagagattataagttcaaaatatttcttatttaactctctaaagcacttttggacctaggaaattctttttaattgcctaccaggggatgggttgggggaagagatggatgttggtcaaatggattcaaagaagagttttttttgatgtttcaacaatcttttatatgcatttgcattattatttttacatttttttttctgtatcatgggtatttccaatacaatgtgctgttttcatcattatttaaaattacatttgcatttaaatgagttttgcttgtattctttggaatatttgtcaacttgctacctgctcaatgatcagactcaccacttgatgtaatctgtggattgccatagtgaactaaatttcagtttacaagcatcgcattaaaggatgatcctcaatcaatgtagctttcaatgaatgtattctgggcacaaatgcattacatcttgtcattcctcttgccaaaagtgttgaatttgagaaataagagaaaaatgagattgtaaaatggagattcttaaatgctcctctattattttacttattaataaataataagtcattcttcttcttgtgctagaagtgttgaattaaaaattttaattttttacttatttgaatttgtaggatttagtaagttacctttttctgaatcttcggtttattggggttttatactttttactttttagtgtgtaaaacggcttgatatcggtgttaccatttttttagcaagtgttaacttactgttttaaaagtatgttttctctttgttttgttgcctatgttgtgtggtttacttttcattggttgatgctaattatatggtattggatctatcgattggttggatatatagcataagggtgtatatgttataccaccattgaaacatgctagccagacttaaaactaaacagttataagagaaatgtggtgaacttgaatctttggtctgatgttgaactaatagtcatccaaacttcaaatgatctcttcaacttgggttaggtttgggcatagggtgtgggtatgtatctaggtgtttgatctttcacatcccaaaattttaggaaatggggattaggctgaaagatcttaataatgggtatggtacaaaaattacattattattttgattaattttattttacacatttcttgtcttttgtttttaaaaatagaaacttcaatataaaatgtagaaactcttattcaaaaggtatagacttatcttatgttcttaaaaattactttaaaaaaattttaaaatttgaggtagtaaaattttttttaatcagtttttaaaaaccattccattttcaatataattgtctgactgagatttttttgcattttatataaaagttactactattttccatttttaaaaacagaaaatagaaagtgtatccaaagggacactttatctttggattttatgtcattttattttacgttgtgaaaaaatttattctaaaattgttggatagtttttaatttttaaaaaatttttattttaaaaactgatatgaattttgaattcgactaaacttactgtataaatatatttattaaattttattaaattagaattaataaaaaaatgatatggatttctatttcaaatttgacttaatctgctaatattctctcttcatccctaaagtcaaatcatcatatctgatgcctgctcttgtgtcttattgtgtagacatgggtattttggctgaatttgaagagtccatgtattgcgagagaacttgaatctatgaccaaaaagtggtcaaatgaagaagtgatcataacctatgaccaattgcttgttcaatattcgttgacatgaacttacatcataccttttaaaatttaacctgtaacgacattccaaatggctaataactttagtaaatcatgctgcgaaaggatactggctattggcccattttcccttcgaatacaaaacatacagaaaggggataaaccctggtacaacaggagcaaacaaagctcattccaaagaggagagggaagacaagacaaataataaataattctacactttgtggtggtatcaaagtagtttccctgtaatggttttagctcctgaatattgaaggagaatcttcttcttagaataagattttttgaaatttcaaactttagaggctgtgttttaatcatcatttgatttgtttacctggtttgaggtaaatgacgaaaaagattggtcatgctcagaacaaggcatggagccagagaaagagttgcaatttttgaagcattgcagtttcattggttgtttaagtgtagcttcttaaaatgggaagtgccttcaggagatttattttctgggaaggactttaccaatgggggccttctggaaaaaaaaggagtgattacggatgaggtaaagttacagggcaagggcagaagaaatgtattcctgctggttcaaagtttgtgagggaattacagaagttgggatgctctgttatttataagattgactcagctattgggaggagaggagggaaaaataattgggaattagcaagagtgggtcaatggagctatgtatcctttcttggaatgttagagggatcagtgagggggataagcatggagtcattaattccttgattcgcttacacttggttgaccttgtttgtcttgaagaaacaaaggttcagcggatgtcagcctctttggtgaggagcttgggtgtggatagatgtctagaatgggggggaagtggaagctagtggccaatcaagggaaattttggtcttttgggataattgggtgctggaggttattgagatggagaaaggggcattttcagcctcctattggttcagaaaatttgaggataattttatttgaatgtttatagggtttatagtcttgttttgattgaagagagggaaagcttttggaatgaattgagtgatattagaggtctttgggacgatccttggtgtgtgggacgggacttcaatgttctaagattcctaggggagaggaggaattgtcatagagtctcgccttctatgtggcctgttatgagacctttttaagaggttaaataataggttagcttcaaggctagaccctttttttgtctctgaggattgggaaaaccagtttagtggtttgctccaaagcatccttccaaaaccagtctcaggtcatgcaccaatcctatttgatggtggaggaattaggaaaggtaaaacaccaagtttctggccaagtttttggctaaaagaggtgggataagaataccaacttttttttcacaaaatggctaaggctcgaagaacaagaaatttctggccaagttgagggtggatggtaaattgctaattgaggagaacaacattaaagaaagtgtggcaaatgcttttagcatgatccttgctaagttgagggaatggaggctgagcattagtgggttgacctttaactccttgcctaatgttgattaagaagttctaaggagctccttctctgaggaggaggtcctagttgctttgtttagcttatgtggggataaagcccctggactagatggcttcaatatgacattcttgcagttttgttgggattttgtgaaaagagaggttatagagttcttaaaggaattccatgacctagggtcttttcaaaggagtttaaatgccactttttaagttctggtgccaaagaaaggggggactgaagacctcaaggactttatgttaggaagtgtcccaaattcctaattagtatagattcctttttgtaaagaatattatatagaatatttctaggttgatatattattgtaatattagacttccttatagaataaggaaggttgttggaaatatctctataaatattctaggtcatgaggggaaaaagttatgagatggagatgggcctatagagactatacgaggtggatagagatgtgaggaagaatgggaggtacctggtggagcgagagggctcgtagtaaggtatggatacaaggagtggggaaacatgggatgtttcggaaacccaatagttgtatctggttctatcctctgtaatattctctattgtatagtggaattattctctctcatccgtggacgtaggcatggttggccgaaccacgttaaaacctcgtgtaccgtatgtgtgattgttttatctttgtgttcttgaactaacattgttggcatcaaagctttcgctggcactacactttagaccaactagcttggtaggaggtttatacaagctcctagctaaggtccttgcaaacagactaaaaagggtggtgggcaacttagtctcagattttcagcatgtttttgtggggattagacaaattttggatgctattttgatagcaaataaagtaattgattctagacttaaaggcaacatgagaggaatcatttgtaagcttggcaattgaaaaggcttatgaccatgtagattggagttttgttcttgcacttttggaaaacatgggttttggatccaagtggattttggaagtccacaccgaaaggaagggggaaagtccaaaaagaatgaagtgagaaagaggagaggaggatggtgtatcctaattcttgagcaatagtaatgccctactatgctggaatggttgtatacaccagcttagagtaagtcttgttttgtttgatttcacaaatatctaattccaaacacacatgatgtaacttcttactcttactctattctctattcatgcaacttcttattctcacacttttttttaattaaaaaatagtataattaaagctttaatttgttattgccttgtggtgagaggagggtcaaatccaaccattggtttcaaaatatggattgaataaaacgttacttaagcttgtaatactaataagttttacaacacaagcacaatcagctctagactgttatgtagatacctatcacattaaagggaatgttctgcaacgtggtttagacctgccttgcaatattgggcattccagaaacaaaattcgaaaattgagcatagttgtttgtcttttccaaacaaaaaggaaaagatgagggttactagaatgaggatgctgagatggatgagcagaaatcaagaaaagatgtgctaataaatgaatgcattcatgggaagttaagagttaaactcaatgaatggaagtaaatgaatttgtacataagcaactaagatcattgtatgcatgaagagtgatttgtttcaggttgaaggtactcaaaagatgagcggaaaaccaattgaggcagtgagaaatcaaaagagacttgttaattagtggaggacataatggtagataagctgaatgctagacaaggactcatgtttgaccctggatggttatgttactgttggcggtggtcatgttggtgtatgctcaatatatattgtattccttgctctctctctctctctatccaccaaccaaattcagttaaataagttttaatattggcctgaataatatggtttaaaggaatctggcctaaaagttgctggtgggtcttctctctggcttagcacatcatgtttgagaggatggtgcttttgtaaaagaaaaggaatgttttggcaaatctctttgttttggtggcaaccatgtggcttaaacaaagcagagtaataatcctgttatatatgctgtttattcaggtccaaaataagataagagccacttcatctatttatctttttataggcaacatgtattatcattgggaaaaaaaaagatattagggttgaacttttcgggtgcaaactaaatataattttctggtaaagaaaattatggatgtgaaaaacctataattttctgttctatcttcttggctttgtgctgtgtctaatagaagcctggatttttcttgcaggtttttccctgtttcttgggttcctaattgatcgt

SEQ ID NO: 10413 - DNA, 16750 bp, Vitis vinifera
  Intron number 1 from transcript GSVIVT01018280001 (locus G SVIVG01018280001) derived from phytozome v7.0 (chr-ID chr1 5; pos 12084211 to 12100960 reverse strand)
ttgattttcttcaggtgtgattcggaacagctactcttcttatgtcctgtgaatttttacgtttcagtttgggttttgtggttgattgccgttggaactcaattgctgttttgttgtggttcgattctctttgaattatgcttgattgttgagaaaaatgtaggaaactgaaggttaaagtacattttggttgttgtgttaaaagaaaaagtattagctcgcttcagtttgctcagaaatgctactactctttgatcctgatgaattgtaatgtttaaataaaatcaacttgctgtcagattgcgttcttttgaattaatagtgacttgactgtagactgatgatgaaaggtattcccaattaatcctttgattggaggatagaccaaagaaatctaaatccaactcttaaaacaattataccatttcagttatcacttgctcttttattgctaactaggaagaatttatttccaatagtcctctcttgttgaagtatgcccaacttgctaataatgcgttgaaaatcatctttagcaagtgggttggtgaaggtatcctccaattggttgtgagaggaagtgttggtaggtggaaaaagtgaactttgaagatatatacgctcaaaattacaatcaagttctctgtgctttgtccttgaacaattagattttcagcttggtgtacagctttttagttatcacaataaaataccatgggctgttgtggactcctgttcatatattgcaaacatttgtagttaactagtgatggtaagataataaatcgagcaacaagaagatgataaccctaagggttatccaatcgatagccttctgtctctgtgagctatagacattgttccatgagaaaattaattggttttgcttcaagaaggaattgtatttttgttgagggagatacaaccactttggagatctcacaacagaagttgtgatggaagcttttagtagattggttgagaaggttttggaaggtggcttgatccaaaggttttttttttggtgggattaaggggtgggaggagtgtaacatttctcatatctccttttccaatgattctcttctgttctatgacacagaatggggacaacttagatttctcatctatgttacattttgttttgagactgcatatggtttgaaggttaatttggagaagacttaatttattcgatggattgtagagatcatttcttatctttattaacagttccatcgtgttggaactagaggcccattgggagtttcttttatgactaacttggattggaattgtgttgcggatagatttgaatgaaaagagtagtctcttgaagcatcggtatcttctcgaaggaggtggaattacttgattaacaaagcatgttgttggttctatcagtatattttatgtttgcattcattatgccagctttggttggctactctctgaaaagcttcagcaagacttcctttgaggtggtattaaggggaaatagagctttgtttggttgattgaagtggtttccctcccaaggagggaatggggtttaaaaaggtgcgcatgttaaataaagcttctttgggtaaatagtctggagttcctaaaaagaacaagttatgtaggaggttgtcttaaggcatataggttggaagaggtggttaagagagggctgggatgagtttgatgtttctttctttttctttgaatgatgggtgggcgagtaaggtcttggtttgatttgtgctatgtagagtcggcacaacacttaagatttccaatgccttttttcatttcaagggacaaaatggcttccattgctaggtatttgggtttttcttgggttgaagagccctttggaacctgacatttgtgacttgtggtaagggaattttggaagctattagcatttgtattccaatcaggaaggaagaatattttgagatggaaggcttttgtcataggatttttcttggtgaagttttaataccacgtattaatgccttagtagagggtcatttcctcatctaaaaggttatggatgtttgttgcattgcttgaggtgacttcccttgtgtaaattgtgttttgatgagaaatttgtcattggattatcggtatgctcttgaggcttcatgtaaaagcaaaacaagaaaaaaaattactctttaaaaaaagggtaagaggatggagcatgattagttggtgtcacttgtgcaagagggctgaggaatctgctgattatttgcaaatccaatgtttagttatctgggagttgggagttgtggtttttgatgttctatctatttcaagtttcttgggtgcttcttctgtatgggcatggttgtcctaacatggaaaatgggagaaaggtttggaggactgttcgtcattatatagcctggtgggtctagaaagagaggaataagtgaacctttgaggggattgagtctggtattccccaattcaaagaagtcttattgcccttgctgcaatcttaggttcaggttggcttagtctgctgcagagggtcccttgtggattttgtttgtagttttggatattcactttggattggaagtcttctttttcccccctttttttttttttttgttaagaaacaaaatgtattagaattgagtaaaacacatgaaaaggatgaagaatcctctctagatttacaaaaactgatcaaagaaatagaagattaaacattctccaaaaacactaaaaagacacatacatccatatagaaccatatgagaatatacaactaggggtgtaaataaggttgcttcagttggtttttaaacaaaaaatcaaccgacataatcagtttacatggagttaaaaaccgaaccaaccataatttcattgaaaaaccaaaccaaaccaaaccatttaagttcggtttggtttggtttttcttaatcggttttggcctaacaacgaattccatttgggccttagtcccaattgagttttaaagtaaattttatttcattttgagaccaaatttcatgatccattcaaatttcaatatacataattatagaaatagaaacactaaattttaaaaatctccaacaataatattttcattttatcttccattttctcaaacttaaaacaaaaattaataacacctctattttcttccatgtcttaagctccattaactctcaagttgaaaacataaaaccatcccccatcaaattgttttccaactcctcctattgttggaatgccactaggatattaattttatattaggtggttgcactcatatccatcctgcaaattcacgtggttaataagaaaaaatatgcagcattataacacaaacaaattctatttcattgaaagttgataaccagaaacaataaacaatgaattaatgcacattatgcaacatccacatgcagatggttcatctcattgtacaaatatacctctcaaaaaaaaaatctcactgtgcaaatacaagaaagaataaattgatataaacaatggacattgaattaatgcatacaatgcagtatccacatgggttctgtcacactaagtttaatggagtctacctcttgaattaaatggtgaaattactagtttgcagtatagagaacttttgatcctgaaccacatacaaaatacatgcaagttccttgaaagtttgcagccaaaatacaataagcaacatagtccatgatccatttagcatacataattgtagaaaaaaaaaaaaaaaaacacaaattccaatcttcctctcataacaacaaacgatgtacaaactacaaacttcataataagatcttgtccaatatcatcccatagcaagtactccaaggagcaaggtccaaaatgtccatacttcatcactataaagtagatcaaataataatggattaaatttagattaataatcaattaaagtaaaattaaaaaccaggaacaaatgtaataaaaataataacaatgaattaaatttaatataacaataaattaaagttaataaccatgaataagtgtataaaaataacttacatcacacttaatcatcaataaccataggctcctccaatgcacatgacaaatctaagcaagaaaaaagtatacatataaataaaagcattcttggttgtgttaatggcgaagttttttgaagtagagaaaaaggctttctaggtaaagtttgaaggttccaatgggggaacttggatctcaataacagagaggagtcaagggtttgttgtctcagtaggatttggaaaggaggaattggaatggttgtaggagcatttgaagaaagctatggagttggaggcttccaggggttttattcgaaagattaggggcaagactatgactcacttgatggagatttgtttcaatagtaaagggtgattcatgaaaattacaaaaattgttgcaaaaaggaaaccattaatccttgttgttcctgagggtgttaaaggcaatgggtgggaagccctaagaaaggcgatttcttcagtgtaagatttttctgatcaagctggaagagtttcgaaggagatgattgaagattttcaggcgagtaagggcatttacagaggatgtcggtcctatgcaaatgtggttgcagaggaaggacctaggaacagagctctgttgccaattggaaaatggaccaaagctataatttgtgaaaacaaagaaaaagttcaagattggtttcatgtaggaaaagctattgcgaggatgatgggtatgaaaggaatggtgtctgtaacccctatttccgcttacaaggggtgtttctttgtggattctacaaggagagctcaatggttccaagatagggaagtttatcagtgagaggaaagtttatttttctgaggagatggtcgccaagagaaaatacagttgtatttggaaaattcagaaggggttggttagaactaaaaggtcttccttttcatttgtgggacgaagatcagttgaaatacattctgaagaagtgggggagggtaatgaggtggcacgagactctttgaagcttgtagacttgtcgaaggtgaagttgtgggtggagatgcttccaaatgtcgtgctacctgcaatgctagaggtggaagatggggcttggtcattcacagtcacagttccagtcatcggagaagatgaagaagacgacctttttaggtctgagtcaacttgtagcagggacgagttgatgccaatgggaggttgcgtctcttagaggccaaagaatgcggaggggctatgtggtagcactagggataatgagtgctatagaaggaggcctctttctcaatcacgttatcgttattcaagttcaaatttggcttccaaaagggagaatggctggggagggagtctcctgggcccagcggagggaaacaataatgggcccactaagcctaaggccttgtttaaagcccgatttgttagggcccagattggggtgaaaagtcttgggccccctgctagtccaatttttattcaagcccacgagactgtagcgctgttgtcctcagcgctctagtgcgcagaatcttctgcaaaggaggtcccattgtttgtatgctctcaaggtccagtcaaagctaaggccaacggggacgaggctttctcagatgaggatggtcgggcctttgagagaaaggcccagtctcttcccaaccctagtccactatctgccgcaatagtgggctgtaacttaaaaggcccgtcgtggttgggccaaagaataggaggaatgaagccctctgttaagacgggtttgttacgaagggaagaagatgttgcagtgagaaaggggaaagcttatgaggttcagatgagaggctctacgaagaaggaagagaagtttggttcaaagaagctgtggaataccctttttcctccaagttttgatcgccgacaaggacttcgaagtcgcagcgagcctcctttgctcgggaagtcattgtcagatagcgaagagtgtccaaaggaataggattttggggcgggatctctggtggaatgaggattcagagcgagtcctctctttcattgtcaattgtcaaggaatcgaaagcggtgttcgggggaagggacttcgtcgtcaagaggcgaagcgtctttgcacaaaccctattttgaagaagacaaagaaggatttttgggtcgagtggggtccgatcttcgtggttcatcagtcacggatttgccttctaatccagaaatcagaggtaaagggctcagctttaaggggaattgtggaatgttggtagtggaaaacatggaggtatgccagtcttcaccttctcagtcacttgagtatgcttttcacccttcttgtggtttggctcttcctttgccgagtccctctggtccagatcttcttagttcagtctttcattctcagtctcctatggaaaattgagtgatttctgaaattttttctaaaaaagacgttgttggcactttttatcaaaaatctgttggcaatcctatccgtgatgtggtggaggcccagtttgcttattcaaaccagatgtccgagagttttaaccctgttaagtctaaacccaatttgcctaaggaggtttccaatgtggttacagttaaccaagatgataccgtggtctccccatcgggcgagttccaaatagaaggcttgttccccaggaaaatggctaaagtgcgtgaggttttaagttctctggatattaaggtttattccaggaggaagaacagatgctccacaggtatgtgagacttgttggaactggtttggtggtttaaggtctgtgaggtttctccatgaaaataatcagttggaataccaggggtttgggatcaaggaaaaagcgaagggtggtcaaagattttcttaggtcagagaatccggatgttgtgatgattcaggaaacaaaaaaggtggagtgtgacagaaggtttgtgggtagtgtttggacggttagaaataaggaatgggctgctcttccggtgtgcggggcttcaggtggaattttgattatttgggactctaaaaaactgcgcaatgaggaggtggtaatgggatccttctcggtctaagtcaagtttgctttggatgggtgcggacctctttggctatccgcagtttatggcccaaacaacccctcacttaggaaggatttttggttggagcttttagacatttttggcctatcttttccgttatggtgtgtgggcggtgattttaatgtcataaggagaagttcataaaaattgggtggttctagtttaacttcaagcatgaaggactttgatggttttataagagaatgtgaattgtttgatccacttttatggaacgcatcatttacttggtcaaacatgcaagagtctcccgtgtgtaagagattggatcgttttctttactcaaatgagtgagggcatttcttttctcaaagccttcaagaagctcttcctagaaggacatcggatcattggccgatagttttggataccaacctgttcaagtggggcccaacaccttttaggtttgagaatatgtggttgcaacatcctagtttcaaggagagctttaaaagttggtggagaggttttcaaggaaatgggtgggaaggtcacaagttcatgaggagattacaatttgttaaagccaaattgaacgagtggaataaggtttcttttggagagctaaatgtaaggaaaaaaaagcatccttaatgatatagctaactttgatgccattgaacaagtagggggtctcacttttgaacttttagttcaaagagccttaagaaaaagggagctagaggaattaattttgagggaagaaattcattggagacaaaaagttagggtgaaatgggttaaggaaggggattgttaagttttttcataaagtggctaatggcaggcgaaataggaaatttatcaaggtgttggagaatgaaagtggcttagtgttgaataattccgagagcatcacagaggagattttactttactttgaaaagctttacgcgagtcctattggagagtcttggagtgttgaaggtttagattggtcccttatattagaagagagtgtgtctaggttggactcccctttcattgaagaagagatttctaaggccattttttcagttggatagagataaggcgccggggcctgatggctttaccattgtagtatttcaagattgttgggatgtgatcaaggaggatttagtgagagtgtttgcagagtttcacagaagcgggattatcaatcaaagcactaatgcctccttcatagttttgttacccaaaaaaaggcttgacaaagaaaatctcaggctttagacctattagcttgatcactagtctctacaagataatagccaaagtgttatcagggcgtctaagaggggtactacatgaaaccatccattctactcaaggcgcttttgttcaagggagacaaatattggatgcaattctcatagccaatgagatagtggatgagaaaagacgatcaggggaggaaggagtcgtcttcaaaattgactttttacgaccatgtgagttgggatattttggatcatgtgttggagaagaaggggtttagtcctagatggaggaaatggatgagtggttgtttgtccacgatatcttatgcagtcttagtgaatggaaacgctaaagggtgggtcaaggcatctagaggcttaagacaaggcgaccctttatccatttttttgtttaatttagtcgcagatgtactgagcaggatgttattgagagcagaggaaagaagtttgttggaaggtttcagggtgggtaggaacagaactagggtgtcccatttgcaatttgcagatgataccattttcttttctaacactagggaggaagaattgcaaactctcaagagtctattgctagtgtttggtcatatttctaggttaactttgacaagagtaatatttaaggcatcaatcttgatcagaatcatctttctaggttggctgagttgcttgattgcaaggcttctggttagcctatactctatctgggtcttcctttgggagggaatcccaaggcttgtggcttttgggatccagtgattgagaggatcttaagaacattagatgggtggcaaaagacttattcatcttttggaggaatgataactcttatccaattttgcctcacccacatgccctgttactttttttccttgtttaaggtacttgcttcagtggctgcaaaaattgagagattgcaaagggattttttatggttagggattggggaaggtaaaagagatcatctagttagttgagatgtagtgtgtaatccaaagacacaaagggatttgggatttgggaagatttctctaaggaatctcgctcttttagggaaatggttgtggaggtaccctagagagggttcaactttatggcatcaagtcattttaagcatttatggatcacactctaatggttgggatgctaacactatagtcagatggtcacatcgttgtccttggaaggttattgcacaagtctttcaggagttttccaagtttactcggtttgtggtaggggatggggaaagagtttggttctgggaagatttgtggtgggaggaccaacctttgggatcccaatatccaagattatttagagtagtttcggataaaaatattcctatttcttcaattctcggttgtactcatcctttttcttggaactttaatttccgccataaccttttcgattttgagatagaagatttagaaggcctcatgtggtcacttgagggtttgcatctaccaccttcagtttcaaatgcgagatcctgacctttatcttcttcagggcttttttcagttaaatctttatttctagccttatcccaattttctagttctcctctaacttttcctactaagttcgtttggaattctcaagtccttttcaaagtcaagtcctttgtctggttagtggcacacaagaaggtaaatactaatgacttgctacaatcgagaagaccctacaaatctcttagtcctgatatctgtaatatgtgcatgaagcaaggagaatcaacagatcatcttttcctacattgctatttgacgatggggttgtgacatagattatttcagttagccaagatggattgggtcccccgaggagcatctttgacatgttatccatcaattataatggttttggttcatctaagagagggataattttgtggcaagctgcgagcatcgctttaatttgggttgtgtggtgagaaagaaatgcgaggatttttgaggataaagcaaagaattcagagtatctttgggattctattcatttccttgcttctctttggactttctgtttcaaggtttttaagggactccccttaatgtgttacaacttgactggttagtggtgtgcaattccaaagggttggtctaatttagagagtttgtttgtttttactgtgtatttttttgtttttgtattcttgtagtttagttttctttggtgggaggattcttcatccttctcttgtactctttttttctatcaatatatcattttgtcgtttcctataaaaaaaaataaaaaaataaaataaaagcacataaactatataagaactaaaaaaattccacaaaaaatgatatagatcttaaatttagaataccttgctcaagattttcaatttcttccattgtttcacgaaggttaatcggtattggtgaagatcgaagcctattttgtccacaaataagcatctcaactgtttttggagacaatgaactacgaaatggatcaagtattcgaccaccagtactaaatttggactcaaaagcaacagtggagatgggaattgccaaaacatccttagcaatttgggcaaggaccttaaatttagaacaattgaccttccaccaatgcaaaatatcaaaaccatcatcaactctctcattactttctgacaagtaccaatccaactctgacttactttctacattgtgttcctcatataagtgtcgtgtaaaagtgtagacaaagttaagatcatcttgctcccctaactcactttccttaggttgtgagaattcttccaagtcacagacttcattatgaaagtaaaggagcctatactcatcatacaatttcctcaaaacatcaaccaccctagttgacatatctttggcaacctctttatcatataattgatcaaaacaaaattgcacaaacttcaacttgtatcttgggtcaagaacaactacaacatacaacaacaaattacttcttttaaggtttccccaatatttatcatacttagccttcatattttgtgccatgtcactcaaaagcagatcattgcttttcaagtattttcgaatcaagtttcgaattaagcataactcatgaaaatatgcatttgatgtagtaaataaagatcctgaaattcttaatgtaacatcaaagaatattttcaagaatttcacaaacacacgagcattatcccaatcttcaaccaaaggggggccttttttcctatcatcaccaacaaactctaaaacatattgtgtattttgttcttctaatcgttcaaatgccttttgaaaattttcagctgtttccaacattaaataagttgaagtccatctagtagagacatctaaatatacaagatttttgctttaaattttttcttcttccactcaagttttaaacctcaacaatcgtgtaggagaagacttcacatacctcaccgcattacaattcttaataatagaatcatgaagatctttcaaagcatcggttacaataaggttaagtatgtgtgcacaacatcgaacatgcatgaattcaccattcaaaaccaacccattccaattactaatcttcttcactaaataggaaatagcaacattattagagcttgcattatcaactattacagtaaacaccttttcagcaaacatttctcaattgtttttcctattgtgtctcctttatgattaggaatttgacaaaaattcaaaatccttttgtgcaacttccattcatcatcaagaaaatgtgcagtgagaaccatgtaattaaggttttgcaatgatgtccatgtatcagtagttaagcaaaccttttgagacagccttgtcaaaacacttttcaattttttcttctcacttgaatacaattgagagcaatctttagccactgtagcacgagatgggataaaaaatttaggttgaagtggactacaaaatgcacgaaacccttctccttgaacaaacctaaaagccaactcatccacaattatcatcctagcaagcatttttctacaatgctctacattaaaactagtggcaagcaatgtgtaaccactatccccctctccctctccttccttgttcttgctttggaatgataatgtcttctgttttggatctttacacctaaatggatgtttctgacatccactagctaaatgagctttcatgttgctagtttcatttcttttatcatgacatgcataatcaataccacaataattacatgtagcccttggataattgggatcacattcttttactttagtgaagtgatcccaaacctccgaaggtggctttgtaggttttctcttacttgtaccctgtggtggtaatgaggagtcaggagtgtctgttggtgttgctgttggtgtgctacttgtaggagtaggcatgctactagacgagttttcttttgttgtagacatctattgaaaaaaaaaaatcaaaaaaataataattaaattaattaatgtgtcacaaatagacaaaactaaaaatatagttttaaaaaaatatataaataaaagagaatatttattttactcttctttactattttttgttaattgatgtaatgtatgtaactccaaattaccataaacaaatttgaaagatgtaggaataatttggaattcatgaattcatttgtaatatttgatgaatattttaggatttattcaaaacctaccatgtaaatttaaatttttaccaaaatgaaaaaactataggctacatactgtcccaaaaatcattgaacaaatcaattaattggtatatatagactccatcattccatggaatcccacaatcagtgccttaatgcccttattatttatttaattaaataaaaataaaacgacatggagttattgacttgaacaaatcaattaattggtgtatatagactccatcattccatgggatcccacaatcaatgccttaatggccttattatttatctaattaaataaaaataaaacgacatgaaggagttattgacctgtttgtcttgttcttggtggtggggaatgaacctatggaagaaagtagaagcaactacaatcctaatgcactcaacaagtttgctaagccactaatgaaaccttctttactagagaaaaaccccttgattttttgactatgactttggtagaatcccggagtatttcgctcttaaccttagtttccaatttcggtcacaatagcataactggaactgaataaagagttgaagaccagtttagatccttcagaatgttaacagaaaaaataaaaataaaaattgaagtgaataaatttagattcaaacttacacaacaccattgatttgttctaaagaaatgattgtggaagaaatgttttgccgaacacaggactctgcacaagggcgaaatctagggcttcgacttcactgcgtgattttcccaattttcccttttcatatatatataatgctaaatgacgtcgtttcaataaaaataacatatatgttggttcggtttggttcagtcaattttttttttcctaaaccgaactccgaattgactttattaggttttctacttttaaaaccgaaccaaacattttttaaaatgaaaaccaaaccaattaggccggtttgggttagttgggatcggttcggtcgatttataggatttaacttacactcttatatacaataaagacctctcatccctccatcaggattaacacaactccctcgaatagaagttgaaacaaatctcctcttctcactaaattaacctctatgacttacacgtcgaataaaagtcaagttgaacaacattgagagaaatgtccttaaatgccttggaacaagaggttgagaaggatggataggaataaattagatcccctggtgtctccaatgtcctccacttgtcctcgaaaatcctagcatttattccctccacacaatccatatcaatgtgagacaagcaatttgtcattggactttgcctctgatggagcttcctaaagttctatatgagatggacatcatatcacatatgttcctaggaggaactcaatccaagttgactaagttgaatggcttgtgctaaaggcccaaagtcaatgggtagtgaacaaaaaaagatggtaagatgtttctccactcctcatgtacaaaatgcaccaatcaatgctaagggttttgttagctcttctcaattgtagcatatcattggtctttactctcttatgagccactcaccaagtaaagactttgaatttagatgagactttagatttccatagaaatttagctgccatgaaaggaatcgtgtttgaagaattagacaatgctaagaataaagactttaccaaaaataagcccgaggaaaataatgatcaagctattgcatttggaatagatggagtcaaatgcacccgagtgagagagaacatgagtcttttgaggtcctctatcttcaaataattaaggctataatgaaaattaaggttataagaaaagggaaagaaatgcttagggtagttgagatggtaagattttttatttgggacaactttgaaaaggcttggaaattgagaatgcgaaggttgactacccctttcacagaaacgaattcttgctccatcacccaccataaaacatgtagattgggaaaaatcttgatgaacttgtgcaatgaccttcaagggggaacagtgtgactgcctaactataatgttggcatcccatcctttgggttgtgtctcgtagatgctcaaaatagcctgatgccaaagagtttttccttagtataccttcacaaccactttcctaaaagggcttgattcctcaaagaaatcctccctaagccccgaacaccaaacccccttccacctttggcttgcatactagtcccaactaatgaggtgattcctcttaacctcacccatccttgaccaaaaaaaatctctttgcaatttcttaatcttagaagctaagccactaaagatgagatcttgagaagatagaggaaatagccaggaatgtgagataaacaaaattgtattagagtaattctacctctcagcgacaacaaagcttttttccacccatccaatctacgtgaaattttgtcaaatcacgggattccacaaagtgctttcctttggattccccttaatggaggacctaggtaggataaagattagttagagactttgcattcaagcatcaaagccagattagagatttgatcttgattcatgttgatatcggagagagtgctcttgtctaaattgatcttaagacatgaaattttcctaaagaaccaataagattaacttgagattttgaaatttttctatatagactctagaaaaaaagatagtgtcatcaacaaattgcaaatgagatactctacacctatcctaaccactaagaaaccttccaatacattgctctcctttgctctcaataacaacctatttaaaatgttagttgcaatagtgaaaaggaatggggagagaggattcccctgtcttaatcctttacttgctttaaagcattctttggcacttccattcattaacattgcaaaatttgtcgaagataagcaaccctccatccaagacctccatctaaagctaaaccccttcatttctagtgcatgatgcaaaaaactccaatccacacgatcatagggcttttcaaaatcaatctttaagactactcctttctcttctgtatgtctcttctcatctaccatttcattggctattaggacaacatctagaatttctcccctcaacaaaagctccttggataagaattgcagtcttgtatttttttttttttttgtctctttttctgtatttatttatttatttttattctctttggtgcatttctagtaccctttgatgctactaattagtttttagcattttttgtcctaaatttttttatggtaatacttttgggatttattgttaacttattcaacatgcgttttacgtggtatttattttttattttattttattttttgtgtgaacagaaataaaaaattcaaaaccacaattttgaaccctcttcattttatagaattaggcttccttgcatcacttgtttagttattgggaaggcaccatttgttttcctagtttggaacatatcgatattagattcaaaatatccatctctccattaatacttagactattacaattactgtttctattattattactatttttttaattcctataataataatattattattttgtattcaaatcttttaattttcttattagctgctgtggaagaggaaatattctgtgctgtcatttcaatgtaattgttttggtattttttatattacagtctccagcggcattgaagagtgaagagtatcgaca

SEQ ID NO: 10414 - DNA, 6238 bp, Vitis vinifera
  Intron number 4 from transcript GSVIVT01035761001 (locus G SVIVG01035761001) derived from phytozome v7.0 (chr-ID chr4 ; pos 4069813 to 4076050 reverse strand)
gaagagctcgtgaagctattgaatgttagattaatttttgtaattaatctataatttgggccacacatgtaaataattaaaatatgtgtgctatcatttaattaagcctaaatataatgatctaattaataattgattaattggcttaagggtataattgtcatgagattattgtgtagataccattagataattattatttctatgagggacaaaaatataattgtgataaaaattaaaactgccctagcggtttataaatagggttatggtccccattctacgactacgcattccaatttctgaaaatcctctcagagagaaattgacacagaatctagtggctagaattagaagaccatctcaaagggttttcttcctataaggtttctccttcaatggattcaggtctgcttccgctattatttttctactcattgtttttaatcaggagattccagtatatatgaaattagggtattcaccttgttaaatattccagtatatatgaaattagggtattcatcttgattgattttaacaagtggtatcagagcctactccttgataaattctttgagttattattttaatatatatatatatatatatatatgtcaatggattaagatttatgaaatattgagttgataaatttattattattattattattattattatttaatagcattttatgatattaatatttaagttattgatctagcattttaaataggttaattaaagcggaaaatcaccaaagtgacatctttcgtgtagattagtctgttcggggtgttagatatttgtgtgtatgtgattcatgcgggtattgactggcccaaaggaaagttaatatttggtcaaattgcatacatacctatggtgataaatatgtgatgattataaaggtaacttaatgtgaataataaatcaatctaaagatagatttattatttgacataacttatcatcaatgtttgatcactacaacaagagtaccacttacagttaatattattgtccaaagacttgatattaatgttgtgctaggtatcttgaaatgtcataatttgcttttaaatttaaagattatgtgtttaattgcttattttatgtgagcatgatggtttatttgattcattttattttgttctcaattcagcttttatatcaactacttctatatctgccaacatcaataatgtccctatgttaaatgggattaattttaaggactggaaagataatatgatgattctcttaggctgcatggatagacttagccttgagaatgcccaaacccgatgaactcaatgaggaaagtactcaagaagatgaggtttattggggtaagtgggaatgttcaaataggctaagtcttatgatcatgaagcgtggcattccagaagctttcaggagtgcggtaaccgatgaggttactaatgccagtgacttccttgcagaaattcagaaacgttttgccaaaaacgataaggctgaaacgagcacgcttttagtaagcttgatttcaatgaagtataaatgcaagggtaatgttcgggagtacatcatggagatgtctcatcttgcttcaaaacttaaggctttgaaactcgagttatctgatgatttactcgtgcatttggttctcatctctcttcctgcacaatttaatcaattcaaggtcagttataactgtcaaaaggataaatggactcttaatgagctcatttcattctgtgtgcaagaggaagagagattgaagcaagacaagaccgaaagtgctcatctggctagcacttccaaggataagggcaaacgaaagaataaggataataaggttgttgcttctaatggtccagaacaaaagaaacaaaaagttgaggtaacatgtttcttctgtaataagcctggacatactaagaaggaatgtaccaagtatgctgcttggcgtgttaagaaaggtatgtttcttactttggtctgttctgaagttaatttagcttcagtatctagaaacacatggtggttagattctggtgctactactcacatttgtgtttctatgcagggttgcctgagttaccgaaaaccaagtgatgctaaaagatgcatctatgtcggagacgatcagtcggtagaagtagaggcaatagggcactttagattattattgaaatctggttattttttggatttaatagatacttttgttgtaccgtctttcagagagaatttaatttcagtttctgttttggacaaatcaggttattgttgttcatttggaaacaatagatttacattatctattaattcaaatgctgtaggaaccggtttacttaatgtttatgataatctatatttgttggaaactgtttcgtcctataatgaaaccttgcatgtggaatcacgaggtacaaaacgtaaattgaataaagataattcggcctcattgtggcacaaacgcctaggtcatatctctaaatctagagttgagcgacttgtgtccgatgggattttggattcacttgacttttcagattttgatatttgtgttgagtgtattaaaggaaaacagaccaaaacaaagaaattaggtgccaatagagctacagacgtcttagaattaattcatacagatatctgtggaccataccctacggcatcttggaatggtcaacagtactttataacattcatagacgactattcaagatatggctacctatttcttatacatgagaaatcacaatcattggacgtgttcaaaacatttaaagcagaagttgagttacaactcaacaaaagaataaagagcgtcagatctgaccgtggtggtgaatactatggtagatatgacggatcaggtgaacaacgtccaggaccatttgctaaatacctagaggaatgtgggatcgtccctcaatacaccatgccaggatcacctagcatgaatggtgtagcagaaagacgaaaccgaactcttaaagacatggtaaggagtatgattagtcattctactttacccgaaaaactctggggtgaagcactcaaaacgacagcttatatcctgaatcgggtgccaactaaagcggctgctaaaacgccttatgagctttggacgggtcgaaagcccagtttaaagcattttcatatttggggatgtccagctgaagcgagaccttataagcctcatgaaaagaaattggactctaaaacagttagcagctactttattggctatgcagagcgatcaaggggttttaaattttatgatcctgctattaggtcaatttttgagacgggaactgcaacattttttgaggatgttgagtttgggaggagaaatcatgctaggaatattgtctttgaggaggaagagggatctactattgtttttgataatgtacaggtttcactacctatcattgatcaagaagtaaatttggatcctcaaccaacagacaatattgttcaacccttaattgcaaatgaggacattgctcttgaagaacaaactcaacaacctcaagaaaatatgccattaaggagatccactagagagagaagaaatgcaatttcggacgattatatcgtatatctccaggaacgtgaggtagaaagtggaatgatggaagatgatccaatcaacttccagcaagccatgaaaagttccaactctcagaaatggattgaagccatgaatgaagagtacaaatctatgcaagacaataaagtttgggaacttgtcccattaccagttggtacgaagcccattggttgtaaatggatatttaaaaccaagcgggattcaaatggtaatgtagaaagatataaagcacatcttgtagctaaaggctttactcaaaaagaaggaattgacttcaaagagaccttctctccagtttctacgaaggactctttcaggataatcatggcactagttgcacattatgatcttgagttacatcaaatggatgttaaaacaacgtttctcaatggtgacattgatgaaacaatttatatggtacaaccagaaaattttgtgtccgaagactcaaagaatatggtttgtaaattaactaaatccatttatgggctcaagcaagcttctcgtcagtggtacttcaagtttcatcaaattattgtctcatatggttttgaggcaaatcttatggatgaatgtgtgtatcacaaattcagtgggagtaagtatattttcctggttttatatgtcgatgacatattgctagccacaaatgatattagcatattgcacgacaccaagagatttttatcaaaacattttgagatgaaatatcttggtgatgcctcctttgtcttaggaatccagatacaccgagatcgttctaggggtattttaggattgtcacaaaggacctatattgataaagtcctccaaaggtatggcatgcaaaatagcaaaccaggtgatacccttgtcgctaaaggagacaaattcagtcttaatcaatgccctaaaaatagtttagaaagtcaagaaatgcagaagattccttacgcttcggctgtggggagtctaatgtatgctcaggtatgtacacgtccggatattgcgtacattgttggcatgttaggcagatatctaagtaaccctggaatggatcattagagagcagccaagaaggttatgagatattaatagagaacaaaagagtacatgcttacatataggagattggatcagttagagttcattgggtattccgactccgactttgttggatgccaagacagcagaagatccacatcaggctatatttatctgttggctggtggagcaatttcatggaggtctgccaaacagacactcataacttcatccaccatggaagtagagtttgtagcatgttatgaggcatccaatcaaggaatatggctacgaaattttgtcactggactgcgtgttctggatggtattgaaagaccactgaagatattttgtgacaataaatcagcagttttatattccaataacaacaggagttctacaaaatcaaaatacattgatatcaagttcctagttgtaaaagaaaaagtacagagtggatagatatccatagagcatattggaacaaactccatgatagcggatccgcttacaaagggattaccacccaaggtctttcatgagcacactgctcatatgggtgttgtctcatttgaggatatccaaatttagtgggagtttatattattcattgtatattgctctatgttatgtttagactttatctatacatttagattgtgttctgtagaaataaagtattcatttcattgcactctgttaaattatgctaaagatttgatctcaataaagttaagtaggaccagttggaaataggcatgaatagatcacattgcatgtaatttccatgctatgcactcatgattgatctatgtcatttagctgtacagatatatgtgaccattgattagtctagtaacgattgatgtaacaaaggccaccttgatcctatgtcagtatagttaatggacgagattgttcggatataccctaaggacatgatagcaaattttgagctcataaggttaaacacatttatttgattacatatgcatgtggcccagtgggagattgttagattaatttttgtaattaatctataatttgggccacacatgtaaataattaaaatgtgtgtgctatcatttaattaagcctaaatatagtgatctaattaataattgattaattggattaagggtataattgtcatgagattattgtgtagataccattagataattattatttctatgaggggcagaaatataattgtgataaaaattaaaactgccctagcggtttataaatagggttatggtccccattctacgactacgcattccaatttctgaaaatcctctcagagagaaattgacacaaaatctagtggctagaattggaaaaccatctcaaagggttttcttcctataaggtttctccttcaatggattcaggtatgcttccgctattatttttctactcattgtttttaatcaggagattccagtatatatgaaattagggtattcaccttgttaaatattccagtatatatgatatatatgaaattagggtattcaccttgttaaatattccagtatatatgaaattagggtattcatcttaattgattttaacattgaattgtttcaagaa

SEQ ID NO: 10415 - DNA, 9581 bp, Vitis vinifera
  Intron number 1 from transcript GSVIVT01035730001 (locus G SVIVG01035730001) derived from phytozome v7.0 (chr-ID chr4 ; pos 3758059 to 3767639)
aatttctttgatttcgtagatgttgggttcttggaaagtttgaaagaaataaaatagaaagaaatggtagaatgaaataaaatacaaaatacctttaaaatccataaattattttgatattttatttcaatcccattttgcttaattaatttttctatataaatatcaaataatttaaaaatatacaagtttttaactaattttaattatatttgactttttttactattttctacaataaaaccaattatgagaaattcatttttcttaacggttttctttttctttccttgatagtttttagagcaaaacacaattttagtattcccattgataaaggagatagagagcatgactagttgtttatataggctagacccctacatagaaataatgataacggaaatccttgtccataaattgttgcactattcattattataatgttaaagttaaaagaattttgtttaaagaagtttaaaacgatagttgcagcgaagttgaatcaaattcatttgagtaggtaatgctaccattaacacaaccttcttgtgctagtgttaactttctcaatgttgcccaaaatagtaggtacatatgcttttggttttgattatgatgcctaaagatgagagaaagttgatgatcgagatcgtgcttaagatgataatgatagaggagatgttggataacatgatcaaagtcaacaccattagagctcattcaccaatgaagttgatttcacacattatactcatgataaagattatgacgagaatgataaaggggatgttgatccaagcataatagttgtcaaaaagtcgcacaaaagggaggacacaataaatgctaacaatatttaacgagaatcatctttcaaccaattttgattcaatgagtataaggagtcaatgcggtgaatcatcaaatgaagctaaattttattatcttatgttatgaggtatgaccaacatcctttacattatgagatgagttcatgtttaatttatgataactatggtatatttaatatcatcccatatatcatgtagcgctcaaaatcagatgcaatgagtattttaaacaagtatatgagttagtttattgttcttcaaccattggtaggcaatgagaagaagtcattagatctatgcataatatgttcgtaattaccgtcaatattatgaaaatatcatattatggtactaatattatccccacttagatggtcttcctttatccttaagtatcatggaatcacgttggtccttgtttttggtattaaaagaaactgttaaatgaaatttatacaaaccattcgcctttaatgaaaacaaatattaccccacattaatattgagtgtacaccatcaaaacttgtatttcctttaacatgtgtattattgtttactttttacaatgtcttaaattttttttctaatacttgtttaagttttaattaattctcatatgatatttctagtatatcattagaatccaactaacaatattctattaatttataatattttcatcattcatcatgataatatttgagctcttgataatgaatcaatgatacatgttacactacatgatgattcttgcttactctcaatttggttgaaacaaatatatcaactccactttgataagcacacaactcaaattatcatatcaagactcttaaattaattcaatgtttggtggtaaaaagactaactcgaccatcaagatgtgtaaagtccatatcacatttcctcgagccttatcccaactcaaacaaatatattaacatccgatcattgtatcgagtgtgacacctttaggcgatataaaaaatcattaattttttttagagaaacattcattttttttcccataataagagttaaataatttttttgaagggtgcatggtgtcatctcatcaataggcccctcgacatccataacatgcggccttatataattactattagtaattttttcatgttaaaaaatgacttaatttaatataagagtaatgccacttcttttggaaaccctctgtcaagcttatgcaaattttattaataaaactttttaaaacggtcctatgacaaggcttgtcgtataggagatagagacaaccatgtattggtaaggtttgacatgctaccacctataggaggatggctctttaaatcaccataaagattgatgttcattgtgatgagcccggtttagcctcattgtaactagatgttcaatgggtgtgaacaaacttcagtggtgcattggcttacaaactgactttttttttttttttcataggaaactttacataaaatatttttttagagtcctttaaaattcacaagaggcatattgttagttttgggaaaaaaaaatccctaccattcatatgtaaaatgaccaattattcatgcattggtagttgaaaacttaatcataggcaaagtccatctagttgacttaattgtattcaaccattaaataatcttttgagattgataaagtagtcatcttacaaagaaaattttacagctcaaaattcattaagaaacaactacaaacaatgaaagagatctctagtgatttaacatccaacactcgttcaaagtatttattcttggtatactaatttatctaggagaagagttgcgagtgggaattgttggaccgtggtcaacagtgcttcctctgagtagttttcctcttacatgcattagacggacctacaaaaaggcatgtctagatcttggtccgagcgagccccttcgatggctaagttcatgcaagggttagattgcatacctttccttttggttgtttagtgtcttttatagatgatgatctataatgtgattcttgcctttatgattgccttcaattatggttgtaatgcataacactcaaatcttgactttttgtaacgattgcttattcactgcatgtaatgattgttgtatgtaatcacctggctactcagatagatatcaccttagttgggtggtaggctgcccggagagttcattctggtggatctatttgggttgctcactatttaggcacccatatgttggtaaactgggcatcaaagaaaataaagttgtatgctaggtgtcttcaaagttagatctaggtgatattaaagttaacaccttgttcccaaccagcaattacaacagtaccaacactaatcgttttttcaacttaacttcaccttacaacttaaaaataaaagcaacatgttattattaagtagcacatctataacgagtagcactgaatgacattcttgaggatgtttgaagttaatagtcgattttattaatttaaataaactcattacttgaccatgagtgtttgaattcaagaatgtttaaggactcacaaaattaatagcatatgaaggctaagatcactgctatgtgcatgattagcgatttgaaccaattaaggtaagattatagcaaattgacaatattttgttccaaatgtagtgctatacgtgttctgacaaggtaagaaaaaaattattgaaagttgtcttatcttattttgttggtattaagggtatggaaacaaatgactagcctaaaagacacaagcaaataacataattaataagaagaaaaacttattggttgaagcgtgacaaacactgtctttgaaatagatctaccttcctagaaaacgaactcggtgtaccaaggtactggtggtctacctctaggattcaacaatcagatcttgccttgggtgtactctgtaagtgagatgtgtacaactcgggttttgaaaaaatttctccagatagatgtatgaaaatactctctggaaaattggtattcatatttagagagtgataggtgacctgcttttataggccactaacgcaatcccaatgagactctacttgtaattagaatatgacttaatgtggaaagataaaatgaatgagacttcactagcacaatcccaataggactcttcccaaaaatataaaactaatggaataaaataaaataaaaataattcctaggaggattcttcccaaaaatatatgactaatagaataacataaaataaaaaaattatttacactcttcctacaatcccctacagagcgtaaacgtgattttttttttttaggaaaaaaaaattcaatgcatcagtactggtgcacaaaggttatgaatcagtcttaggacaaataagtattgaatcacaaaacacggtaaaaataaatttttatgaaccagtgtttctttatgtaacttaatagacttttatccacattggttttttcaactacactatgagctgtacaaaatgggttgacacaaacaggtcatgcgccttacatggatattcatgagagctctagagaacctgcctaagttctcataggaagcggtcccacctccactttcatataggtgaatccatcatgcatgttccgtattaaacataccatccataaggaatatggtattcattaagagtaaacactcaaccttagtcgatgcagaatacgttctatctacaccatagggatggactctcatataattagagttgatagagcacctcaagtcaacaaataatttgttattacccatatgaacctacttcatggaatttccattctaataggttaagttaccaccattcttaacttttgtaataggcataagccccatcccccttgatgtttcttccactagtttcttatttagtggtttggtcaaaggatcgaccaaattcaactctaacctcacaaattctagggatataacccatgtttcaagcagctgtcgcacaatattctgccttaggcgtatatgtctgttatttccattaaatattttactcttagctttaacaattgcagtttggctatcacaacgcatagacacagacgggattggtcttgtcaataaagagatatatgctaagaggtttctaagtcatttaacttcagaacttgtcttttctaatgtaataaattcagtctccatagtagactgagtaatgcaagtttgcttggcagacttccaagaaattgcactttcaacaatgatgaaaacatatccattagtggatttcatatcatctgaatctgatatccaatttgtatcactaaatccttcaaggacacttggaaatccactaaaacacaaaccatagttaatggtgcctctcaaatacttaaggactctacgaacaacagtccaatggtcctgattaggactttgggtgtactgactcaatctacctactgcataagcaatgtcaggtttggtatagttcttaagtacattaggatccttatgatctaagcatactctatttaggcaacactatgttctctatttttcttcaactgtgagttaggatcataaggagttgacaccagcttacaatcaaagtatttaaacttccttaggatcttttcaacatagtgttcttaagaaagtttcagcccatttggtgttctagttattttaattcatagaatcacatctgtctttcctaggtctttcatatcaaacttagaacctaggaatttcttggtctcacacacaacctctaggctagttccaaagattagcatgtcatcaacataaaggcagatgactacacatgtgttatcctcatacttgttgtagaaatacacttatgagcatcattaatggaatatccattagttactaacacatgatcaaacttgttgtgccattgtttgggagtttgttttaacccatatagtgatttaaccaacttacacaccttttttttccttcccttgaactacacaaccctcaggttgatccatataaatttcctcttccaaatccccattcaataatgtagtcttaacatccatttgtatcactaaattatgaatggaagttagaacgatcaatactctaattgatgttattctagtcacaaaggcaaatgtgtcaaataatctacattcttcctttgtttaaagcctttgacaactaaacgagctttatacttctctatagacccatcttattttaactttcttttaaagatccatttacaaccaatagtctttgcaccaggaggtaaatatactaactcccattatggttatacatgattgattcgatttcactatttatggcctctttccaaaatgatgcttcaagagaagttatagcttatttgtaggatttagggttctcatctattaggaaggtgtataaaccatctccaaggtttgttttttttcttatctcttttactccttccaggttcaaattcagaatgtttaatagaattgtctctacttgttttatgaacttgttgttcaccatttagtttcataggaaagatgtttttaaagaaatttgcattctttatttctattatagtattgacatctacaagactgttttatgacttagtaacaagaaacctatatgccgcactcttctcagcatagccaatgaacattgcatcaaaggttttaggacctagtttttgttttttaggttcaaggaaaagaactttagctaaacacccccacactttcaagtatgctatattatatgcataacccttccacaactcataaggagttttaccagttttattgtaaggtattctattttgaatatgacaagcggataggatagcttccctcccacaagttcaagggtgctcttgaactaactaacactatattcatcatttcttttaaggtcctaattttcctttatgctactcccttagacttaggggaataaggaagagtagtttcgtgaatgatcccatgattttcacaaagaattaaaggagtttttcttctattacattagcctcagaagaaaattctttagctttctcaacattatccctattttggttttgttcctcagttttaatatagattatgacatcctctagggacatctgtttctttttatgtttcatgttatttttgtagtctttctaagactctggaagagtctctactaaataaccaaccacaaaaggttcgggtaattgaatgtcttcaataactaagtcattaatcaacaagtggtagtcatggatttgatatgatatatctctatcctcagtcatttggaaatttctaaaattccctatgacatatttctaagtttctgcatcttccaaaatatattttttattcattgcatcccaaatttcttttgcaactttaaattgacaataaatatcaaaaagttcattagaaagggtactcagaatagcatgcctaacttgtttatttccagtttcctaggttggtaacagatgagaaatatcttctaattttgggtcaatcaaaatgtgtcctaagttcactacatcaattgcagagaaaactctttcctgtcatttcttaaagaatgtcccattgaagggatcaattttagagatgttaggacgggtgtgaacttgagaaacttccattttgatatatttcaagattgttggtattaagggtatgaaaataaatgactagcccaaaagacacaaacaaataacagaattaataaggcgtgacaaacactgtcattgcactttgtaagtgaaatgtgtataacttgggttttgaaaaaattcctatagatagatgtatgaaaatacttttaaaaaaaatagtattcatatttagagagtgaggggtgacctacttttatagggcactaacacaatctcaatgtgactctacttgtaattaaaatatgactcaaaatggaagatgattctacttataaaatgaatgagactccactagaacaatcccaatagaactatttccaaagacataagactaatagaacaaaataaaataaaaataattcccaaggattcttcccaaaaatataagactaatagaataacataaaataaaaaaattatttacactcttcctatatgtctaaataattttttttcctttttaactttaacaactttttatttatctcgtgcatggatattcgaaacaccccatgattaaacatacatgataaatatgaacttaaaataagaagtatataaacttataataatttttttttaaaatttctatgagatattctttaatgaaaaaagtataattataaaataaaattcttaatagtagatggatttcaaaattataataactcacattttagctttgatgtacgttctcttataatttatttatttgttcttaatgaaaggaacaaaacctttggggtggagaactaaggtgaatcaaaataaatttaaaaattttaatatttgattttatttatttattcacatattcaaaaactttctaaaatatattttaggggagaattgaggtttgtttaataattgttttcgaaaacagtttttgaaaataatttttgaaattgttataaaaaaaatcatatttttttgttcttaaaaataataataataaaaaaatagttttttattattaaacatgtttttatgattttttttaataaaaattattctcaaaaaccggtgttaaaccagctattgttttctctttttctgttttcacaactgtgatgatgaagagcatattaggagatgaatgcaagtaaatttgtaaaatatgttttactagaaataacggtaaatatatttagaaaaataaattataaaaaatatttaaacctaggccagaaggaaactccaggaggaaagtggtcagctggatttacgcagtttgtgtgtccagcggtgcatcactctgctggtcacttccacgtggatcaatgccattggttgttcacactctcaaatcaatgctgccgtctctctaatggcccttttcgttttctcattgaccacgtcactatgtacggttactaccttttcgtgtctaagaagcaccacggcctcgcgtacacgaaccccagttactcgccaccggtagctcatgcaactcacagtccagtggtcacagtcctgcgccattcacgtgccattctcccagagcgagttcagaggctacccatactcgagcgagtggtcacggatttccacaatggcgcgacacgactcaaaagccgaatggcatttccgacatttcacagcattccagggtcaatttcaaaacccataaaaggaaaagctgaataaaagcttttctgtcaaaaatagctctttggcaaacttacttcgaatctcatccgtccacgtcatcaagttctcaatctccaccgtccattttctgtttccggatcacgaaaccatgacccaaatttattagtcatagggccgcaaccagagaagcgaaatctccaccacagatttctaatcagacggcccagatcatcctcagtagtttcacattattttcatttcattatttatttatttttatttttattttttgttttacaatctaaacccttctcgctctcgtgaaaccaaagaaaccctagcattctctctcatctctttctctctctattttttttttaaaaataaaaaataaaaaattattcaaaaatcgacttagggtttcggttcccaatctcagattcgaaccctaat

SEQ ID NO: 10416 - DNA, 11821 bp, Vitis vinifera
  Intron number 1 from transcript GSVIVT01003696001 (locus G SVIVG01003696001) derived from phytozome v7.0 (chr-ID chrU n; pos 12297133 to 12308953)
ccaagagaggtggtgtcaccgtactgttccagatacgcctgttaacgtgcttcccattgagtttcattttttctcttctttgccgaccatgtttggtttgatttgattttttcataacctatgtagctgctaagaaaactacattaatactttcaaaatttgagtgtaattgtttctattttcatatgtggataactcgaatttaaggtctatgcgtagttctgagaattactaaaggtaggttttgtagaattctggaaattgagcaggcgcttattctttactcagaattttctgttgaaaatcaatccaataaaagacattataaaaaatggctgccatgtctcagaaatgaaggtaactaattcaaatagtgttgaattttatgtgaacttataagaagagctttggtgaattttgaaaataagttgatattattagaatgtggttgttgaaaattatcattacataggatgacaaaaaaaatccattggggcgtggggaagggagtgattcccattatatatgtaaaattatttatttatatatatatttatttattttaaaaagatgaatgtaaaattgtgaaataaaaaaaaaaaaaaaacctaatagagaattccctaacgggaattctccgtccttgtcctgcctagtctaagatggtaaataaggctgggatggggagtaaatttacaagcaggagagggatgagggtgtcttccctgacctgtttacatacctatccttgaacaagggctacaatactgaacaggcagacatgaataaaaatacatagttacaaatttatacaaaagaatttgactattcttagaaactaaaactttatcaattcctacaaattagggatttaattatcaattcctacaagtcaaagatttaaacttttataactaaacacagtggggcaacaaatatactcccagatttttgtagcaaatgttctccattcctagcttgcctagaatagtgtgaaacgaaggattaaccaatccttggttcaagatattgaccaactgtctgtttgttgagacatatagtatgcatatcaatccattttccaacttctcctttacaaaatgtctatcgacttcaagatgtttagttcgattatattgaaccagattatgtacaatattaatggtagacttgttacagtggagtttcattgatccatgccacccaatttttagaccctcaaggataattttcaatgactacaattcacaaataccatgagctatagctctaaaatctacatttgcacttgatcccgtcaccacaatttgttttttagcttctctaagtcactaagtttcctcctagtagtatgcaataccttgaggttgatctttaatcaacaactaggccaacccaattgttgtcagtataggtttccaaacttagctccttattcttcttataaagtattcctttccctgcagtggacttgagatattgcaagatccgattaattgctcaaagatcagattcctttggttggtgcataaaatggttgactacaccacttgcaaattcttcctaaatctttaatttcaaattcttctactagttttcttttgagcaagtctcttttttctttatcatctcacatcataattatatcatccacatacacaattagagagcagtaactccccttgtgtctaaatgtttgataaacaaagtatggtctccctggctatacttttacttcatcgcccttagagactgcttgagtctatacaatgctttcttcaactagcaaatattgttcctgtgaaaagattcatcaaaacctggtggaggttccgtataagcctcttcctctaaggctccatgtaagaaaacatttttaacattgaactggtgtaaataccaatcaaagttagctgctaaggacaacaatactctcacaatattcattttttccattaagactcttatcttctccattgatcacaacggccactctcggaaaactacacctgtgataatagcgatgttttttgaagtggagagaaagactttccagataaagtttgaaggctccaatgggggaacttggatctcaataacaaagagaagtcgaggctttgttgtttcgataggttttggagaggaggagctggattggttgttggagcatttgaagaaagctgtggagttggaggcttccaggggttttattcgaaagattaagggcaagactaggactcatttgatggagatttgtttcaatagaagagggagatttatgaaaattatagaaattgttacaaagaggaaacctctagttctagttgttcttgagggtgttaaaggcaatgggtgggaagcccttaggaagactatttcttcagtgcaagacttgtctgatcaagctgttagagcctcgaaggagatgattaaagattctcaggtgagtaagggcatttacaaaggaggtcggtcctatccagatgtggttgtagaggaaggacctaggaatgaagctccgctgccagttggaaaatgggccagagctgtaatttgtgaaagtaaaggaaaagtactagattggttttatgtaggaaaagctattgcgaggatgatgggtacgaaaggaatggtgtctgtaacccctatttttgcttacaaggggtgctttttcatggattctgcaaggagagctgattggtttcaagatcaggggagtttaacagtgagaggagggcctattgttctgaggagatggtcgccaagagaaaatactgttgtattcggaaaatttagaaggggttagttagaactaagaggacttccttttcatttgtgggacgaggtttagctgagatacattctgcagaagtaggggaaggtaacgaaggtggcacgggaatctctgaaggttgtagacttgtcaaaggtaaagttgtgggtggagatgcttccaaatgtcgtgctacctgtgctgctagaggtggaagatggggcctagtcatttacggttgtagtttcaatcatcggagaagtggaaggagacaaccttctcaggcccgagtcaacttgcagcaaggactagttgatgtcagcgggaggttgcatctcttaaaggccaaagaacgctgtgggactatgtgttactactagggacaatgagtgctacagctggaggccttgtcattgttcctgttctcgttcttcggtttcaaatttggcttccaaagcggaaaaaggaaggggagggagtctcttgggcccagcggtgggaagcgttatcgggccaacaaagccagatgtattttttaaagcccgatctgttagggcccagtttggggtgaagagttttgggcctcttgctggtccagtccatgaaacagaagcaggatcctctaatggcgccttgtagtgccttcatcctcaaagctccagtgctcaggatcctccgcaaaggaggtaacgtcgattgttcactctcaagagtcgtcaaagttaaaaggcccctcagtctctgcaaggcgcaaagcgagaagctagcctccgagcctaaagatgttgccttttgcaccaaaacataaccttgatgggggtggctcagcggaagcaaatctagccattttccggggtggttcagtctccaataagggcgttttttctcctattccagaaacgtcccaagttttcattggggaaacagagggagacgaagggatttcgtgttgcaatttggtaaacaaggtgtgtcctcctttctcagcttcctttgagcaggtccatcctttggctagggcttttgctccaaaatctcttcccgtctcctctgtttctactgttcatcattttcggtgtcagccttttttcttcgattccgctggtgtcaactttgcttctcaaggtgttcccttttcgaattctcctggtgttgagcttagtcatcgtgttggcatgcccttttctgaaggtatggagtttcccgtagaagcctctaactgaaattttaaagactgtcatttccttagggaatcacttagtagcccagaggagctttgcgtctcaggcaaggcttcgtccccagagccagaacatcccgctctcccgttggaaggttttcaaattgagggcctcacgcttaggaaaatggtcaatgttcagtcggttttggagagtttgaggattagaattttcagagataagggaaaagttccggaagtagagagcaaaagtactctttctgtggacaaggtctatttcagaaggaagaggaaaaatgattgtggaaccaaggggagaggcttaggtttggttgcggtttgtgctggggttttttgtttacatgaatatctttaagttagaatataagaggattaggttccaagaagaaaatgaggaatgccagaaggtttttaagttctcaaaatccaaatgttgtgatgcttcaagacacaaagagagaaatttgggataagaggtttgtgagtagtgtttggaaaggtagaagcatggagtgtgctgctcttcctacttgcggggcttcaggggggattgtgattatgtgggattcaaataagttcaagtgcacagagaaggtgttaagatctttctctgtaactgtgaagttgaactctagtgaggaagagtctttttggttaacttcattttatggcccgaataagcctttgtggaggaaggacttttggttggagcttcaagacctgtacggtctgactttcccaatgtggtgtgtaggaggggattttcatgtaatcaggaggatctctgagaaactgggtgattctaggttaacattcaacataaggtgttttgacaagtttataagggagagtggtttgttggatccccctctaagaaatgcggattttacttggtcaaacatgtaggttgttcctatttgcaagaggttacttcaagaggcgcttcctagatggacctcagatcataacccaatttgtttggaaactaatcctttaaaatggggtccgactcccttcaggtttgagaatatgtggttgctccatcatgagtttaaggagaagtttagtgattggtggcaagagtgtacggttgaaggttgggaaggtcacaagttcatgaggaaattaaagtttgttaaatcaaagttgaaagattggaataaagtggcctttggagatttaagagagaagaaaaaactcattctttcggatttaggtaggattgatctaattgaacaagaagggaatttgaatcttgatttggtatcagagaggaccttaagaagaagggagctagaggatttgttattaaaggaagaggttcattggagacaaaaatctagggtcaagtggattaaagaaggggattgcaattctaagttctttcatagaatgactaatggtaggcgaaataggaagttcattaagtctctgatctctgagaggaaggtgactttaagcaacattaaggttatctctgaggagattgtaaatttctctggggaaactctattccaaacccaaaggtgcttcttggaggattgaaggagtagattgggttcctattcttggagagagtgcagttttgctggacagacctttttctgaagaggaggtacaaatggcagttttccaattgaataaggaaaaggcccctggttctgatggttttactattgcagtatatcaagagtgttgggatgtgatcaaagaggatcttatgagggtgtttcttgagttccacaccaatgggataataaatcaaagtacaaatgcgaccttcattgctatgatgcctaagaaaagccaaatttttaaaatctcagattttggacctattagcttggttacaagtttatataagataattgctaaggtcttatcagggcgtttacgcaaagtcctccatgaaacaatttatggctctcaaggagcctttgttgaagagagacacattttggatgctgtgttgatagccaatgaagtggtggatgagaaaagaaggttaggggaggaaggggttgtcttcaaaattgattttgagtaaggcctatgatcatgtggattggggctttttagatcatgtactagaaaggaaggggttcagcccgaaatggagatcttggataagaggatgcttgtcttcatcaagttttgcaatcctagttaatgggaatgcaaagggttgggttaaggcctctagaggtttgagacaaggagaccccctttctcttttcctttttactttaatagcagatgttctaagtaggttgatgatcagagcagagaaatctggactaactgagggtttctttgtagggagggataagactagagtgtttttgctacagtttgcagatgacaccatctttttctctaaagcctctctggaacatcttcaaaacctcaagattatccttttggtgtttgggcaagtatcaggtttaaaaatcaacttagaaaaaaacaccatttcaagtattaatactaggcaagagttgttgtctagtttggcctcagttttttattgcagagtgttagagtgacctttgtcttatttaggccttcctttgagagggaactcaaagacaataggcttttgggatccggtggttgagagaattttgaggaggttggatggttggaaaaatgcctttttgtctctgggagggagaattactttaattcagtcaagtctgtctcacatccctagctacttcctctctctcttcaaaatcccagtatcaatagcctcaaagattgagaagctgcaaaaggattttctttggtcgagggcgggggaagggaagaaagatcatcttatcagatgagattttgttagtagaccaaaggagttgggaggtttgggttttgggaagacttctttgagaaatattgctctcttagggaaatgactttggaggtttcctagagaaaggaatggtctttggaataaggttattacgagtatttatgggacacatcctaatggatgggacgccaacatggtggttagatggtcacacatatgtccttggaaggctattgcttaagtttttcaggatttttccctttttgtccgcctagtggtggggaatggggagagaattcatttttgggaagatctttggtgggataaccaaactttgtgctctcaatttgctggtctttatagagttatttctgtgaaaaacctcactgtttcaaatgtccttggcaattcatttccattgtcttggaattttaattttcgccgcaatcttactgatttagaaattgatctccttcaaagattaatgtcctcccttagttcagtgcttttctctccttctttggcaaattcaagagcatggtctttgtcatcatcagacttgttttcaatgaaatcttttttcttggccttgtcaagagtctcaaatcctatcttgttcattccagccaagtttttgtggagttcaaaagccccctcaaaggttaaggccctcgcttggttagtagcacatgggaaggtaaacaccaatgacaagttgcaattgagaagaccctacaaatccctctatcctcaatggtgcattctttgcaaaggaaatggagaatcaatcgaccacctttttcttcattgtcctattaccattggactctagcacaagttgttcaatctagcagggttggcttgggaccctccaaggagtattgaggacatgctggttattgcttttaaaggcttggggaactcattaagaggcaagacactttggcaaatcgcttgccttactttgttatgaatggtgtggtaagagagaaacaataggatctttgaggataaggggagaacggaagagatgttatggggtttgattttgttctattcctctctttgggccttttgtactgcaacttttagaggagttcctttaagtgttttacaactcaactggactgcggtttgcggttcaaaagtttgagagtgttggagtttttctttgtttgtagttttctttagttgggtgttttctctgttgttcagtttttgtttttgtgggaaggacctctcatccttctcttggtttcttctctttctcttgtatcttttcttctattaatatatttttcttcgtttcttatcaaaaaagaaaaaaaaatattcattttttccattggagtgaatgtttctcagcaccttaagtttgagtatagacctttgcaattagcctagctttatatctttctagggacccatcaaatttgtagttgagtgtgaatacccatctagatctcacaagttttttcctttggggaattcaactatttctcatgtttgatttttttttttcttctcctgtacccccatctcctccctaatagacttttttcaattctcattgcctagtgtcttggagtgtttggggttattcaatggaatttaattgggctaagaaggttctatattttggagacaaatttctaaaggacaaaaagtcacaaagtgagacataggatattgagtacaccttctaattccttttctaatggcaatgggttggtcaagatcatcaacaagagaagaagaatcagagagagaagactcagtacctgtttgcggttcagtttgttggacttgcacaggttcgggaacagatggtctcctcctggaataaacctgaaaaggtgtgacagcaatgagaccagaatcaatggagttaggtgaagatgtagctcctagattttctatgatatgagcaggaatacaggttgaaatattttctgcagaattttggaacttggaagaagtttcagttttggattgagcaatgtcaggtgtttttgttggcaaatccaacaaaagcagatctggataacccttgtcttctattaatgtctcccctagaaggtaagactgagtaaagaaaggttgattttctgcgaaaatcacatccatagaaacaaaaaaaaaaaaattagaatagagatgataacatttatatcctttcttagtaagatcaatggataatgccttctctttgtaagaaaggggttaaaaattgattgaagtagtacctagcattatttgaacaaatgctcttaatactcactccaaactgatttttatgccttgtttggtttgacttctttcttaaaagccaaaagctctttttttaagttcaataagagcttctatgtttgtttgactaattttgtttgaagagtttatgggttaaagtaaattttagagcaattttttatgctttattatatttcatgaatccgtcccagttgcaggagatcaaagtttaaccaaggctgacatttacaagcttcattttgaagaaacttcctttaagttgcaaaaagaaatgatattgttgtaaattaatgtatagcagtaacataggaacttgaagagaagtagaggattacatatatatttgagttagtggggtctgggagccatgttgtattgtttggtgtaccttggtttttacctcactctaaaggtgctttggctagttggaatggcagtcttgttggcaaggtactgagcagaagctgggtatgggaaatggaccccttgtgcttgttttggtgtctctagacagacaggaattgaaagtttagatggtttggaccgttttgttgcgatgctgaatgatatgtttcttaaatctctctatgcatggtggaggggttcttgggtattaagagtgtttttctttttttggattttatggatatcctgaacctgggttaaggctagtttttctgtgttgtaatttgttttctttgttattttgtttttcagtatctttctcagcatctttctatatgtcctatgtactagagttgccgccccccattttatgtgtgtatatttgtgtctgtgtgtccatatcttccattttgccttaaaaaatgcaaaagttgtagagaatttaataattcaattcttggtaggtttgccatttttcagtggtaaaactccattagttctcttttagatgagacccttggaaggttttagtaagatcacgacttttattttctctttcttcatctttcacttctcttaattttaatatttgcattgatgcacacaatttttacaaataatcagccattccttatattttatactaaatttttggccatgatcatatattctaaactttcctttttatgctatcttggcattgaaaagattgaatgttcctagcttgccagaatttattcctaaaatttccctttaataacttgataaaacaataacttttaaatccttatttgattcataaagccctaatttctccttcctcctgataagtcttaaaaatcaaaccccaaaccatctgttatttgattatagacagttgcctttatttggtgggcaaaattttcagagggatgcaacatcagaactttctaggaggttgctcctgtcacaactcttgcacaagtattcttgacttcagttttgatgggtttcaatgaattagtcttaatgggaataaggtggtgtgggggcaatctgttgtgtgtgttgttttcttctttatttgctttagctctttctaaggatgcatgggtggaggatgtttggaatttttcagcttaagggcagagggggttggaatccttgtttctctaaacctttttataattgggacatagattgcatggagagatttttggcttgtttgcatggttaaagagcatgtagggatgtggaagacacattgctttggttaatgtcaaagaatggtaagtttatagttaagtccctttacaatgttttggaacccaacattggcgggtattttccaatgagtggcatttagctttcttgggtccaacctagagttaggttttttgtgtgggaggtggtgtggggggtaaagttctttgaatcaaatttagagatgagattggtatttaacaaataggtgttacttgtgccttgaatatgaagaatttatagatcatttgtttctccattgtaaaaagataagggctttatgggagctgcttttgtgttttatagggtgtcttgggtgttatctttattggttagagatactctattgggatgacaggtcttttgtgggcaaaaaacgcaagaaggtttggcgagcaagccttttgtgtttattttggatggtttggaagacaagaaacaacattgcgtttgataatgaggttttttctgttcaaaagctgaaataggattttgtttactttctgtggtcagaatctaagttgtttatagatgtttgtctccttgactttagtaagttttttttgaaatgttgggtacttgctgaggttcttcctctattttctcttgtttgagccttagtggtgaagggaggtttgtctcttgtataccttgggtcactcttttggcggctctttttaatttaatttaagtctttatttatatataaaaaaaaaggtgcaatattataggctatccactgatcaaaatattataggctatcctacagtgctgcaactttcttatcatttttgcagcatgagattagatatagctggatgaattgactgattcattttgattctccaagtctgcttttattgataattttgttttcttaatccttgtgagatatgttctgttgctctctctctctctctcttccttgcaagaaatgtcctgttatttttctgtacatttttttcttgatctttattgcactaagaatatcaaatatgttatcagtttttgacctgcattcatcttatacatgtgtacatttgtcatacttttgcaaacaggtcattccttttacaaggggaagtgcattggacca

SEQ ID NO: 10417 - DNA, 4930 bp, Vitis vinifera
  Intron number 3 from transcript GSVIVT01012255001 (locus G SVIVG01012255001) derived from phytozome v7.0 (chr-ID chr1 ; pos 101652 to 106581 reverse strand)
gtgcagaaggagctggaactgagagtatgtatgaacttcctacttttgtgcatgatattgaatttcccttagtagattgtactgcagtggtctaattcatttgtggtattgaaataggttctagtctcctatgaaaaaaaggattttagtggtagcttttggatttaaagacatgtataaaattatgggaatgctatataggatgataaaccacgattgctaaccattattaggtttacctgttgtctttggagtcctcgtacctgttgtctgttccctgactggaatagagaaaataatccgaggagctgaagctgcctttgattggcactgaaaacttccataggagttgttactttctctctcttttaattttttggcaatacttctgctgaactatgtgatcaatctcctccagttctgtaagctattagtgtcttgggatgttcgtctttgggaaggttatctgttcttccatattatcggtcctataacttttgaaacccatgatttgaaacttttgatgagcaatctctctgaatgccattggcttgttggctttttcatttgatgattgaatctggttggttgttcatcatcattagaaggaaaaaagaaggcaccccaaataaagtctttcttctcttgcatgaaaatgctttttgttgatatatattgtcaattaagaaaaagttctcaagcatgattttttaatagaaatttggggaaaaaaaatgtttatgatgctgctactgtgatacactaataaaatattggctatttataacagcaaggcacggttgaggatgaattccacttaatgttgaatttgatataaaagagggtggctgaagtccactgttaatttaccttttttgtttttatcattgtttttaatgaactgatgaaggtaatgtatttatgcatctatttgtacatgcatatattgataataatctattttggtttttgagatattttgtacatgcttttattagtatttcttcctggacagtggaggagtatactcttactttgattagggtttgcactttgtgggagggacctctcatccttctcttcaactttattattatcaatatatattttgtttctgattaaaaaaaaatgtattatgcacctattcacaagatgtttattctttcaagtttcagcaaccccttgagcaatagcaatattgcttcagaaatcatccgcaaccttcccatgacctttatgtcttaggaagtaattgaagcttttcccttatcattattcttagtataatgaagagaattgattttaagtcttaatatattagtaattcgtcacctctcttaattgggtgttcaaatgcggaactcattatgtaatttaggaggtttccatatgcaattgtcatgttcctttttgagaaaaacagatgattaagtgtgtctgtattagatgtattaggatattatttaatttacactaaaccagcagaaatattttgagtttcagtgattattgccactgaattctgaaggtagctgtctttttcttcctccagttttcagcttaacccgaaacctatttgggggtttgtttgctctaacacactcaattatacaaattaggccttaattgtcttcatctccaatcccttccttgctcttctcaatatctactttcttcttataatatggacctaatgtgttaggttggtttgaaggtcagcattatgtttcctggtgtattatatagtttctgcctttctggattttttgcctatttttttttatttatttttattttttatgtgcctttatgttggattgcaagttttttttaacataaatgaattcttgcaaacatcctaacatgggactctctagaccacctgattttaaatttttttaacagcaaaaatgcccataaatacaaagccaaatatgctcttatcttccatttatacccacttcttttcattcatcttatcctttctccttatgcaaattgctcacaatcctaacaaaatctaaagaaaattgttcttttggagcaatggacaaacaaatcaatgtctatatcaaagtttgttgcctaagtccacttctaatcatgctcctattttactatatggaggagggatcaagggtggaaaaactcccttttgttttgaaaatatgtggctgaaagtggtaggttgcaaagacctggttaggaattcgtggatgggctataattttagtggctcgtgtagtcacatcattgctagcaagctaaaggctctgaaggaggatctcaaagtttggaatagagaggtgattgcagaatgtcaccaagaataaaagagttgtccttaatcagattggttttttggatgccaaagaaagagattctagtctctctcgaggacattaaggctagaagaaaggcagtggaagattgtaagtgggcaagaatggcagggacttcttggaggcaaaaatcaaaaggattatagttgaaagaaggagaaaaaagctcaaacttcttccacgaaatggctaatgcccaaagaagaaggaatttattgtcttctatcaaaaatgaatggaagaagattaattgagaagttgagataaaggagggtatggttaatgccctttagagcatcttgttaaagcaaggggattggagacgtagtattagcacattgtctttttctgatttggatagtgaagagtcaaggtcctttgaggaacctttttatgaggaaaaagttttttcagccctctctagtttgtgtggggataaagctcttggttcagaagggttcacaatggctttttggcaattttattcggacattatcaagaatgaagtaatgagcttcttcacgaagtttcatgactcttcactttgagagaactaattggcgattctttcccttctttgtatgccttagcggcttcaaaagaggcgtaggtagcagagttttgggactctacaggtgaggagggaggttggaatcctcgattctctaggcctttcaataattgggaggtggtggagaggttccttttgacaatataaggaaaaaggctacttactaatatggaagataggatgctatggaaagagactaaggacgggaaattttctgttaagtccctttatagtgctcttaagcttaaaactgcagtaccatttatgaggagcatcatttggagcccttatgttcctactaaggtgggcatttttgcatgggaagcttcatgggataaggttttaaccttggatcaactaaaaaggaggaggtggtccatagccaacaaatgtttcctttgttatgttgaagaaagtctattaatcatattctaatccattgcactaaggctagggttttgtgggagttattattttctctttttggtgtgatgtgggtcctccctttgtcgtttaaagagatccttcttggttggcatggttcctttgtgggtaagaagtgtagaaatgtttggatgacgactcccttatgccttttttggtcggtttgggatgacaaaaacaggattgcttttgaaaatgaggagctttcgattcaaaagataaattcttttgtatgtaatttttggtttttgactaagttgtttatagatgaaggacttttacctttaataaacttttttgattggttgggttttagacgagggctagtgagattttttgtatcccctctttttttttgttcttaccttttgacgcctcttgtatattccctgtatgctgtggattggcctttggggacccttttctcttttttttatatataaaatttttctgtgtgtttacctatcaaaaaaaaaaaaaaaaaaaggttagcatagaagcacaagagattttggtttgagttaatgccgaaagcatatattttggatttcaaagaataagaaaattagtcaatacctttataattagccaattagtaaccttagaatttgaatacttggagtttcaaaaggatgaatgaagcttggattggggaggttaagatgattaagagaataacccatacaagcagaagtttatgtgctaacatttgagtaaatatgaattggtatgacaatatcaagtgaacaaataacttaatcttaaatctgagctgtccaatatttgttaaaattatgagagatagcaagaaaagcaggataggcatcaagatgatgatttgccaacttgcatacatgattactaacctgagcttcaaatgattgcatggttgggggtgaaatatggagaaatccaagtttgggcatgatttcacaggtctcatctggctgcttgggccaggttttggtctgcttgaggctgggtcagtgggtcttagacccaggttctaggggtgaagctaggctttaggttggcttccctcctagtcatagtcatgaagttaaggatgtcctttgccctcatggacgctttagattagctcatcagcccaaatgtggatgtttcactttcttgcccacattttgttcagtatggattctatagaatctgccatattttccatcttttcttcctttatgtgattaaactaatgtatcatcaggcctataaaaaaaagctaatgtatcatcaggttttacatattagtttatttatctgggtgattaaaggctgttctactgaatctctgctgttaaggtgttctcatgtatgatttcctgtgatctgcacaactaatgaacagctgtcaattagtgaagctgtaccttgtcagttaacaagctactattttgcaatttctctctctatttggtttcttgatagttgttaatgcagcttggtgtttgattcttgtttcttttgggacctttctgatatcaacattcacagacttacagtgtttttctttttatctacagaaaagccaacgttgttgaaacaggttaacgcccat

SEQ ID NO: 10418 - DNA, 12299 bp, Vitis vinifera
  Intron number 2 from transcript GSVIVT01012933001 (locus G SVIVG01012933001) derived from phytozome v7.0 (chr-ID chr1 7; pos 13773220 to 13785518)
tttgtatcattacagatataaatttgtcattttcagtacgtatataatttatagagtacttatagttatgaggaagtaatttgaaaaaaaatatatatatcttgcgaaattattaaaaccatctcaatatttttttactggtatctcaatttatccttaattttttttcgttttggtaaaattaacctctcataatttatcttgaaataatttaacaaatagtggcattattttttttgacctttaatttgcactcactgcactactttcaaaaaatattcttcctacatgcccttgtaaaacctttgtccctctcacaagcgtcatttcaaaattgccctcttcactcgtatgaacttatccactttcctaaatttaccaaaaatataataatttttaaattttcattaaaaatatttccagtttcaaacaattattaataatgaatttcttttgttaaaagtgagttattgttataaaatatatatgataacttgttacattgtcaaaatttgtgaataatcatttatattaatgtaaatctctttgtgactttcgaggagacatttaataatgaaatatgcatttaacttctttctttaacaatctattttatccttctctttccactttattttctacaacacattatcaatacaagcataccacaggagcacaagactatagcaaagtccaaaatctcatatattttcaatgattccacaagataagatggattaatccccctaacttgactaattgcataacacatcatgaagatgtatgtcttgctgactgtgcaacaacacatacaattcttggagataaaaaatatttctcgaacttagcatttgcattagtcaatgttaacacaatatcaagttcggtaaacctaattcaaggctatgaaagagtcattattacttgttgaaacaaaatttaatattgaatatgcgttatattctaccaaataatcccaaaggaatttgtttagttttaaaaatattcaccgaaatagatatcatattaaaagtactatgaataaaggtaatatagaatatctctacattactttagttactttggacaaaagcatctattagagaaactctctgccttttcttgtaggttgtatcacacaaccatttaatccattgaagcatatattataatgaaccaaaggttctatgacccaaatacctctatgctttggcatgaacgacttagtcacctaggttcatatatgatgtgcatcatatcaccaataattctcatgagcaccctttaaagaaccacaagattcttttgtccaagaattaatatagttgtgatatttttttacaaggtaaaatgattattaatgttaatgttaccaaagtgttgtctcagaatctccaaccttttaaaaaagaattcatggggatatacataccctcgtactattttggtattttatggtctcaataaatacctctactaaatggtcacattttgccttctttctactcacaatgtcaccttacttgctcaaataattcgtttaagaacacaatttctagattatcctattaagaaaattcatcttgataatactaatgaattttcatctcaatcattaattgaccattatatgtcaattggtattaacattaaacatcttatttctcatatccatacccaaaatggtttagttgaatcccttatcaaaagacttgaattgattccttgaccattatttcttacaaccagggtttaaaaaatcataattttttttctccaaaatttggtgaaaaataacccaaaaatcaacgatttcagcaatatttcaatgaattcctgataatcgattgagactagagagcacgaatggatggggaatgacattgtaaaaaatttgacgatttttttggtaatttttttcacaaatcccttttaaaaaaacattatctataatctttaattaaatttcccaatttatcttttattttaaatttatatcacccttttattttatattgtccttttattttattatttttcacatttatctcattaatcctattttttaaaattactatcacttcactttaatttttttttatatttatccttctaattttatttaattttaaatgtttttattttaaaatattaaaaatataaatttattaaaaaattggcaaaaaataaaaaaattaataaagttctaaaatttctataaattaaaaataatttgataaaataaattattaataatttttttaataattttaattatttaaataaattaatgctaatagaaaaaatttatcacaacaaatttgtaacaaaattttagaagttaaatctcaaataaatatttttttgtaaatgaaattattatttttttttaaatataataaaacatgttttaataaaaatagttttaaaattttaaaataaatgaatataaatatattaaaagaaattaagttaatattttctttaaaaatttgataaacattatctttgatagtacctatgtcaattacacttacaaaataactttaatatatgtattcttgtttattttatcattttttttaaagttttttctaagcattttcatgaatatttaataattttcatcccaccaatatttttgtaaaaatatccactgatattttatcgatatttttgtaaaagtcaaataccgatatatttgtatttatcaatatttcaaaccttgcttagaactaaactacctttttttttatttgtggtcatgctacctttcactcatcacaatctttcacctttataacttgtacttaataataaaatgtttctcacttacaattttttaatggagctatccatgtccctgttactctttctcagatgattaagatggatccccaaagacattttggcatttatgctaattttgatttcgaatatttgaaaactcaaataagtgaagtttttatgacatattttatctattaccattttgatgagacaattttctcatcatgaaagttatttgcaacagaacaacatgaaaataattagggaaacttgtgctttggagttgctatttgggaattatatggttttcggaacccaacaatgggaaaaatgagaattagcttttaatatgaaaagtattatcgtttttgtgcactctgagctggctccatcttctgtgcccaaattgacactccatttctccatctcagcatccttagcatcatcccaaccttcatgtcactatgaccattgaaattaagaaaaaaacactaaattctgaatctttaacttctcaaaaaaaaaaaacacccgacccaatgacccaatctaaatgttttcctctctcatttggaaactttctctcatctttcttcattctcgacaacacaatacttctctcatttcagttcaaaaaccaaaatccaaaactctaaggcggcgttaaaacacaccttttggcgtgcctttggttaagacacctcaattgggcgcttaccttaagccctagtcgcatttgactctcgtctaggagccatgggagtctaagagaattcggtaaaaatgaaatggagctcaggtggagagagtaggtacccaaaaaccaaaaccctatcctccaaatgcgtcctagactcgcaaatccatgtccaagtagctctatcaacaagaaatggcaccaaacatctctcttagaccattgaatcgatgaagcccttgaagaactagaggaaacagtgcagaaaatgaagtgtgggagactcctaaagtattgggtcccgacaaactggtcgactggtcctcgaccgatacttaattagggagaaaacgatattggaaaacaaagaatgtttgttcccctttggtattttggtgactgtacgttaggtactaccttaataacccttaggcactaccttaatctactttaggtactacattaatcaaccttaggtactaccttagttaaatttgtgtactacttgtgtgaagggtcaaaacttcatttgtggatattacttacttcatttgtgacccttagagcatgccattttgtgattaattagtgtggtcaattggttcacctatgttattttgatgattgtaccttaggtactaccttaatagcccttaggtactacgttaatctactttaggtactactttaaccgaccttaagtactatcttagttaaacttgcgtactacctatgtgaaggctcgaaacttcatttgtggatattacttacttcatttgtgacccttagagcatgtcattatgtgattaattagtgtggtcaattggttcacctttggtattttggtgactaccttaggtactaccttaatctaccttagatactatcttaaccaaccttaggtactatcttagttaaacttgacataagaactattattatcctaaaatgtgctatacatgtgtgaattatatacgttttgtactatcttttacaatagtaattcataatagcaactatggcaactacaatgctagctatttaccccatttgctcaaatttgacatccttcaacctgagttatgctttagagactcatggaactgacctaataaagctaatccgccactacaaaaaacttcaacgattgtgggtactaacttttagcctaactatcatctctaaaaatcaatattcttcctttattgggatgtatgacaagttcctatgatttatgcaaatattggattgcattggagacaagggactaggagttgtagcttctacttctgtggactttgtagatgcattctaaccttcaaatttttattgttttctagtagttgtactttgtttaggtgaattgattattctatttttagttaatgcaaatttagggatatgttgtttaatttaccaaagatctcttgtttgtaattctcattatcatatatagatcttggttaagatttgcctatttcctcagcaataataatatcagttaccaatggaatgaatcttgtgtgacctgtaacatcatttttgtgtaaccttataaataatacttttgagaccaagaaaaattattattttaatagggttattgatttattgataaatgaatatttattaatttataaaaagtattatatttttattttataatatttatacatatgtatgacttataaataaggtattctaattacaataataataataaaaaattagatacctcaaagataggtagactcatcaatggaccctctatcctcttattttccatctaatttttcatgtccgtcatagaataataagatggctaattattcattattttttcaatccaattgctcttttgattttggaaaaaaaaattatctttatcaatattaatttgaccagaatgaagacaaatttacctaagcatagcattatgaccaaaatataaaaataataatagaaataaaaaccctcgtatgatttgaagcatctagttacccattattaaaacccatgaagtctaggtagcaaatgaaggaactaaatcctacaatagagatgatattgatccttcaaatgattcacatacatgaataaattcaggttggtgtaagaggcaatagttatttcatcgtggacacagtttctattatttgcccttctatgctttcatgatttagccacagatgtcattttctcttttctccccactttcagttttagctcattcaactgtctaggagcgagttggtgtcctttttagttttagacataaaactggtcgactcgttacctcttcccagatggggtccgatcgagagatgcaaaacatcttctctctcttccaatagcattaatcacaaaatggcatgctctaaaggtcacaaatgaagtaaataatatccataaatgaagtttcaagccttcacataggtagtacgcaagtttaactacgctaatacctaaggtcggttaaggtagtacctaaagtagattaagatactacctaagggctattaaggtagtacctaaggtacaatcattaaaataccaaggtgaaccaactgaccacactaattaatcacaaaatggcatgctttaggggtcacaaatgaagtaagcaatatacacaaataaagtttcaagccttcacacaggtagtacgcaaatttaacaaaaggtagtacctaaactagattaaggaagtacttaaggtacaatcaccaaaataccaaaggggaacaaacattctctctcttccagtatacttttcttcctggtcaaggaccggtcgaccggttcgttgagacccaatactttatgagtctctcgcacttcattttctacatcgtttcctctggttcttcaaggattttaccgattcaatggttggtgctatttcttgctgatagagctatcctagacacaaatttgtgagtttaggacgcatttggaggttagggttttgatttttaggtacctactctctttacccgagctccatttcatttttttcggattctcctagactctcatggctcctagatgagagttatttgtggctagggctcagggcaagtgcccaactgaggtgtctcaaccaaaggcatgccgaaagtcgcgttttgatgttgccttggagttttggatttgggtttttgaactgaaatgagagaaattttaggttgtcgggagtgaagaaagatgatataaagcttctaaatgagagagcaaaacatttagattgggtagtcgggtcgagttaagtcctgctaacatagaggttgggattatgctaaggatgctaagttggagaaacggaggggcaatttgggcacagaagatggagccgactcaaagtgcacaaaaacgataatactttttatattaaaagttgattctcatatttcccattgttgggttcccaaaacacaagtttcccaaatagcagctccaaaacacaagtttcccaaataattaaagatagaaaacatccgttgtctaattttgtggtcaaagctattgattgagatatatatattgattcgtccccattgcattcatgccatttgattttggctcagacgagtgttatcaacaaaatttataaaacctaaatcaccttacactagggtagcatagctaacataacatagtggctctaggatcgtccatagggatgggttttcatcgtacaattgacttaagtgaaggagataaaatggtgcttttccttataaaaattagcttttaaagaaaatggaattgtggttgcaaagattgattttaagttaagcaaaaataataagtgaagttaactataaagaaaaggtctcttggagctttaggttactaggatcaggttccttaggcaaatggggagattccggatcttctcctcactttggggacaataacataaaggatagttatctccctaatcggttttgtatttagcaattaagatctgacccaaagggttcatggaaaatggtaattgcttcccactaatggcttcaaacactaaagaccctcaccttgaaccaccttccaatggctcgtaaatgataactaatagacatccatggatctagcaataaacatccatagaatccgaaaagcttaccaagtattagccattcaaggtgatttcaagggatttaaggttaaaccttgaaataaaaaccattgatggttaacaactactgtcatttaaagcaatgacaactcccacctttgcattcaggtccttcacctagcttccatcactccaagaaatgtaaaacctagccactcatcccctgagaaatcatcctcagaggttgtttggctagaaagaagagtgaaaacaaaaatgaaaaggaaaggcagagcaaaagctctgtatatttcttactacgggaaatttacaagtgttttatgaaaaacaactttttctctccctttgtctctctccttatatatgatgttacctaaaaaaatatacaaaaagatataaaataaaatatctaggttggttacaaagagaaaataggaaattacacaaaatatctggagataaaaatctaacggagtcggtgcacaggaagatttcgcataccatgcgaaatttggcatggtgtgcgaaatcctttggctgcctcaagtggtttcacatagtgtgcaaaatttcgtacaaccatgcgaaaatgttggttgttggatttcttcctctggttttcttccttgcatctttgagtggcttgacaaagcgctatgaagtgctccaaagcttggattcttcatgtatttgagctttaacttgcattgccatggatttcaccaaattctccctcattcttagcttgtttcaatgataaaaaagctaccaaaaacaccaaaactgattagtaacccttgctaggttccttaatgtgccaattgagttaaaatgtattaactactactcaaaagtgtttaaaacagttagtttcaagctataaaaagagtacttttcactacaagaaaattgactttcaacaataaaatattttgtcactgaaagtctaaatttcgtctacaaaaacattccccaacaaaaattctttcgtgccttgttcgtcgccctagacccgtcactaaaagttttgtgacaaaaatcttatttcatcgcccaaagttttccttgatgaaataaaattttgtcactgaaggtgttttccaacgaaatatttcatcgacaaaagtaagaatttttgtcacgacaaaaataaaatgtgtcccaaaagtcgtcaatatttaatgccgatgaattttatttttgttgccaaatatttttggtaacaaattaatttcgtcggtaatagcctatcgtctctgttagttgacttggccatgccccaagccttcgccattcacccacagtgttagctcactggtcaaacatgtgactagtgggtcacccatcctaagatatctttggtcgcaacacgcttaaccatcgagtattttatgacaaggcccccatttgttctaaaaaccaattggtgattagaacagggaccttatattatttaagttcactctccatagtccattagggtggtcgttggcccccccataaggccaatactatttatttattaaataaggtatgcaagtcgacatgaatttgacttgaactcaattatactcaacccaaaatcatgaaagtgtgttagattcaagccatattgacaagtcatatcaaattttgtcacctctaaacaaacctaatgttgaatgagaacaaattagagaactatagtttattaatagctagaataaattcaattctagacttatggattaaagtgataaatttgaaatataaaataaaagtacaattgaaagacaatgttaggagaatgccaaagtgtaatactcatattgacattaataaaataatgatcaaaatgaaattaggattctacatcatttttttttctttccctttctcatctattccaaacaaaaatatcaaacataatgaaacactataaatataaatcatataataatttatgatatatttcaattatttttataactatacttattttaaatatttgattaaaaatgcatacaagtataaaaactcctttacaagttagtagccatagaagttactattttgcagtataatttaagattttattcttaataactaatcacttttgataaattagtaattgataattaaaaataataaatatataattgatgaataaaaaataaagtaaccaattattaataaagatgtggttgaaaacttttttaaaaaaaactttaaatttatatagaatttcacatgtgctatatatattagacattttttgttttgtaaatatgaaaatagagctaggcatatagtacttgcaatatattatatcatataatatttaacttatacttatttatttattaataatatatgatatcttcatacacataaataatatttggaattttatgtaggtagaatgttttaatagacactagacaatttatttgagaaatttaattctgaccaattatttaaaaaccaagtaataattaaaaaaaaaatctataaatttaaactaggtaactaaatgttagtataaatttacttcttgagtggataaggtataattttgaatgagaacaaattagaggactataacttattcatagctaacataaatttaatactactttggacttgtatggataacttttacctaatataataaaaatcatttagtagtatttatgtatgtgtagcaccataaaataatattgaaatttaaataaatttatatcataggatgtaatcttacatatcttggattatttattgttattatttatatatatataaaaatataaataacatattgcactataaatattaattgcttaaataatttacatttttgttatttcataacaatactattattacataatagaacatttaaatttaaataaatctacattctagtatttaattttatggatccttaatttttattgttatttatataaataaaatattatagtataaatattaagagtcaacaaatatatattatattatttcatagtataaatcatctacttatttattaatattctttattaatatcacaatttaataacattatttggtgacaaaattactcaatttgtcaggaaaaaatataattacctatgaaaccattttgtaagcaaaaatagataaaaagttgtaatttttagtgaggaaattattttcatcaccaaaaattataattagtgataaatattttcgtagggaaatagtttatttttgtcacaaaagtgtttgtgctaaaaaaaaaagcaccaaattttcccgccacatctttcaacaacaaaaatttcaaattcgttaggaaaagtttgtagaaatttggcattattgacaacatctaaattttcatgggtaaaagttacttttagcgatcaaagtagaattcgcccctaaatttttgtcacaaaaagtacattttcttgtagtgttttgagtagtaatcatatatcaacatatatacttaggcaaaaaggatatatgacgtgtgaggataagttgttttaactttgtaatgaaggacagtttgaatacaaataattcaacttcaaacttctctcctgtattaatttcttcattgatcgaggctacctgatatgattcaactagggttttagataatccatttatatatagaagttaagttaggtaacagtgataaagaatacaatgaaacactacaagtgctcaaactcacaaggattactcaacctacatgatagctctataaatacaatctgtttctgcattcttttctcatcatcataagatatatcttctaaaaggttaacaacaataaagactatatcgttacttttatccttgctgctcattgcccttgctttgaagccttttcctgtggctgctgaagctgctcctgacccagtacttgacatcgagggaaagaagctccggtccgaggttgattgctacatcctgccagtcatccgtaggagaggcggtggtggcctcaccctggccagcactgggaaagagacttgccctcttgatgttgtccaagaacaacatgaggtatcaaacggtctcccattgatgtttataccagtgaaccccaagaaaggcgtgattcgtgtgtctactgatcataacatcgagttctctgctgccacaatctgcatacaatccactgtgtggaagcttgagtatgatgaatcatccggacaacagtttgtcacaactggtggggttgaagggaacccggggcgtggaactttgagcaactggttcaagatcgagaaatatgaagatgacaacaatctggtcttctgtccaacagtgtgtgatttctgtaagcctgtttgtggggacattgtcatttatatccaggatggatacaggcgcctggctctgagtgatgtgcccttcaaggttatgttcaagaaggcttgaagatttgctgatgacaacatcaatactggctagcagtttattatgacatgtgtgctgaatactaattaaccatgtatgcatttaatcaattaaggagtacttttctcctctatatatttgaataatagttgttgcttatattgtcatatataggaagagttaaatcttttcttaacagaaaaatcaatgtccaacttcctctttgcttgcggtttgtatcattgcaaatataaattcattatgtcattttcagtttgtaataaagggccacgagagtatatcaaagga

SEQ ID NO: 10419 - DNA, 4361 bp, Vitis vinifera
  Intron number 1 from transcript GSVIVT01024154001 (locus G SVIVG01024154001) derived from phytozome v7.0 (chr-ID chr3 ; pos 716771 to 721131 reverse strand)
tcgaagtctccgctgatttgcaggtgattttgtgatgatttcataggtcgagattttttatttttcgatgttcatttctattgcttattttatttgattttttcgcggcaatgagtgattgagtttcgaattttccgaatgaggggatgggttttgatcgcgaatgtggtagtgtttaactttgctgaaatatgtatgaatttgagtgatgaactcactggtattatatgatttttagtgtaattattcaattaaccgggatgatagcatgataattcttattaaggatcggtgtggcagggaaaaaaagaaaaaaaagaaaaaaaaaaggaaatttcaggaataatttatctaccatctcgctgtatataaatttcatgttgaactgaaatcttctttttcacttttgtggatgcattttggtccattttaagtgtgttttggttgaatttacttggggggttagatttatcgtgaatagtatggaatcagtagcccttttttgaaattgcgtgactaaaatggtgagatagaaaaatgcaaaacttatgggaagaagtgtgagggcatggttgtggaaatattgggggtatcttgagaataataagaaaaaatgtacagtgctcatgggggtatcttgatgcagttttgattgcaaatgaggctgtggattctaggttgaaaaacaatcaagggggtgtgatgtacaagttggatatagagaaggcctatgatcatgtctgttggaagttcttgttggcaatgttaaaaaaagtaggctttggggagagatgggttaagtagatagagtggtgtatctctactgtaagattctctgttcttataaatgcttctccctccgggttttttcaaagttcaaggggtttgagacaaggagacctcctctccccttatctgtttgtgatagctatggaggtgtttagttgcttattgagaagggccattagtgggggctttttattagggtggagggtaagaggcaggggtggagaggggattctgatatctcacttgctttttgcagatgacaccttggtgttttgtgaggagtcttaggatcaattgacgcatctaagctgacttctcacgtggtttgaggcttgctcagggttgagagttaacttggagaagagtgagcttattccggcggggagggtgaatgatatagaggatttggcattggagttgggctataaagtgggtggtctgccttcctgttatttgggtttgcctttgggagcacccttcaaatcaaaggtggtttgggatagtgttgaagagaggtttcggaaaaggctggctatgtggaagagacagtatatatcaaaagggggaagactcaccctaattcggagcactctctctagtttgcctgtttacttcatgtctctcttttatttgcccataaaagtaaggttgaggttggagaagattcagagggacttcctgggggggggggagctcttgagcagaggccacatcttgttaggtgaaacttggtttgtctggaaagaaagaaaggtggtttgggtgtgagaaatttagctttgatgaataaagctctcttgagtaagtgaaattgacactttgccattgaaagtgaggctttgtggaagcaagcaatcagtcacaaatatggtgtagaggagaggggatggtgtacttgggccgtaagcgggaggcatggtgtagggctttggaaagctattagaaaggagtggatgggtatgtatagcaatttagcctaccgcgtgggtagtggtaggagagtgagattctggaaggataagtggtgtggagatgagcctctttttaagtccttcccttctttatttgccatttccctagctaatgatgtctgggtatcggatgtgtggaacccagatggtgtaggggatggttggacccctcttttctcaagggcgatgattgggagattgagatggtggagtggtttatgctacaaatccaagcctttagggtgcaaagggaggacgaggataaagtggtgtgggcagcatctagaagtggagttttctcagtaaagtcgctctattctattctggagcccggaggttctgctttgttcccctatggtagtatttggagagcgaatgtgtctcctacggtagctttcttcgcttgggaagcttcatagggcaaaatcttaactttggagcaactccagaggagggggtactctttggcaaataggtgttttctgtgtctttttgaagcagaaatggtggatcaccttttacttcattgtgttaagacgcgggctttgtggaatcttcttttctccctctttggtgtgacttgggttctctctggttcagttaaggaaactctccttggatggcatggagcgtttgtggggaaaacccgtaaaaaaacgtggcaaatggcccccttatgtatattttggtcagtctggaaggaaagaaatttgttgacttttgggaatgaggtgctttcactccaaaggctgaaacattcttttgtatgtaatctttggttttgggttagggtgttgatagttttgagccatttttctcttgttagcttttttgagtgactaggctctaagtaagggtaggggttgttgtttctttccccttccttggtttcgagtctgtgggctgcttttgtatactccctgtatacctagagggcactagtttggtgtttcctctttctgtttgttataattctctttatctataaaaataaaaataaataaataaaaagaaaataaaaattgtacaataattgtccaacaaaaaaaaaatgattgcatcgcttttttgtaatggcataggttgtgtctaatttgatctagggatgagcacagttctcaagactatgtgggtggtgctggacctaggttttcagataatgaatgagtgagaacttaggcaaatgatggaaattaattttgaaaattagcgtgcaagttgagttaataccattatttatttatttatttatttgataagtaagagaatgtattagaagtgcaaaaaagcacaacagtacaccagttgagtttataccattatttctagaagaaatgatgaaattggtatatccagtttgatggtaggaaagtagctttgctctatatatggtgggaatacttgaggtggatttttgatgttcttgttagaaatcttgcttggctgctaaaatttctctgagaatgagaacaattcgtttactcagaaacctcaagattggctgagagacataattatattagctagtttcatttggcatcatgtagtagtcaataaaattgtttcttttgaaatgatgatggaacaacctatatacttgttttttttttttgtttttttttatagcaatttgttctgtccaattatttacagatgtatgttgattcctggataatttttgggggaaggagggtctattatgaccctgtagtcctaatgtctaagatgttgatgatgattagctcaaaaagactagccagcgctctttttttttctaacaaaaatgttccaatgcaatcaccttcctgactatgaaagagaaaaaaatcatgaagggggcatatagataaataggtatcgacgagcagtgggtacaaatcatcaaagcaactggaaagtctgcacacagttatgctgatttactttgtttccacaaagattcatttttattttttattttgcttggtaagtagagcttgtattagaagcacctagaaatggagaaaacagtaaacacaaagtatacaatcagatcgccaaaaaaaccaggtgaagaagacaaaaaacctttcccaaagattcattctcagaaatatgtttcttttttccctatggttccattaatatttgagatagcaacctggtgcagtcatgtcatggttccactatacaaatattgtttgagtttcttggaattttgacaatatttatgcttgggaactgtttttggttgttcacacactgttgccatgaaagtttttgccttctttgtggatcattttgctatatttcttcatcaccatccaatggaatgattaatctaatggatgagataaaagacatcaatggccgtgagactgttgttgtgtccaagaagctatgagtatgagttttatgtctacctgctattgtcccatttatgatactggtgagaaagataatttttttcccatcctaactagagttgtcatttcctttatgttgatttctctaattgagtttgcagaatagttctctttcagcaagaatgaggttatgatgctacaaattttttggttttcatgttactgttctttccttgctcataggtggttaaagttt

SEQ ID NO: 10420 - DNA, 7309 bp, Vitis vinifera
  Intron number 1 from transcript GSVIVT01038798001 (locus G SVIVG01038798001) derived from phytozome v7.0 (chr-ID chr1 2_random; pos 1169602 to 1176910)
ggcgcgactacagggctcgttagtcaaggtctcaggtacgcagttttacaattctatggttgaggaggatattttgaaaattggattttatcctctgtgccgcggctgcatttttcaccattgcaaactcactcctatttgaatagtgccaattagttggccacaatcaaaaggtccgcatgtgtcgaaactcctaggacaaatttgctatgacttcttaaatcacaataggacgaaaattttcaaggtaatataatgataggtattaaactctagggttattgaatgtatataataagatttaagatatcaaattagggtacaaatcaatcataccaaagtataaggatgcaaatatttcaagatatatacccgacatcatctaatttagtgaagctttttgatatttataaaaaaatagcacatttcaatattataaagccaatcacacataaaaatacacgagattttaatatggttcacccacttctcatttctacactcttgatcatgagcctaatcactctaccaggtgtctcttattcattttctgatctctatccaccgtgcatagcctttactatctcatcttcatctcataaccttttctcccttataagatttgatatttataaaaatatttttaataactttctttattctataaggaaattcaagattatagttatacatgaatataaaacatattctatatatatatatatataaacatatatcaattagaaatttaatacgttttctaacaatctctattttgaatcaaattccattaattcaatcttccatttttgtatgatgcacactttgaggaaacttgtcttaactaaatccttacttcacacaacttccttgtgtgtcacactctcctcctatatcatagttcctatcttgcaccatggtattatagtgtgtcatgatcccctcatatgttgtaaatttaaatcattcaaataattcattgttttgaccttcaagatctaataagtgtataagaggaatcacacttattcttaataatgaaaacatgtttcttgtatcacattccaattcaggagaacttattccactttcaatcaaaattccttttataataatttattatactttgttttctttgactcttccaaaaatcttcaaccaaagctttgatatcaaattgttgtgacaatgaaagcttcaacacaaacatgttaatgtaagagcacaaagataaaactaaccacacataaaatatacatgaggttttaatgtcgtttgattagccatacctacatctatagatgatagaaattattccactatataatagataatgttatagagaacaaaaactaaatacaacgattggatcccaaaacttcccatacttctctactcatggtgtttccatactccatatacctataccctgaaccatgagttccctcactccattgagtgtctcttattttttctcaagtctttatttaccatatataatattcataagcctatatctatcttaaaactctttccctcataacctaaaatatttatagagatattcctattaattttccttaacctataaaaaaactaatattataataagataagaatataggaactattttatataatactctttgagaaaaggaatctattctttgagaatttgagacactttgcaacactcttagttatggaaatattaacctttaatgatcaaacttgcagtctatttttttttcaaatgggaagggaacatttcaattaatcatgagctaattaaagtagatttacaatttacatattgtatttttgttataaaaaaaaattatttctataagcacacctcaatcttcccaaatttctcactatataatcgaagtgcacaaccaatgtctcaaaaagtcataaccaagataggttattttggtaaatgtagtcaaaatcaaatcaaggttgaaagaaacatcaaaatcgtaggcgtatttcccaaaatacatgtcatatgtagtatactaattatcaaatgaaaataaaatattatctctatttgttcaaccacaataggctacaagtgatattagacactacagaaccatgataattattagcaagtatacttgaatcttcataagtcattgctttaaatgcttaaagtgccaaactagtgcatcaaatattaggatatgcaaaattgttacacttaaattgaagtttacacctcactacctcacaattgaggtgtaaacaagtggtgtctaataatgtacttacaagtatccatatgcataggtgctagatgttacatgttaatgagagaacataaccaaggcatttagttcttgaatttttatgcaagtaaagattaagaaaaggacgttttctagtcattgacttaaacccattgtgaaatcctatttgtttggatattgaggtacttattaacatattaattacatattcttggaaaatatatatatgcacaaatacaaactagagatttatgaaaataaaatgtagatgacattaaattttgattgagatgtgatagggaaatttcctaaagtagttataccctcttttaagattgtatattggttcaatagaatagtagcaagcattcttcctctagactttggcaactaatattgcttatagaggtacacttctcaatgaatagagatgacaagtcttgatgttttgctcctttaaggatttaagaaaaatggtagaagaaaggaataaatcctctctaaggtagaaggaaaagagaactcacaaggctttagagaaagataaaagaagggagaaaagatttaagatgggatgatgagagggacaaactatacctttatttataggttctttggagtggctcaaataagtagaaggcatgatagaacacatggtttctataatcaattagttgattgatttcaatcaaatgactaattaattgagcaatcaaagaggattattatttgattaagtctattaaggcataattgataaatcatgagaaggagattgattttagtctacatctaattgattaagccaatcaaggaggcaatgattatttgattgagcctactaaggaattgcttggtaatcaaaatgagaatcaagtcttaaatttggtcaacaaatatggtactttttgtgtccaaaaaaaaaaaaaaggaaaaaaaaaactatatgcatgcacttttctaatgaccccccgtagtgtacatgagtgaaagaaataatagaggataactaaaggaacaatatacgagaatctaatgcattagaattggtgcccttgggatattaactagttgtagggtaatttggttgtgactcatagaaatctagtgaaaattaaattttctatgaatgggtatttctttatatgagatagagaacctattatccatattttttttctagaaagctctaaagaacctacctaagtttttataaaaagtagccccacttccgctctcacattggtgaatctgtcatgtgtgtcttacaattatgtatagcacccataagggatatgacattcattaagagtatgtaattaacctcaaactttataaattatgtttcacccacaacttaaggatgagctctcaaatataagtaactgatacaatatttcatagtcaataaatgtcttgttatcacttatatgaacctacttcctatgagctccattgatgttggttggattactatcactcttgacttatgtattaggcataaacttcaccccacttgatgtttttaccgctaatttcccacgtagtagtttatttagaagataacaaaatttaactttaatctaaaaaaatccaatgttgtattgtaagcatattgttctttcaattaaatatcttgtccttagccttggcttttgtagcttgactattagagacttctaagaagctactcatcctcaaagggtaaggacatacccattagtggatatcttctcctttgaagaaaaggtctaataaatatcattataccctttgaatatatttgaaattttactatacctagaccatggttaatagttcctctcaagtgcttaattacattgtagatgacattctaatggtcataattagaactctaggtgaattgactcaatctaatcaccatataggtaatgttaggtctggtatagttgttaagtacactagatatccaatgatttgagcatactctacttgggaaatactatgttctctttttctttttcaattatgagttgggatcataaggagttgaaatagacttattttattgtcaaagtgttcaagcttccttaggatttttcaacattgaactcttgacaaagtttaaacccattatgtgttttagttatcttgatccttagaatcaccaccacccccttccccctcgcttaaatccttcatgtgaaagttagactattggaatctcttattcttatagatgacctctatgctagtttcaagaatcaacatctcatacatacaagcaaatgatgacatgtgttatccctaagtttgttgtagatatcatcatcaataatggaaaatccattagatactaacacgtgatcaaactttttgtgtcgctatttaggttccattttaatatatatatatatatatatggacttaactagcttacacaccttttgctcctcaccaagaaccacataacataacccgtaaattaattcatatagatttcctcttttaattcattatttgagaccctagttttaacatccatctagtgtattaatagctttcatagtttatgaatgaaatctaaaactaacaatactctatatatatttcttttgtttatatcttttggcaaccacccatgccttaaacttttctattatcccatttggttttaatctcgttttaatatccatttgcaacctactatgtttgaactaggaggtatatgcaccacttcccaagtatggttagacaagattgattcgatttcattatcatgccctctttccaaaagagtgcatcaagaatagacactgcttctttataggttttacggtccttatctattaagaaagtatagaaatcgtttccaaagtttatttctttcctatctcatttactttttaattcaatttttcataatgtttcattagattcatttttaattgatttccaaagttgatcttctccattagttttgataaaatagataacctctataaaatcattatattttgtttctattggtgttcatttccactaggttactatttgatttgatgactaagaatctatatattgcattattttcaaaatatcacatgaatatcacatcaaaggtttatgacctagttttcatttcctaggcttaggtaagagaatctttccaagggacttccatacttttgaggctatattggctatatgacccttccataacttgtatggtgttttttaagttttcttgtaggccttcctattttgaatttaaatggaggataacttccccccacaagttctatagtgttgctaaacttattgacatgacattcatgaactcatattttcctcacttatttgctcgaagtctttaaatcttcttacattgttaatttttttactttagttctatatttatgaaagcttctctagtttcctctttgtcttatatttataaagtgagagatgaaattttcatggaacgattgtattagcatattaataatcacttcataatgacatataattcacacattaaattaggtaaagacttaaggtttcctacaagctactatgatatgggttaatctattggagaaacaagtactttaaccaatattaagaacttttcacactaggacaacacttgaataatagtgggtatgggggattactatagagcatgcactagccccttgtaacaaaataaataaataaaatccattgaggattgcatctaaaacaataaaattcaataaggatttggtttatttaacatgaacattgtaattgtcatcctacttttccatgccacattcatttgtatgtaaatcttgacattgaagatattatgcaacatgaatattcctccaaatagttttcttctagttccaaatgatgaattagaataattgaaatagttgagattcatgcacaaacatatatttttagttttaaagagacatcctatttggaaatacgccatacctcatttgatctctaaaaaaaccacaaacaaggagcctatgatcgtaatgaacaaaaaacaaactttcttatgaaattttgaacaaacaaggagcccaaaggttcccttatcgtcgtatcaaaaacttgtcttagaactttagttggtaatactgctttaaggttcatagtaaaaaacatcatgaaattgttaggctacacatgttgtctatttacaaaattatttgtggctatgaaggaagaaatgtcaaattggctttaaaccaacccaaaccaaatagtaattttgtaacataagagaaataatctgaaagtttcaaagaacctcaagctaaggatgccaaattcctaaagaggaatgagaaaaggataaaaaaacttatttaaaaaggattgctaagatgttggtgccattaaatatttgtgcatttctgcatgatgaagtaaaagatatgataaaaaccttatttagtttaatctagaaaataagtaaaaatttggattatttgatttaaaggaccactaaaacaagattttggaagaatgagttcctttttttgaaagcagaaaatataacttttttttttttgaataaaataccattcaccaattttttatttccatcgcttatcaaacactttttgtataaaaagtttaagggtaaaaatgttaaaatatatttatatgtgcaattttcaatgcatggatttttttctccgaatctgggtattgtttcatcctttttaataaaatgtttctaaaattttatttatatggttgtagaatatggaagaaaaaaacctttgcatatgaccacctcattcagttgttgattaaagagtgttttcttcaacatttatatcatacacgagatactggtgcttgtcataacttaacttcccaccatgttatttttgtttaatttgaattcattgtttttttcttaatgagaaaaacattaccttttttatttatttatcatggagttggtgttaaaggttaaattcaatttactataactaaatttatctattcattttttaattgtagcacatttgttcaagcaagcaaaagaa

SEQ ID NO: 10421 - DNA, 6095 bp, Vitis vinifera
  Intron number 2 from transcript GSVIVT01013983001 (locus G SVIVG01013983001) derived from phytozome v7.0 (chr-ID chr1 6; pos 8416154 to 8422248)
tttctggcttgccatcccccctcaaagctagcattgtagctttcaccccaacataaggtgggcatggcccagccggtatctatcatcctgcacaaactgtgacaacaactattcatccacttctgcaacaatctcatacaatggccggtgctgttgacatagtgggacctacaggcagtgtctatcagcagccccagcatgcacaagtcaactaggccctattcctaccaggccatgcattggccatctttagtatgggccatctttgggccgcgtgccactccccaatttccttatccactgttttaaaaaaaaatgattttctcaacctcattttgtaaatatctttctcaaattctgattttcaaataattccaatcttcccatatttcattcttagaatttttaggatcacccaagagtcccatttttaataaaactttgttgccatctttccttctggcaaacaatttctacatccccatttgttttaaaacgttttaaaataagcaagattttaattttgtaattccaattaatgaaatttacgaaattaattcctacaaaaataaacgggctatggtgggggctcgacatcaaataaatttcctttaaaataagaatggaattgaataaaatgtcatgcatgatgttggtgcttctttatcttagtttggtgatatgagtgacatatttcatgttcattgctatgcactaaccccattttatgatagcgcattgccatttgctgaccaggtacgtacccattctcactccggtcaccctttatgtatgttatgattctcacatgtgtatgatcattctgaatattaattaatttcctcatcaattaccacatcagctttattttattagtagagacccgactttagggacttaaagaggtgctacggtctttactgtactttcgcgataagtaacctgactctcgaatccgatctggtttttcgtagatcaccttttccggaataaggaatcgcacttagggttttctttcttattttatttatcattttaaaaataaaacaaaaataagtggcgactccaagtcattttcaaacaataaataaaaatcattttcgccatcgagtggaaaacgcatgagccgaaatgcagggtccacagttccatatttaagctcaaatttttaattatttataaaaagagtttaaaaaaataatgaaaaatccaaaaatagttaaataagaaagaatagtgggatgtgaagggtggtagaataaagacaaaaataagtcaagtgtgaaagaaagaaagaaagaaatatgttccatatttaagcccaaattttcaattatttataaaagagtttaaaaaaataatgaaaaatccaaaaatagttaaataagaaagaatagtggcatgtaaagggcggtggaataaaaacaaaaatgagtcaagtgggtatttttgtttattcccatctcatatccttgtaatcaattatgggtgttgaatgactctttattaattatcaaagccaaaagggtttaaagcccaattctcccttatatatatatatatatatatagagagagagagagagagagagagagagagagtttaaatattgggttttttgtccattttgaggtgtttaaatattttggtaattataaactctcaactcatttttcaaaaattataaaatttattaaaaaaaaaaaattagtgaattgttttaaaaaaaaatcaacaatttattttatacaaaatttactttgaaattttatattcttttataaaatggaacaacttttaaaatatttttcatattttttggaataattaaattgatacatgctatatatatagagtgggttttttttgtccattttgaggtgtttaaatattttggatattataaactctcaactattttttcaaaaattataaaatttattaaaaaaattagtgaattgtttaaaaaaaaatcaacaatttatttgatacaaaatttactttgaaattttattttcttttataaaatgtacaacttttaaaatatttttcatattttttggaataattaaattgatacatgctatatatatatatatatatatatatatatatatattattttctttcatctttaaagactaaacttacttagtttacaaggtaacaatgatgtacttaatcaacattttttcgaatatgaaatggtacttgttttttaattatatttattttttaaatcatgagtttgaaccaaaacctttgttagacgtattgtttggtgtttcccgaactttcactctccctaacccacgctgtcagaattaagtttaagatcaagaacaaaaatattgtaaaaaggatgagatgaaaatcattcaatgagattaatagaaagcaacaaattccaagtgaaatttagttttagattcttgaccaagaaattgggatttttgtacttgattgatgatcatcaagaccgaaaacaagttgctgaatgtgaaatcaacgatacccaagttatcagattcttgagaactagcagacttgaatttaatcacaaatggttttaatttcattcacctatttgtagagaaagaaaaaaaaggtttgactaagaagaagaggatggggaggatggttttatcatcattcatctaattggaaaaaaaaatgggtttgaacgagaagaagaggatatggaggatggttttattcccattcatcctattgcaaagaaagaaaaaaaaaaggtttgaaagagaagaagaggacagtgaggatgaagaaatgggtcttgagtgataagcgaatggattcatccatggatgatagggtatttataaaatgggtaatgaaatagtggtatttatatcatgggtaatgaatataatgaaataaatagaattgtaaatacacattataaaatataaattataaaaaattaatttaattatattttaaataaattactaactttttttaatacaattaaataagatgtataaattaaattttattagataacatattactaaaaaaaaataattacctgtatcaatattaacaattgaaaatttttataattaaataaatttaatataaagatattaaatgaaagacttttaatattaaaaaataataaacatatttttatgtttatttgaataatattaaatttaattaaacttaaaattttataaaaagtacatttaattatatacattttgtctgtcatccgatactaatcagagataccaacaccgatgtacctcaagacctcctaagttaatgaccgagactatgatgttgaaccatatgtatgtacatatattgagcacccattacttaaccaacccaattaacacttttatcatgtgcctttggggaaaaagggagaaaagttttatatggatttttcttgcattttctcaagagatttgaacagaagaaaacaagatcataaacaagctttgtggtggtgtggaaatggtatgcatatgcgtatacaccccggatgatgccccattttgaaaggacacgcactgcgtcttaggtcttgatgataaaaaggtcggtgcattcgagccgaatgatctgcaaagagttgatcaattcttaattatcagtgtatgttacgagaaaaagcagtttaacatccagaactctgtgacaaaatcccaaaatttcaagcctcaattcaagtaaacacatccctatcaaaacttcattctttgctcagataggaagaaattacggtataataaaaaacacagtactgtacagaccacgatcccaagatgggccactgcagtacagtaatcttgaaacgcaagcctccatttaacaactgtcgtcccttggggtgaacgtaaaatgaaatgagaaattaaactttgccattcaggtaattcaagggcagtttctcctttatgaccattcagtttctagtcacctcgtggcaaaacctaatagtcaagaatcgaaacccttcaaacaaatcaaataatgaaaagtccaggtgataccattggatatgcatgcatataaataacgaataacaccatctcctctacatatgcatatcatccacatatcaaatcgattacatctcctagcctgtttgcctcaccaccaagactatcatgaggtttctcaacgttgtttttagtgtcatagcacttgcatttcttctgagtgttcaaccacacaatgctaatagggttcttgaaggagtgaaccgtgagtacttgatagacaaaagacgtggtctttcagaaagtcctcagcagatgggaccggtcactccttctaccccaaatccatgtgagaaagcccccgttggaggccctccttgcaaacacccacctgcatctcctgcaagagcacatgccaccgctccggctgtcaaggttaccatgcacaagtgacatttttacaggccatcagatccaagtatacgtagttcattgtcgtgtttgtcatctgttttcatcttttgatgacgtttatattaaacgaataacgtagacaagttctatgcattctgtgtattaatttcgctcttgatgtgtgttgtaacaatgtgagcggatgttacaaactgggagcggatgttacaaagggtttgagaaaggaacgagatttaaaacccatagcctcccaaaaaataaatgcccatattcaagttccagatcaagtccaatatttaggtttccaatacgagagcttatttacaaataaaaggcaaatgtaatgaattagagaggagacctgattggtgcggcgcatagcagccgcctcgccacgcttggagaggttggcagtgaagcggaaccttcgcttggggttcttgacaatactgcaaagattcctccatctctgcaacacttcatcccacgaatgctttggcttcactcctgagaagttctcgtccaaatagctttccatcactagctcttgtaatcgcttttgtaacttgtttctctacctgcacaaccacactcctccctcattcaaatacccttccccccgcgtcccaaacgaaaccaccaagaaaattctctaaagcctcccacctcccaagtgtgctttacattcccagaaactaccacagcaaaaagcagaaacccccaccgcgttacccgctcgatcttattgtaatatacgaatacaacaaatttaccactcagatccgaaacagacgaaattatgaggaagacgaagaagacgatccgctcttctagttctttggcaaatggaaccgattgcccgagtcaattccggcataacgcttacttgactagttggtatttcaaatttgctctagtggtggccccacgcggttacgcgcttgtaagacctacatttatttatttacgatgtctttatgacaaaaatatacttttatattttaactaaattattattagtaatttaggccaagtaattgttttaaaaaatagtttttatttttaaaaataaatatttttaaataacatcttttaattatttttacttattttctaaaaattattttaaaaaataattatataaatgtataaaataattaaaaataaaacaccacacataaaatttatttttattctataaaaaataaaaaataattttcaaactttttttttttttaatgtttagtgtgagtattataggtcgttgcttgcgttgaaatgaaatcatatgggtagatggtgtgccataccaaaagttgacctcaggttatgctttcttgtccttgtgattatgaccaatgatgggtttcccatcacttgttacaacattaatttcagaatgtatttgacaataattcagaaagtattctcgttctttctaatttcaaaaacagtaaaaacattttgaaattttgtaaggggctgctaaaacttattgaaggaatccgcgttaacaaatgacgaggtttgaatgatgttggtctagtctatgtattttacagtaaggtttgagctgccaacacagtagggtttgagctgacatgtattttacagccagtgaagatgttgccaatgaagtggcgtatgccatgagtagattggagatagattctgatatctgtg

SEQ ID NO: 10422 - DNA, 24810 bp, Vitis vinifera
  Intron number 12 from transcript GSVIVT01026449001 (locus GSVIVG01026449001) derived from phytozome v7.0 (chr-ID chr 4; pos 23493090 to 23517899)
tgcaggttcgctaaaaccttactcttgtcattgttttgataaaagaagtcaagaaagggaatggctctttcctgttgaaatgaaatgattatatgcacatagtcttgttcaacagcccattgttcccttcagtgttggttgaagattaatatgcactcgtcttttactttgttttatgtttttaacaagtgttattggagttatatggtacaattcccaaaacaactgattttattggaattgatgaggtgtcatgtccaattcattcttgcacaattatccggtttagtgcagtccactaatacagaagaagtgcacctgtgtttgcagtttgtgagtgtatgaactccaaataaatggaagttgaaacttcctctgaattccatatggaaaaaagggaatgctaagggcacctgctgctccatttataagtaatacagaactcttaactagaaaagagaaaatcccatgtatggtacaagcaccaaccttcaaaatgcagaaggcagagtatataaaaaatgctgaataagtgaatggctagataactctccacagtacagtgcaaaagtttatactcgtattcttttgctgactccaactgaagtagcttatataggaaatggaacctcaaattcctagagttatgtaaggaggttgccatggggccattcttttgaagccacaagaaatgacataaaaaatatcctttgccatgggtggtttggtgaaccattccttttcaagacttttaggtccaaggtgcataaattgctcaattcaattcttctactgctggatctcaaagatattcatactgatcatgctataggactcttaacttttaacatactagtgttttctgtttgtctagaagagaatttgtaagcttttctttcatcttagaaatgtttgtggaacagcattgccttggcacattattgtacctgttcatgaataaaatctaatagccatatcctaataaggaatattactctaatattcaatttatttgatgcccttgggtcttgactcaaatggcaagaatttggggtggggataggggaggttttaggtttcgttctatgtaaccacaaaaaaagggctacctattaaaataaattacaccatttttatttgactgcaatggtttaaagctaagacagttattttttttccttacgttttattattattattattattattattattatttagtttcatagaaagataaccataaaataatgtctccacagaaaaagttttccatttttatctttgcaaataccataaattatatctcagaggtactaatgtgactggatattccagttacccaaagcacaactccaataaacttttaagacattcaaaaggaaaattgaaacccactcatgttaagaaggaagttacaaattttcaacatcaatttgaaatttatgaagatgataaattaacgtctcttcaccagtaaattatttatttatttatttttattttttaattaaaacaatgtattataacttagtaacttgctttcactttgcaacctacggaagtttagcatttgtatgtcaatgttcttttacaacatgtaacacatgttcttttgtcaaaatctccatgtttgatacttctagggatgtttaaattaatttgagtcatacttagatatgaagaatgaatgttcattgatgggttgataatcaattactaaaaaagtccctttttcaaaacctcattttgatagatctaggaaacatgggagttgcttatctttctattttagattttattgatgggctagattgggtcttagtggttatagcccttgtagctttagtagcctttgggttgtgcacctttttgtttaactttgtttaaattgtttatttgcctatggagaaataagcaaagaagtgttgactcgcaagggctacaatacacaagagctgctaacttgaaggctagtccctaacaaaatcctagttttcgcatgagaagtctacctctttctttaaacaattcgatttcaaacaaaaattgttttcctagaatctaaagggatttaagggaggatgggttcattgcggcttggagtttaaagaaggttctattcaaaagaaaggtcctacaatggatgtttggaggtccataaggaaggagagagggtgtattaccctatcaaaatcaacaagccctttaaaggatcgaggaatgcatttttctggtgagtacagtcacaaccctggaatgacttgggtaggcactaaagaggttaaagcgggaggaggtgttcttcactgtggtattccattctgggtgtttttgtctaacccagaaactgttgccaaggctagattttaaatgaggcttttgatttgcatccttttccccttacacctgttcttcatcttgaatggtcttggcctaccttatttcaaccattcgaatctaatcctggctctctagctaccctgatcgtagccttagtgaatggccttgtcttagtgcctgtatctaatgttagcatttccaatttaaaaggatgattctttctacatgtcaccacttagcacccctagtgagactctttccctcattaggggttgacctctagggccattcccctccatgttggaaggttttcatataaatggtcttacaactagtaaaatggccaattttggcaaccatgaacatcaaactagtcaatgttgtgagattgtcattccaatgggcaatagtagggcacattctatggatatggtctattttaggaggtagtacaaacttttatccaaagcttctagtgattcctaggatctaatctgacatatgcggaccttgagctgtgcatatgaagatcattagttggaatgttaagaggtttgggttctagaaagaaaagaagtgttgtgaaggatcttctttgtcatgaaactccaaacattgtgatgcttcaggaaacaaaaagggagacatgtgatacccttggtagtgttggaaagtcaaaaagaagggataggctattcctctaacttgtgaggcattgggagggcttgtggttatatggcactcaaacaagttcaattgtttagaggttgtactaaggtctattttagtaacaattaaacagatcttggatgaaaaggggactttttggctcacttgggtttgtcgtcataataattataatcttataaagaatttttggatggagctacatgaccttttttgcctaactttttcgaaatggtgtgctggggggagagagaatctcaaaaaaattgggtggtaccagtttaacccttaatatgagagattttgatggattcataagagtgaattaattgacccttctcttagaagtgtgtctttcacttggtcaaatatgcaacaactccttgtatgccaagggttggataggtttttatattcaaatgagtgggagcaaaggttccctggaagcctgcaagaagtgctccgtagatttgacctctaattgttgcccgatcatcctagacaccaatccatttaagtgggcgtccaactttgtttaggtttgacatgtggttgctatacccaaatttcaaggaaaggtttagtttttggtggaatgagtactaggttgaaggatgggaagactataaattattattattattattattattattgataggtgatgagaaggttataaattcatgaagaagctacaatttggatcaaagttgaaagaaacaaggtgtcttttggagatttaaaggagaaaaataacattctcatagacattgtttgcattgatacctataagcaagatggaaatttgacttctaagctttcaacaatgagggctttaaggaagggggaattgggggagttattattaaaggaagaggtgcattggaggcaaaaagttggggtttaatggataaaagaaggggattgtaatgtaaagtatttccataaggtggccaattgtaggtgaaaaggaaatttataaagtccttagtgtctaaagagggggtaattctagataatactaaaaacatttgagaggaaataatgttttttctttgtttggaaagttatactccaagccccttggtaatggattcaccatttcagtgtttcatgagtgttgggatgtgattaaggaggatctacttagggcgttctcgaagttccataataatgggataataaatcaaagcactgaagctaccttcattgcttttatgccaaaaaagagtcgaacgaacaaaatctcaaattttaagcctattagcctagttattagcctatacaagatcatgactaaggtcttattaaggcatatccgaagagtcctccatgaaaccatgtacatatcccaaggagcttttgttgaggggagataaattttgcatgcagttctaattgtcaataaaatagtggatgagaaaaagtaatcaggagaggaaggggtagttcaaaattgattttgaaaaggcctatgactaggtggattaaggttttctagaccatgcactatggagaaaagggtttagtacaagattgaggccttgaatgaggggttgcttgtactcgacaagttttgtgatcctagtgaatggaaacgttaaaggacgggttaaggcaaccaaaggtttaaaacaaatagatcctctttcaccattctttttcactattgcagctgatgggttgattaggatgttgagagcggttgattttagggctagtaggtaagaataggactagagtgtttcatttataatttgtagatgatgttatttttttctttagagttttcatagaagatctgtagaaccttgagataatccgtttagttttttggcaggtatcaaggcttaagattaatttagacaagagtactctctttggtatcaacacaatttaagattgatctctaggttagctttgatgcttgaatgtaaagtctcagattgacctttaacttacctaagtcttccattaagggagaacttgaaggcaagcgtgttttaggatctagtgattaactaaattttaaggagattgaatgggtgacaaaaaaacctttttgtcactaaggtgtagaataactttaatttagttatgcttgtctcatatccctagttatttcctttctcttttcaagattccaacattagtagcactgaagtatgaaaaattacaaagagattttcttttgttggggttaaggagggcaaaaatgatcatcttatcagttaggacaaagcatgtaggcttaaaaagtttgaagtttggggttgtttaggaagatttctttgaagaatcatgctcttttaggtgtgttgagagagagagaaagaagaaaaaccttaatttatcattcatgtaatttctacttacaattgagagagatatatatatatatatacaaggctaggagtcctaactaccatacatgtgtcctatattaacaaagaaagataacatactataaatacatcatattcaacactccccctcaagctggagcatatacgtcatatgcaccaagcttgttacaaatatatttaatcctaggacctctgagagatttagtgaagatgtctgctagttgatcatttgaattaacaaaacttgtagcaacacatcctgattcgatcttctctctaatgaaataacagtcaacttcaatatgcttggtcctttcatgaaagactggattggatgcaatatgtaatgcggcctggttatcacagatgagtttcatctgttcatcctttccaaatctcaactcccgaagaagatgtctcaaccatatgagttcacatgttgccaaagccatagctcgatactcggcttcagcgctagatctggccactacatcttgtttcttactcttccaagatattagattacctccaataaaaacacagtaccctgaagtggaatgtctatctgtgggtgagccagcccaatctgcatctgtgtaaccaacaacctgagtatgacctctgttctcgtacaatacaccttggcctggtgtacttttgatatatcgaagaatgcggattacggcatcccaatggctatcacatggtgactgtaggaattgactaacaacactcacaggaaaagaaatgtctggacgagtaatggtgagataattcaatttacctacaagccgtcgatatctcccggggtctcctaaaggctccccctgtcctggtacaagtttgacattcggatccataggtgtgtctaccggtttacagtctaacataccggtttcttccaggatgtctaaagcatacttccgttgggaaaggaccacaccagaactggattgagctatctcaattcccaagaaatacttgagtttccccaaatctttggtctgaaagtgggtaaaaagatgttgctttagtttctaaataccatcctgatcactgcctgtaatgacgatgtcgtccacgtaaacaaccagataaatacactgccccaaggagttatgatgatagaaaactgaatggtctgctgtactgcaaagcatgccaaactcttgaacaacagaactaaaacggccaaaccatgctcgaggagattgtttcaagccatatagagaacgacgtaacctgcacactaaaccagactccccctgagcaacaaaaccaggaggctgctccatataaacttcctcggcaagatcaccatgaaggaagacatttttaatatccaactgataaagaggccaagagcacatagcagccatggagagaagcagacggacagaagcaatcttggcaacaggggagaatgtctcaccataatcagaaccataaatttgagtatagcctttagcaactaagcgggccttaaggcgatcaacctgaccatcaggaccaaccttaactgcgtagacccaacgacagccaacggtagatttaccagagggtaaaacaacaagatcccaagtgccattagagtgtagagcagccatttcatccaccattgcctggcgccagcttggatgggaaagagcttcatgggtgctctttggaagagaaatagaggatatagcagaaacaacagcagaatagggtgaagataatcgatgataactcaaaaaattgtaaataggatgaggattacgagtagagcgagtacctttccgaacagcaatgggtaagtcattaggagaaggcagaaccggggcaggtgaagccgaagggataggaagtaagtcaacaggtgcctcagcaaaagggagaggagcaacgacatgagggcgacgatgataagcctgaagtggtcgaggaggcatagcagcaggtggggagacaatgggaatgggcaagacttcaaacacaggaagagactcagaagtggtggaaaagaatggtgagtcctcaaagaaggtgacatcagcggagatgaagtatcgatgagtctcaagggaataacaacgataacccttctgaagtctggaatatcccaagaagaggcacttcatggctttggcggaaagcttgtcctgtccaggagtgagaatatgaacaaagcaagtacaaccaaagacacaaggaggaaggaaataaagtggttggtcaggaaagataagggagtgaggaatctgatcatgtaagacagaggagggcatacgattaatcaaataacaagcggtaagaatagtgtccccccaaaaacgaaaaggaacgttactatggaggaggatagtacgagctgtctcaacaagatgtcgattcttgcgttcagctaccccattttgttgaggagtatgagcacaagaagactgatgaagaatcccatgatgagacataaacgaagtaaattgggctgaaaaatattccctggcattatcattgcgtaacacacgaatagaaatatttaactgggtttggatttcagcataaaatttctggaaaatagagaataactcagctcgatttttcattaaaaataaccaagtacatcgagaatagtcatcaataaaagtgacaaaatactgaaatcctaaagtatacgcagtccgacaaggaccccaaacatcagtgtggacaagctcaaaaggagactttgcccgattattcaaacgctttgggaacgagacacgagtatgtttcccaagctgacatgactcacacggaagcgacgataaagtggaaaaacgagggaccatcttctggaacttggagagactagggtggcccagacgattgtgaatgaggagaagagcatcagtggaaatgcaaactgcaggagatgaatccgaggtgaggtgatagaggccttgagacacgtcctatgccaatcgtcttccccgtactccggtcctgcaaggtcacaaatttatcagaaaaggtaatagagcaattaagagtacgagtgattttgctgatggaaataagattaaaaggacattcaggagtataaaggacagaagtgagaggtagagaaggcagaggaagggccaaaccaatacctttagccatagtttgagaaccattagctaaggtaacagtaggtaaaacagaggtagtagtaatagaggagaaaagatccttattaccagataggtgatcagatgcttcagaatctagaatccagggtccaagagaagatgtgtgggtaaggcaggcagaggcattaccaggctgggcaacagaggcaatagaagcctgagatgtctgagatgcagaggagctcggaggctgaggcagcggagaatcagaggactgggccatatgggcagtgtgaggaggccttccatgtaactaatagcaacaatcgcgagtgtggccaagtttattgcaataggtgcaatgaggacgttggcctctacctcgggtaccattgcgtcctcctcgagaggtagtttgagaaactaacacagaagaatctaaagtgctatcagatggcaaagtctgagtggacgagatacggaggaggcgagcaaacacatcatccaaggacggaactgatgaactaccaagaatctgatcacgaataggctcaagatccggacggaggccaataagagtaaggaccatgaagaacttgtcaaactgtgtttgttgagccccaacatcaggagtaagaggcatcacagtcaagaactccttaagagaggcaatctgaccaatataagtagatagatccaagtcctgttggttgatatggacaatagtagaagccactttataaagacgctggatatcattcgtgtataatcctttggcctaagtccaaaatttaaaacaagttttataggcctgaagatgaagaagaatcctgggatcaaccgattgccataatacactacataactgtgcatctatcttcctccactgtatgcggtcaacctcagggatatctgcctcctgggtaaccaagtgatcctcatatccttgacccataaaccaaagttcaacagaggcagaccaggaaagataattttcactgccaaccaatttttccgaagtaatcataggagatccagatatgacagaggaaaaaatggaagctttagtagccatatccacttatcttatgtttggatcgaagaaagccctaatacggcttcagattgcggtgtggcaccaccgaaaaaaaaggagacgacctcagatcgcggcgtggtaccaccagaaaggtagaagaacacttcccaaggcacgtgcagggattggggtggagaaaaagtagccggaacttcgtcggaaagactgtttggagggctgacggagacaaaaatccccaaaagaggtacgtgcaaggctcggatgggagaaccagggaggtagggatgctggtcggcgtcaggcgaggctggaggatgaggcgcgtcgccggaaaaggcctcacgtgccctcacgcgccggcgcgtgagattcagtcgccggccgtaaaagtgcgcgtggccggcgcgtggacggttttctggctccgatgcttttgaaaaagttggagatctcctccaggcgctcctcttggtgtggtcggtgtcggaaaaagttcgtcggaaaagttcgccgacggtgagtgttttctgacgacgatccgactgaccggaaagtattgggagatggggaaggtgaccggaatgaaacacggtcaccggaaggtttcccggagttgatgacacgggaaacaggaaagaaggtttcctggagttgatgacacgggaaataggaaagaattaggttttcttccttggctctgataccatgttgagagagagagaaagaaaaaaaccttaatttctcattcatgtaatttctacttacaattgagagatatatatatatatatatacaaggctaggagtcctaactaccatacatgtgtcctatattaacaaagaaagataacatactataaatacatcatatttaacaaggtgaatgactttggaggttccctaagaaaagttttgcactttggcataaggttattttgtgcatttatgagatacactatcgttctagtcagatggtcacatcagtgtccctagaaggccactgctcaagttttctaggtttttctatacacacttgctttgtgatgggtgatgagatgaaaattcatttttaggaagatttgtcctgggggggatcaacttttgtgttcacaattttcaaacttgtcatagttaaaaatttcatcatattagctatccttggcaacttttttatttttggaactttaatttccatcttaaccttattgatttggagatcaaggaccttgaaagactcactcacatcatctcttacttgtgtacgcttgtcttcatgaagacttatgtacgcttgtcttcatgaagacttatggaggagtacagttatatttttatttttatttatttattttgtaattgtgggtaggactcttcatccttcttatgtactttttatccatagttagtacattttttgtttctaattagaaaaaaaaaagataataatttatgttcacttatttcagaaagtaacgaaacaaacaactaaaaatctaagaataaaagcccaagcttttaggtttaggagtatagatttcctgtgatacacttattttttcttgataactttttttcttcaatatttgttattactatggaaaatcgatcgcttagaaaacacatagcatctcatagtcacacagcaaggctgctccaaaaataagttttggtgcctaatgagaaacctccattttggttaatataggaagctcacatctagacacgagacatgttttttcatgaatgtcctacatttattttaatcttgtagcttttgagtctgaggttgtgtcttcagatatatactgcacatctattggaaatcatgtttctattttagtgcacagaagctgatcgttgaatatgccaaagaagtgcctttttctgatatgaaaaaaaaaaaaaaaggaatgatgagcctttgaagttttccagttatgttgagattttttagtcgttgaaaaataaagctgattttggtcattgagtatttgtttggttcagtgtcaaaacaacttattttagactttgtttgtgcttggattattttattagtatatcagcattattacatgataacaaaatagtcttttaaaggctccaaaagggtagttacaaagatgtctagaggaggaagaagatggtttactgtggagtccaaagcttttgaacttgtgattgatgaagttggaggcaagctgagaggatgcatttgggagagatgtaaagggatatcatcttggatcagatttggatatgcaagtctcagcagtttgttggtaggagttgaatcctgctatagagatagagatgatagaagttggtccttcgcatgggaggaggagggaaggaagtatagaatggagcgtcgtacaaatgaggcgggaagatttattctctgttctgttcgtgatttagaggcaaaaagattttgcttaatttttccagaagggaagaggttatctggagggtggaatatcttggctgagaagttgagagaggttggggtagctccctttggaggattaaaggaccccctttcacttgaggtgctgaagaaggaaaaggaaaaggagcttgatccaaggacatatgcggatgtagcaaaatcgaaattgggtagacttggggataaggtctggttggaagtgggaaggagggtgaagcctggtagattagagcagttgggtcgttgcttagtgggtagatgggaaaaggtggagaaccatccccctgagttggattatctaaaaaactgggttgttcatgcttggctcctcaaaggcaagttggacatagttgtaatgggaggtgggctaatgctctttgagtttgaattggttagtgaggtcgagcgtgttcttgctagagggaagagaaaggttctaggcagtgtattgttgatggaaagatggcacacggaggtggggtgttttagcaatggagcctttgctaacgaggcatgggtgagagtggtaggtcttccccttcacttatggaatcgagaggtgtttaagttgataggagatggttgtggtgggttcattgctatggacaacaagacggattcaatggcagagttgcaatgggctagaatgttggtgaaaacggtgggcagggacacaccttcctccgtccagattgtggatgagatggggtgcttctcagtccaactgtggtgggaatccccatcttggttctctcaggtggtgccggcgggaagtggtctcggtaaaggggccgcaatggttgaagcagaaacagggagtgggtctcgtgatgagtgcagaggaggcttgttggtgaaggatggacagccaaaggagcaggggggagtagttgagccgccctgtggtagctcttcaagaggggctacaggctttccatctgagtcggctgaaagggggcctggagcggaggtgactgatggagaagatagccttgggattagaagccaaggtgcagggaaattagcaagtttgggaggctttaaatccgggccagcagcttgtgattatgggcccgtttgggaggcccaattcaggagcgggcttggagaggcttgtctcaagccagcctatgaggctgcccagatggttgggccagattgtgagccgaggcccatcacgttaaaagggtgggtaatgggctgcgaggacaggccttttttcataaagggctcgattgtgggctacgaggggagggccgacatgggttttgagcctgagttgggggggatagaaggaattagggcttttcctcatgccgaggtcggggagatggaaattagggctacgatggaagcttcgggtggtcaagataaagaggacgggggggtcgcttgctttctcggaggagattggagggattcagagtctctctcggtgaaagcgagagcgcgaatgactgaagaagctctgtcagctgaggcatctaggtacgagtccattaccgatgtctttgggggggattgggtccttttctcttcttctcctctctctgggtgcgatcgggctatggtggtggggggtgttatgggaacggtagtcattgatgaaggtgttgggtatcaagctccgctgcgtgccgtgctgactgacggtagtctgtgggagacgggtatagagggggaaaagaatatgggtatcaggtcgcaggagagcgaggatctggaggaaaaagaagatcagggcagcagttgggatgacagtagcttggctaagtttagtaagactttggggttcacgacagatggtgttgaaggggaaattcttaaattactgttaaggttgaaaaccagaagggatcaaggcaagaagaaaggaatttcaggaatgactaggtttgatagggaagtgaaaaaactggaatggtcgattaattatgaaggagaaagcaggaagaaaggttcggatagaagaaacagggatagagctctatgttttaaatgaagattaaaattttatcttggaatgtccggggggtgaatgacagaaataagaggagtttaattaaggccttaatcagatcccaaaaagtggacttggtatgcctgcaggagactaaaatgtcacagatgtctttaggggtggtgagaagtcttggagtggggagttctgaatgcgaggggtgcagttggaggggtgctggttttttgggataatagagtgttggagctggtagggatggaggtgggtctctttccatttcctgtcggttcaagaactgtgaagatggctttagttggattttctcaggagtgtatggccttaccttgaaaagatatagagagctgttttgggaagagctaggggccatccgcgggctctggagcgatccttggtgcatcggaggagacttcaatttgattagatttccgaatgagagtagaagaggggggaggttgtcttcttcaatgagaagattttcggaagtgattgatgacctggacttgagggatctccctcttcaggggggtccattcacctggagcggagggttgaacaatcaagctatgtccaggctagatcatttcttggtgtcggaggactgggagggtcactttaagggggcagtgtagtgtactcttcctaagcctatgtccgaccacttccctattctattggacgggggaggggttagaagaggtcctgtccctttccgttttgaaaatatgtggcttaaggaggagggttttaaggacctgttgaaggggtggtggcaaagtctaagtttgaatggatcttttagtttcatccttgctgagaagttgaaggctttgaaggctatcttaaagtcttggaacaaggatgtttttgggcaggtgggagtcaataagaaattggccttggacaaggtggatttctgggatggtcaggagaagcttcgccccttatcattggaggaactggaagctagaaaggtagcaaagggggacttcgaaaaatgggctctaatggaggaggtttcttggagacaaaaatcaagataagtatggctgagggagggtgatagaaacacaggcttttttcataaaatggctaattcccatagaaggagaaactgcctgtccaagattaaaattgacggagtatggttaacagaggagcaggagataaaggggggtgtggttggagcttttaaggacctgttgactgacccggggggctgacacccatctatggaaggtttggactttaatagaattggagatgaggaagcagctagactggaggagattttttcagaggatgaggtcttcctggctctctcagatctgaacggggacaaggctccgggtccagatggtttcccccttagtttctgacaattttgttgggattttgtcaaaaaagaggttatgggttttttgatagaattccatgagcatggcagattcgttaggagcctgaattcgaccttcttggtcctaatcccaaaaaaagcaggcgccgaggaccttagagacttaagaccgatcagtttggtgggaggattgtataaactattggcaaaagtgttagctaacagacttaagaaggtagtgggcaaagtggtgtcttcagctcaaaatgcctttgttgaaggaagacaaattctcgatgctgcccttattgccaatgaggcaatagattctttgttgaaacgaaacgagagtggggtgttatgtaaattggacttagagaaggcatacgatcacataaactggaattttttgctgtttgtattgcaaagcatgggatttggggagaagtggaccgggtggatctcctggtgcatctctacagcaacgttttcagtattggtcaatggcactccggaaggctacttcaacagttcaagggggctgcgttagggggaccccctatccccttatctttttgtgataggaatggaggcccttagtaggctcatccatagagcagtggggggagggttcctttcaggctgtagagtcaatggaaggggtggggatggggccttggtctctcatttgttgtttgccgacgacactttagtgttttgtgaagcttctgaagatcagatggtttacttaagctggttgttgatgtggtttgaagccatatcaagtttgagaatcaatttggacaaaagcgaaattttgtcggttggtagagtggagaatttggagactttggctcttgaggctggctgtaaagtgggcaagctgccttcttcttatttggggattcctttgggggcgaaccacaagtctgtggccgtttgggatggggtggaagagagattccggaaaaggttggccttgtggaaaaggcaatttatttccaaaggagggagaatcactctaattcgtagtacattgtcaagtatgcccatatacttgatgtctttacttcgaatgccaagagtggttagtctaaggttggagaaaattcaaagggatttcttgtggggagggggtgctttggagaggaagcctcacctagttaattgggataccgtttgtttggacaaaaggagggggggcttgggagttagacgtctatctactctcaatagggcccttctttgtaagtggaattggcgttttgcgaatgaaaggaagaacttttggagacatgtcattagtaggaagtttggggaggaagaagggggttgggtttctagagaagttagggagagttatggagtaggattttggaaggaaataaggaaggaaggtgcccttatgcaaaataaagtcgttttttcagtggggaatggtattagggtaaaattttggaaagatatatggtgtgggaacttcgccttctgcaattcttttccctccttgtatgcttttgcctcctctaaggaggcttgggtaggggagttttgggattcttcgggagaggaaggggtttggagtcctagattctctaggcccttcaatgattgggaggtggaggaggtggagaggcttcttttgacaatccggggtgtaaggcttattcatcttgcggaagatagaatgttgtggaaagtgacttcgaatgggattttttcagttaaatccctctataatgatctatcttcaagaagagctggtcttttccctcatggtttgatctggagccctagtgtgccttccaaagtgagtttttttcgcttgggaggcttcttggggtaaggtgcttactatggatcagcttaaaaagagggggcgggctcttgctaatagatgtttcctttgctgtgaggaagaggagtctattgatcatattcttatacattgctccaaggcaagagttttatgggagttattgttcaccctttttagagtgttttgggtcctcccgttttcggttagaaatacccttattgaatggaggggctttatgttgggcaagaagcgtagaaaggtgtggaaggcagccccgttgtgccttttttgggcggtttggatggaaagaaataggattgcctttgataatgaggatttttcggttcataggttgaaaaattcttttgtttgtaatctttagttgtggacaaagtcagttgtaaatgaaggtcctcttactttacttagttttttttattggctaggcgctagatgagggttggttttgtatattctcttcttttgtttgtgccttaaggtgccttttgtatactccctgtatgcttgcaacaacaggagtttgaattatctcttgccaagaaatggcttctaatattggcaaattcctctgctaagtaatatccccaaccagagggatgtcggtgaaggttatcgtggagaggaagaccttcttggtcaagttggaaggcgagcaaggaggaacttggtgttcgatcacaaagcacagtagaggcgctgatttcgtcttaggttttgaaaaggaagcagtcgggtggatgatcaaacatttgacgaaagccatagaaatggagggtcacctaggttttaacagaaaattcaggggaaaacgttgtgcccacttgatggaagttggcttcaacgactatggaaggttcataaggatctcggagtttgctaccaagagaagatattgctgtttgattattccagagggcaagaagggcagagggtgggagaatattagaagggcgctgtcttcaatgatggtggtcccctcgtcgaatacagttgaaaaaggaaggcaacatagaggagaaggttcctcacaaagtctcgtgggtcccttacataggtcttttgcgaaagtggtcagtggtgaaggatcaagagaaggcgacattatttctgtcgggagatgggcgcgcgcagtggtgtgtgaatgcattgaggatagggttaactgggttgaggttggccgagtggtggcgagaaaattagggaagaaaggtgtagtcacgattgtaccattctcaggcggaaaaggagttttcttcgtcgaaacaacagaggaagctctctttctccaagacttgaggaagttacgggttgagggaaggatttcagtacagatgagaagatggtcgccgaaggaaaatgcggaaatcgaggggaagttcagaggaggctggatcgaattacgggggttaccatttcacctctggtctgaggtacacttgaagaaaatagtggagcaatgggggacggtgactgaaattgattggtgcacattaaaattgttcgatcttagcaaggcgaggataagaatcgcaatgaaagaaaggtcagtcctcccagctttactcgaggtgacagatggggagtgggtgtttacagttgccgtcgtagtggtcggagaagaagattgccggagaggtagcgtacagggcaagtcgactcgggaggcctttgcatctaacacggggacaggtgcaggaagacgggtggagaaaatcagatcaacggctggaggaagatgccgtgtcgaggaggataatagaacgaggaagggggaagaaagaggtggggctgtggttgttgcagaggggacacgtagtaaaggagtgcagacacagtcgttgcccaatttgaattcaaataaaaaggatgttgggccgtttgagaagaaggaagggggtggggaaagggccggaggggacgaggcctccgctgttgaggaccatcgggcctatgagaggaaggcccagactccatctaagtttggctcaacagttgaaaaagtggactgcagatataaaggcccgtcggggttaggccttagcccaagaggaaaagacccagtggagatggaggtgtcgtcaggaactggaaatgagtcacccgcagcgggaaaggggaaaatagcttctggatatggtcttgaggctcagaccagtagtcccgcgaagaagaaaacgacgatcggttcaaagaagctgtggtctatccttctccctccaagctctgagcgccgacaaggtcttcggtgtcgcagcgagacacttttgagcgagaaggacaaggtagacatcgatgagaacccagaaggtgtggctttaggggccgattacctggcggaaagaggatttagcgcgagtcctctcttctctcgccgttattcaaggatttggaagcatcgctttggggaaagggcttcgacatcacaaaacgaagtggccctgcacaatttctactccgacaaatataaggaaggatttttgggccgagtggggtccgatcctcgtggcgcaacagtcatggtgttgccttctactccaaaaatcagaggtaaagggctaagatttttggggaattgtggattgttggccgcggaaaatctagaggtaaccccgtcttcaacttttcagtctccctcatctcatttccccccttcttatggatccatttctcccttcttgagtcctgctgcccccactcttcccagttcaatcattcagtctctgaatcctttggagaaccgagaaaagtccgaattttttgtcataaaagatgacgatggtactgtgggtcaaactagtgttggcttccctaacctcgtattggaggtgaaccagactgctcatcctagccagatgactgacagtgttaacccagtgatgcctaataccaatccatctcccatccagactacagttagtcagagtgtgtttgcgggttccccaacaggtgagttccaaatagaaggaatttctcctagaaaaatggcaaaagtacgcgacgtcttaaagactctggatataaaagtatactccaggaggaagagcagatgtaccaaaggtttgtgagatgagttgaatctggtttggaggtttagggtccgtgtgtttaatccatgaagataatcaattggaataccagggggttgggttcaaggaaaaagagaagggtagttaaagaattcctgagatcggaaaaaccagatatagtgatgattcaggaaacaaaaaaggcagagtgtgacaggaggtttgtgggtagtgtgtggacagccagaaataaggaatgggcagtccttccggcgtgcggggcttcggggggaattttggtcatttgggactctaaaaaattgcacaatgaggaggtggtattaggttccttttcggtctcagtcaagtttgcagtggatggaagcgaacagttttggttatcagctgtctatggcccaaatagcacagcacttaggaaggatttttgggtggagctttcagacatttttggactttcttccccatgctggtgcgtgggtggagatttcaatgtcataaggagatgttcataaaaattgggtggtgctcgattgaccccaagcatgaaggacttggatgactttataagagaaaacgaactgatcgatcctcctttaaggaatgcatcattcacttggtcaaacatgcaagagcatcccgtgtgcaagagattagaccgttttctctactcaaatgagtgggaacaattattcccgcaaagtcttcaagaagttcttcctagatggacgtcggatcactggccgatagtcttggaaaccaacccgttcaagtggggcccaactccatttaggtttgagaatatgtggttacatcatccaagttttaaggagagctttggaagttggtggagagagtttcaaggagatgggtgggaaggtcacaagttcatgaggaaacttcaattccttaaggccaaattgaaagagtggaataagaatgcttttggtgacctacttgaaaggaaaaaatgcattttgttagatatagctaactttgactccatggagcaagaagggggtctctcccctgaacttttaatctaaagagccgtaaggaaaggggagttagaggagttgatcttgagggaagaaattcattggagacaaaaagctagggtgaaatgggttaaagaaggggattgtaattcaaaatttttccataaagtggctaatggcaggagaaatagaaaatttatcaaggtgttggagaatgaaagaggcttggtgatggataattcagagagcatcaaagaggaaatcttaaggtattttgaaaagctctatgctagtccttccggagaatcttggagagttgaaggcttagattggtctcctatatctagtgagagtgcgtctaggttggaatccccttttattgaagaagagatttctaaggccatttttcagatggatagggataaagcaccggggcctaatggatttactattgcagtgtttcaagattgttgggatgtgattaaggaggacttagtgagagtgttcgatgagtttcacaggagtgggataattaatcaaagtactaatgcgtccttcatagttctgttacctaaaaaaagtatggcaaagaagatatgagactatagacccattagcttgatcacaagtctttacaagattattgccaaagtgttagcagggcgtctaagagggatacttcatgaaactatccattccactcagggagcttttgttcaagggagacaaattttggacgcaatcctcatagccaatgagatagtggatgagaaaaaacgatcaggggaggaaggagttgtctttaaaattgactttgaaaaggcttatgaccatgtgagttgggattttttggaccatgtgatggagaagaaggggttcaatcctagatggaggaaatggataagaggctgtttgtcctcggtgtcttttgcaattctagtgaatggtaatgctaaagggtgggttaaggcatctagaggtttaagacaaggagaccctttatccccttttttgttcaccatagtagcagatgtattgagcaggatgttattgagagcagaggaaagaaatgtattcgagggtttcagggtgggtaggaacagaacaagggtgtcccatttacaatttgcatatgacaccattttcttctctagcacgcgagaagaggacttgctaactctcaagagcgttttgctagtgtttgggcatatttctgggctgaaggttaaccttgacaaaagtaatatttatggcattaacctcggtcaggatcatcttcataggttggccgagttgcttgattgcaaggcttctgggtggcccatactctacctgggtcttcctctgggtgggaatcccaagtctagtagcttctgggatcttgtgattgagaggatctcgagcagattagatgggtggcaaaaggcgtatttatcttttggaggtaggataactctcattcaatcttgtctcactcatatgccttgttacttcctttccttgttcaagattcccgcctccgtgacagtaagaattgagaggttgcaaagagattttttatggtctggggttggggaaggcaaaagagatcatctagttagttgggatgtagtgtgtaaatcaaagatgaaagggggtttgggcctcggtaggatttccttacggaattccgctctcttagggaaatggttatggaggtatcccagggagggttcagcattgtggcatcaggtcattttaagcatttatggatcacactctaatggttgggatgccaacactgttgttagatggtcacatcgttgtccttggaaggctattgcacaagttttccaagatttttccaagtttactcggttcatggtaggagatggggaaagaattcggttctaggaagacttgtggtggggggatcaacctctgggggtccgttttccaagactacttagagtagtcatggataaaaacattcctatttcttcaattctcggatccactcgccccttctcttggaactttaacttccgtcgtaacctttccgattccgagatagaagatttagaaagtctcatgcagtctcttgatcatatacatttatcaccttcggttccagataagagatcttgatctttatcttcttcaggacttttcacagtcaaatctttctttcttgccttatcccaaatttctggtttgccttcagttttccctaccaagttagtctggaattctcaagtccctttcaaaatcaagtcctttgtctggttagtggctcacaagaaggtaaatactaacgacatgttacagttgagaagaccctacaaagcacttagtcccaacatttgcatgttgtgcatgaagcagggagaaacagtagatcatctttttcttcattgccctctgacgatggggttgtggtacagattatttcagttaacaaagatagattgggtccctcctaggagcatctttgacatgctatctaccaattttaatggttttggatcttctaagagagggattgtattatggcaagctgcgtgcattgctttattatgggtggtgtggcgggaaagaaatgcaaggatttttgaggataaatcaaggaattcagagaacctttgggacatgattcatttccttgcgtctctttgggtttcttgttctaaggtttttaaggggattccccttaatgtaatacaccttgattggttagcggcatgcaactccattgggttggcctaacttatagcagttgtctgtatctactttgtattttctcgtatttgtttcattgtagttttgttttcttgggtgggaggattcctcatccttctcttgtactttcctttatattaatatatgcctttgtcatttcctatcaaaaaaaaaaaatactccctgtatgcttttgggttttcctcaaggtgcccttttctaatatatttctgcttttgcctatcaaaaaaaaaaaaatagtcttttaaaatacaagattttcaatcagttaagatgaaaggaaattccataatttctaaattttgataatatattttatagttttaagttatccttagattatatgcatactcattttaatatattgtgctcacttaaattttaaaattcaatttttgaatcaaaaggaaattccaaaatctcaaaaaaaatttgaatcataaaatataattaataaggtagttgaactgtaaaattgtgaaaattaaaataatttttgataagatgtcaaagctgtcaattttattgtaacttataatttgagaggaaacatgacttatgcaactctgatcaaaaaaaaaaacatgacttatgcaaccatctttacaacctgacagttggattagtattggtccccatttttttttgcttaccatgtttccttggaaatcgactttgatacttttttgtcatgagagacattattttcttattttggttgccttctgtgagtagaactcaaatattaccttcttactgttgaagtacatggtaccatcaccataacttttggtcactttccttataggggttctcaactggtttacctgagagactgcagtt

SEQ ID NO: 10423 - DNA, 7455 bp, Vitis vinifera
  Intron number 2 from transcript GSVIVT01034567001 (locus G SVIVG01034567001) derived from phytozome v7.0 (chr-ID chr1 8; pos 19340399 to 19347853)
cagttctggtggctgcaattgcctttaccatctatgttagttttcttgatccttattttctttttgtctttttgatcagaaacagaaatttattgatgaaaataaaagtacaagagaaggatgagaagtccttccttgaaaatacaaaacctaatcaaaggagtgcttacaccccactatacaaaaactatacacggaggctaattttttatccttattttcttttgcaattggcatttatataattttatattttatatgaactctttatgatgctatgagctctttgataaccatataaagtgctgaaaactaaaacaatatgtcgttccactaaccaatgtgtttgacaagggaaattgtttaccatttaaaagattcattgcacttaaaatggtctatgatttatagtcgtacatacgccactaaacactattagtggaactttaatttttatacctttaagatatcatcgtagcacttttttttccctttcaaagccaaacctttctgctcctttacttatcctttaaatgaaaaacaaaaaataaattttgatttaggattttggttacttttcctcttcctttctgtggtaatgagaaattttttgattatgggtttatgaaaatgattatattttgattggatttgaatttctacaactactaaggagaatgtgttggctgtatgtggtgatttgagattaaggtttgattgtaattagttttgtgaatgagtgcggattatttgtggataattacattctcttcttatcccccattactccctccgtgccaggattcttttgataaaacctcaatgaatacttcttaataacaattgtgtttgtgtgaatgagggattgattagtttccactagtcactccaaaatattcccacatggtttcaagaggaatataaaaactatttgctgtgaaattcattacaatctgatgcccttttttttttttttggttttgttttaattttatttttctaatttgataagattttatttttcttattttataagataactatctgtcatctaagaccttgtttggaaatgggggtttgtttggccattgttttcgagaacaattttccattctccataacaaaaaaacaagaaaacataaactgacaactaaatattgttttatgttttctatttttaagaacagaaaggagagtgttttcagagaacatcttttagttgttttcacttgttttttgagggttgttttagaaaataatcatataaacatgtagaatgattaaaaataaagtactagatataaaaattatttttaaaacatatttaaaaatataaaaaacaagttagaaatatattaggttcccgaacagatttttgttccacaaaacatcagaaaacaattttcaaaaactattatcaaaaattgtttttaagaactgttttcgaaaatagttatgaaacagggcctagttttctattcttaaaaataaaaaatgaggtgttttcaatgaacatcttttagttatatttagttgtttttacttgttttctaagagtcgttttaaaaaataattacacaaatatggataatgattaaaaataaagcattatatataaaagttatttttaaaatatttaaaaacatagtaagcaagttaagaacattttagattcgtaaacagacttttgttctacaaaatatcaaagaatagttttcaaaaaattgttttaaaaaattgttgtttagaactattttcaaaaacacttcccaaacaaagtttttcttttcttattatttgactattttcttccttggagtttctaaagaggtttcactactcaagaatatcatctctgcatgtggttaagaacctattatatccttattgaagatttttaaaaggcccataggaaaaggattttatgacatataaatgctttgagatttgataagaacatctttgaggtggaaaagagaaagcatggtttgttcgatgaagattttgaggtggaaaaggagatctttgaggttaggtttgaaggctaccatgagaggagttggatttctattactaaaaggattcaaggtgtcgctttctctatggcttttgaaagagaagagattggctggctgttgaagcattcgaagaaggcattggagccagagaggcatttgggcttcaacaaaaagtttagagaagaaacaagaacacatttcctggagatttgttttaatagtagaggtaggttcatcaagttgttgaaatttgctacaaattgaagaagctcaacaatgataattcctaaggatgataaaggtagaggatgagaatccacaggaaggagatatctttagtaatggaaatcctgttttagtgttcctttggttagacatagaggtgtcaaatgggtcagacctcctagtttgggtttggacatgctaaaagaatggcctgcccaattactgtagcgggttgtgttgggcctaagggcatgatctgttgtgccattatgttggcccaccaccaacccgtcgtgctagcccatggtaccccatcgcctgttttgtcggctcactctcatccaaaggctattttttgcttttttttttttttttttttttttttttaacttttttcatgccaaatgttatcaatgcccctcccaacaattttataataactagtttgaggggtaaatgagtaaatcaatcactatttttttttaaaatttttcatgctaagtgcaatcttacctctttttttttcatgtaatttgttgaaatcttcaataaaaaagattgtgttttctatatcgcatcttcttttgtgttccaacatttttaatttattattgttatgatcaacaataaattcacatatgttttttttttttttctatttttatggaaaaaaaatttaaacaaattttataattacaaacttgataaatataaaaaatacaaaatgtaattgtttaagatgtttgaagtaataaaaaccaattgcacttaataataaatatattctaagacaatagaaataacggcacgataaagagtgagttgttcttcctacttgtggggcttcaggaggggttgtgattatttgggacacattcaagtttagatgtttagagatggttctaaggcttttttcaataacaattaagctatatttagataaagagtggatttttttagctcaccttggttaatggtcctattaatccaatctcaagaaggatttttggatggatctacaatacatttcttggtctaacttttctaaaatggtgtggttgaggggtggtgtttgtttaatgtcataagaagaatcttagaaaagttgggttattctagtttaaccttgaccatgagggatcgtaatggatttataagagaaagggaattaatggaccctcttagaaatgcatctttcacatggtgaaacatgtaagaatttcttgcaagaggttggatgaatttttatactcaaatgagtgggagcaaaggttccctcaaagcctctaagaagtgcgtcccaaattgacctctgatcattgtctgatcatcctagacactaatccatttaagtgaggaccaacttaatttaggtttgataacatgtagttgctacacccaattttcaaggagaaatttaggctttgtttgggaaatgtttttggaaacaattctgaaaaacaagttttgagaacattttttgaaaactgttttataatcttttgaagaacaaaaatctgtttgggagcctaaaatgtttttaaatatgttttaaaataacttttatatgtagtgctttatttttaattattgtccatatttgtataattattttttaaaacaaccataataaaacaagtgaaaacaagtaaaaacaaataaaagatgttatttgaaaacaccttattttttggttgtcgaatgtgttttcctgttttttttttttttggataacaaaaaattatttgaataaacaattgccaaatggggctttagtttttcgtggaatatgtgccatgttgtaggatgggaaggtcataaattcatgaagcaattatagtttggccttaggatgttggtaaggccttagcaattacagtctttccccattccttttcaccattgcatctggtgtcttaagtagaatgccttatactaagagtagaggagagcggtttattaaagggtttcctagtgggcaaaagtaagattagagtttctcatttataatttgtagataacaccatatttttttctagagcttctttggaagatttgcaaaacctcaagctaaaatcattggtttctgggcgcttctcaacactttaaaatcaatttaaacaagagcactctttgtactatcaacacaagttaggacatgatcttggctttgatgcttgaatgtgcaatctttgattgacctttcacttaccttggtcttctattaggagggaactcgaaagcaaacacgttttaggatccgatgattgatagaatttgaaaagattaaatgggtagaaaaaagcctttttgtcattaaggggtagaataactttaatttagtcttgcctgtctcacatcctgagctattttttttatccgtttttaatattccaacatcagtagcattaaaggttgagaaatttcaaagaaattttctttggtcaagggtcataaatgataaaaaggatcatcgtattaattgagacttagtgtgtaaacttaaggagtttggaggtttggggtttgggaaaatttctttggggaattatgttctattagggaagtgactttggaggttctctaaggaaagttatgtcctttagcgtcatgttattttgagcatttatgaaacatcctagtcaatggaatgccaatgttttagttagatggtcacattggtacctttggaaggccattgcataggttttccagttttccctacccacgttcgttttgttgtgactgatgaggtgggaattctttttttggaaagatcagcctttgtgttcaccatttttaagtctttatagagttgttacaaattagaaatctctccatatcaactacccttagtaatgcctcttcttttttctgagaatcttaatttgcatcacaatctcattgacttggagattgaggaccttgaaatattcatgcttctctaactcatgtgcatttgtttctatccgttctagatgcgagagcctaggcattatcctctttaggcttattcttagtaaaatcattcttcttgactttacctaatatatcatattcaatttctttttatccagccaaatttttatgaaaatctaaagtcccatctaaggtcaaggtttttccttggttagtggcatacaaaaaaggtaaataccaatgacatgtgacaattgagaagacttttcaaatcccttattcttgattggtgcatcttgtatacagggagtggagagatgattggccatctctttccacactgtttgatagctttggcattatggcagtcttttcaaacatgccaagatgaattggttttaacctaggagtatatgagacatgatgatcatttcatattggagtttggagatctccattagagataagacccttcgaaaaatcgcttgtttcactttgctttggattgtgcggttagggagagattttagaatctctgaggataagtggaagatgttagaaatgttgtcaaatctactttacttatagacaattttatgggcattcctcttaatgttattcaattcaattggcattgggtgtgtagatcaaaagggttggattagcgatgagagaagcttagctcgggtttgaggagatgatatctttgttcattcttatatggtctattccattttgtatagatctccttgtatagtagaggagttcaattatgtttggatcggttttatgtatttatttgggggattcctcatccttctcatgaactctttatccatggttaatagatctcttgtttctaatatatatgttaccttaaagtttctaagaagaataaattataattgcagtacaactaaattgtactctataatagattttaccctataaatatctaatgctgatcaaatattgaagattgttttgattatggttttagttatcactctttcccaaatttaagttgaggttttgttgattaattaattatttagtttttgtccaacttctcatttttttttctccttccgttcttttctttaaatcaacagctctctacagaaattgagctgctgattcctgtgtactagggtgtgccccctttgataggtgctttttattcaacatcttatcatttacctataaagaaaataaaaatagcactgctgaaatgtgtgttatatatttaaaactttgtatgtagatatcatttggaggatgccatcggaagtgtaatggcaaattgtaaattaagatcttatataaaaagaaattaaactacaaaactgtcatgtttcataatttttatttagcatccaaattctacaattgaattgaatttaggactggaaatttagatgatactggtatatttttcacttctacaaattcagttcttaaagcctcagttctaaaatttttagtgataaatttcaatcttatcagacagctctttgttcttcttaatatcctataaggataccttaaaaaattggaaattacataattttcatttttccaaatttttatttaccacaaaaattatacaattcacttggaggacctacatgcctttttttttttttttttttttttttctaataggtaattttttccccccttttttatccctgttgggattagaacctggaaccttccataaacccaccccaatcatttgccacttgagccaggcctcaagggtaggactaaaacatgcttttcacttctacaaattcaaccctttaagcatttgtaatgaaatttttgtgatctcaatattcaaacaccttttaggactttttagtctccagtaaagttaaggcaccatatttgtgtatgttaattctgtttagtggacctagatctaccagtgacaaggttgtgaatttgttatggtgaataattatgacaatgagatgtataactaaattttgggagtgatgtgaacctgtacaatttacaattcacaattaatgttctgattgtaaattgagattggatacttccagaagtttctagtactcatgtataagagctccaccaccttctttatgtcctcttttggtttttagaaaatttcattttatagctttctcattttgtaggttaccttgggaaaatctcttctgtaatttcctatctttacgggtcagttgtggtgtgccttattttgatatctttattggtttggataggttttgctgcttctttttcttacttcggcccgaga

SEQ ID NO: 10424 - DNA, 1388 bp, Vitis vinifera
  Intron number 2 from transcript GSVIVT01034495001 (locus G SVIVG01034495001) derived from phytozome v7.0 (chr-ID chr1 8; pos 20363881 to 20365268 reverse strand)
ataacaagtgagtcttgctttattctttgggctcaaatggatcatatagtatgtttgttgcactattgctgcacatatgtcaattttcttcaaattctttggattccaaaatagttagagagttttaaaacatggttgaattgttttttattggtagttaaatgaaaaaaaaaattataattgccttaaggttgtagaaccttacacatcttcactgttttgaaggccctgctatttctctctctactaaggcaccaaacaaagaattatgaaattggtctctgtagtcaagactctaaatgaccttggcattacctaagccgagccaaagagcattagcctcacagaccaagttccaagtccagcagtggattacaagatgatttctggactcctccattgtgcacatttttatactagtatacactagtactctgtccatcgatgttttattggtttgattaggttccatgtgtttgattattggttctagggaattttgggatatttcaccaatagcagtaatatggatcaattcatttcccatttttggtaccttttgtgatgttttctgtttgcaatgcacctcttggagaagtagtagcccaattttagtgttgcataactaattagctataactattcaaattgattgctgctgcaagtcagtttttggtgatagagataactaggctatatctcaggagaaaatattctaattcttatgattcatttaatgagtcgtaggaaggtggaattttactggcagtccttgttggttcatttaatgagagcttatgcttagaagatttcatttatagagggcagccaagctgatgaggtatgcagatgatctattatgtagttttgagatactacagcatatgatgtctttctcaggatggattccacctcttttttccttgttcattgtctatggcatgttaattaaaataaaacaatatctaatttgatatgtggatgagttgaatgtgttcattagcaatgaattattgtttccatttccaattaaataaagttcaatgctggccactttgcatcatccgaaaatgtgattaaaattttctattcaaattttttgcctccagtaaagcagtgatttttgtccttattttcaagtggtgaaaagttgtatggatgtaatatttattgctattggttttactttctttgtttcattttttttttcatcttttttctccttgcaaattttcaaacttgttgtttcttattttattttaaaatttaaacttgagtgtatatctcgtaattaggtgggacattattattgctgtatgtgaattcttatttggattattgccattgtgacagtgattgttggggaaatagctaattttgctgcctat

SEQ ID NO: 10425 - DNA, 15518 bp, Vitis vinifera
  Intron number 1 from transcript GSVIVT01035584001 (locus G SVIVG01035584001) derived from phytozome v7.0 (chr-ID chr4 ; pos 2501748 to 2517265 reverse strand)
gccccgtaagcattttaaccgtcttttaagttgttaagatttcttctcctctatattttatgctggatgattcttcacattgttcttgcattctgaattgggttacggtgtatatagaggatcacactttgtctttgattgactttatagattggttgttcgttaagtaaggggaagacctttttttgtctccttactacctagttttttgggcgttgtttgtatacttcatatgtattgtttttgcagattctaggtgtttctaatgcaagcacttatttgcctatcaaaataaataaataaataaaatattaagactgagagcaggcctttgctacgaagttctgatcgatcttttctgtttcaattcccttttgaagatcatttatgtcttataataaatgctatcaaatatattaaagacctttctactttattctagttagggtttacttgttccttagaggctctcccttcaaacatagaagcaagcatttgatgaactctggaattgttggaggctgttcttatgcagacatcccaattttcacacttctctttccttctttcatctcattaggctatgagaatgtacctgttttatgctgctttgttccatatgacatatttatccatactcttcctttgtgcatcttggatttgacctattacctattcattattgttatttttatacttagttctatcaggatgtaacagtccttattgaaatctaaaaccttgaaaaccgatggttgtgccttgttgttgggtctgattctacttctgggcattggtaacagagtgcacatgatgttattcttgtctggtgggtccaaaatatgctgattgttatgaaggttgaggcagaagcagcactggattcacttaattcatcctcttcatgtcctttatcatgaatagtggtgattctttgttggggctaatgttccaaacagtgtttgacctcaagatacttaaatgccacacataagcaatgttgttattttggagtgtctcaattgtagtttgctgcctctgttttgcaacttgttggacatactatgtttcttcgtttgtagtttgtgtgcatgtgtatacatatatacatatacacgcaaacatacacacacacacacacacacacttttttgttttggggttgttagggttgtgaggggtagatccgtgtttatttgggtgattgtcctggtgttgggaggggactcttggttggttcacaattgatatgttcctcttccacgttcttcccatcttattattcatttactactagatgtgcccctggagaattgtgctaaatattggccatagtgtcatggcctctaaaagggatcgggtgctaatatttggttcttattgaattgcacagctaagaaacttttgcatacgcttgaaagtttatgttggtttattgatatgatatcctagtcttctctttaaatgattgttttgtcatttgggtcttcctttggtgctccattcaagttagatgcagcttggtactttgatgaataatggtttaagagaagattggctttgtggaaagaaaattcttatctaagggtgaaacttgcgcttattaaaagtaccttctttaacttagtgtctattttatgcatctatttgtggtccctagccagaaacgtattaggttagagaagattcaatgaaatttcctttggagtggggtgaggtattacttggtcaattggtcataggaggggttggaaggtataggaattagaagccttgtggtcatgaacgaccattttttgggtaaatggcttcagaaatttgctattgagatggattacttatgtgaaagagccatcaaagagaaggttagagaattagaagggggatggtggtctcactgggaggagtagggatggaatggtttctgttttaggacataggtctgagttttgaacttatgtatgtagtagttatctctattgagtgttatgtttgcttctttattcaattatgatttttttataagattggctacatggtaaacttctaagtagagtgcagtaagagggagtgattttaagtcttaccttaaggctcgtcttggtaggggttcaagtaaagtgccttgatttacgtctcaaaggcttggatattggtgctttgacttcatagaatgaggtgcatctttttgcttaactagcactagagtgggtatggctattgagggaaaaaacaagctctttagaaggtatgctaagggctaaagcttttcagtctctcaaatctgtgggttgatggtgactccatattgtcatttctggagaggtaaaaaaggatggagtttataattatgattggtgtatccatcaaattattgatgttggatgcaactggagatgttcttgttattgggttccttgctcaacgaaccaagtagcatatcttttgagtgagaggcttatcagttggtattttaatttcccctaagtcgtacatacagttttgggtgtatattatttaagttccctttttaaaatgtgcagttttgttttgcttttcttaagagtgacaggcatataattccatatttttttttacaaatttttgtaaattttggaaaaaattttcattttttttttggtacttactaattccaatgtgatgaagtagtttgtttctaatatacttttttatttttttattttttaaaattttttttatcaataagcaaaagaattgtattacgaagtggcactaaaatagagacccacaaaagtacagtatagagacactctccctcttacagttggacccaaaacaataagaaaaaacaaaagaccttctccctcatcgcgaacccacccaatctataaaatctattaaggtcgaaggaccatcttttgtgacatatattagaaaagtttgtttctaatatacaaccaaaaaaggtacatttgtgacatatatatatttggtatttaaacctctacattagctaaaacttatattatttatcttgaattctaagtattgcgcctattcatgacaataatggccctaatcaacttagttttataatatgactaggatttgatacattatagtatgcgattcttctacttattgatagttgacactttgaagctcaacttcaatgaatgttccttgggtaatcttagagtagatggacattcatagactcttgtgtgatcataagggtggggattttctgtacttctttttaaggaagcaattttgagccaattttttatgtgggtagcatctttagttgaagctctcaaaattataagagttggatctctccagtatcctaatgaaggcgaatctagtggcaattctatcattggtggctaacaggcgaatagggtcatggagatgcgactatttatgtggagggttgtggacctcattagggtgttgggtagctctttcccagaagtgtaaatcggcaaattggaaatttgagaggctattttaagaaaaaagcctcttttctatttcactttatcaaggacactaatccttggtgttgggaacctgtacgggatttctatagggagtttgtatttgtcttttgtatgcatgtatgcatggatttctttttgtttctttggtaggatttatcttttgtttttggtgcactttttttttttaatctattaaaatacaagtgtagtttattataaaaataaataaactatggtgtgggagtattaagtaagtttgaaagaaaaataaaatataattatagacttgagaataatgtaaggtaacatgtagagttacttgctctagcaacatctaaagaggcttgggtaaatgaagtttggacagccgagggggaaaggaggggaagttggactttgtgtttcaatagaccttttaatgattgggagatggaagaagtgagaaggttgctttgttgcttggatgggaagaaggttagggtggatgaggaggatagtgtgaggtggatggactcaaacgatggggttttttttcggtgaaatctttgtttagggctttgcagccgatgtctcttgcttcttttccttcgaagatcatttggaattcttgtgtgcagcccaagttaagcttctttgcgtgggaggctttgtggggaagagttctaaccttggaccgtttgcaaaagaggggttgggctttgacaaatagatgctttctgtgccaaatgtgtggggagttgatcgaccacctcctccttcattgtgaaaaaacaagggaagtgtggatgttgctcctttcgttttatggagtatcttgggtttttccttatttggtaaaggaaacctttgtaggttggaggggctcttttgtgggaaagaagaggaaggtggtgtggcaattggaaccgttattcctgttttgggttttttggaaggctaggaatacaatggcttttgaggatggagtgctgtctattcaaaggctgaaaacttcttttgtgtatttactttggtcagaaaccaaattgtggataaaagatggttcttcgactttaatagattttatagattgggtgtgtttgcgatgagggagaaggttttttgttttttccttgttgtttgggtccttttgtaagggagtgagtttctctatactgtatttctgtgggtagctactttagcctccctttgcaatacaattttctgcttattgataaaaaaaaaaacatgtagagttacttcacatgatatataatgttttcaacaaatctttctactccattttggagttgaggcatgcaattcccttccccatggccatcacttggaattcttgggtcctttcaaaagtgtgtttttttgcatgtgaagctagttggggcaaagtattgaccatggatcatattcaaaagagggtgggtgttggcgaatagatgtgctttttgcaaatgcaaagaggaattgacaaatctcattctcattcattgtattgtcgtgagatcgtttgacagcttctattctatttgtttgacattgcttaggtccttccatcttcggtatgggatactatattagggtggtgtagttttttattgggaaggaagtgtaagaaggtttgaagaatgggccccctttgtttttttttttggataatatggaaggaagaaaccaaagagtgttccaaagtaaggagtagctggttcaagcattgaaacactcatttatgtcatgaggtagcatgtatatagaggaaggaccaatgtctcttattgattttgtagattgggtaggttcttagtgagtgagggaatggttgtttttggttgttctctccctttagggtggtgccttttcgtaccctctgtgtatgttttgtatagcattcttgttggatatttataaaatttacctatttacttattaaaaaaaacaaatattttcaacaaattcactatatgagctatccctttaaagacaaaaactaaatgaactatttcatttgtccataaaactactttatttggttaggatacctctcataatggaatttactcgattaaacgctttttaaggctttggtttctaaagttgcttggacttttcccttgagggaaatttggactcctaaggcacttgaggcgagtttcttatgtaagagggtgtgtagaagaagaatggattagcttataagaggaggctggacattggtttttagtgtagtcttccaaaacatatggaggaaactattcattaattttgaaccattgtgagcaaaatgtcaaggagcttggcattttccgtatttgggatgaattgactctgaatcacttgcagaggtgggtttcttcatataagaggtagttgtggaagaaaaatggattaattgataggaaaaggttagatgttggttagtcagcattagctttgcaaatatttggagagaacgattcatcaattttgaaccattggacggagctgtcaatttatggagcttgatattttccctacctggaatgaattgaatccttcctagcacagtcaaagattgcatagttggcatgggtattttgtggctgagagatgaaaggtggtttggaaaatgatttcgctttgttcatgttggaccatgtggaaagggagaatataagaacttttgaaggctttggagctattggaaatgggagtggatgatatatttcccaaactttgcttgaatgattgaacctcaagatgggaatagatgatttgtctattataaatgttgctggtagtttgaccgcggattagtcaaagtagtgtagtcttttcttttgttggccttggcatgccctatgtacttcatctttgctaggttgcaccctatttttattaaatatcactctttcttttacttctttctatatgggcacgtacaaacacacatatgcgttgttgatttgcctatgaaataaataactaactatattcagatgttaaatgtataataccttcctgtaagtttgttcgactaacacaggaagttggtgaagataaggctgtgagtcttactcaagggtgtacatagatgatcattcaataactatgataggttttgcagactggttaaggtccaagtaaggggaagaagcttttttttttttttttttgtgttctcttttttcttttgcttaccttgtggtgcttttggtatacactgtatgcattttggtgtgcttttttcataggtgcttgtaatataatttctaacttgcttatcaattttttttttttttgaaaaaaagaaaaagtcttactataaggttcatttagggtaagaatcaaagaaaatgccttaaactcaaggataaaattatcggtaaacatgaatatattggcacttggattttacggatatatatatatttttttttgataagtaagcaagaaatatattatagaacgggctaaacgccacaaagcatatagggagtatacaaggcggctaaagcctcaaaaaaagaaaaaggaccagaaagaaactacctccccttaagtggaagctatccactccaaaaaacctatgagggagaaagactcctcacctagatacactttggcccaattccacaagttacagacaaaagaatactttaattgctgaatatttaactcaccccccctaaaagctaacctattcctctccctccaaaccgtccaaaaaatacataacggaatggatttccaaatctttttccttttcttccctacaaatgagcccctccaggagattaaagtctcctttacagtttctgggaggacccacttaacatctatcaacccaaaaataatatcccaaagggctctagtcactatacagtgtaaaagaatatgatttacattctcttcttcacaaccacacagaaagcagcaattcgggagatgcacccctcttaactggagtctatccaaagtaagcaccttcccccacgtagcctcccaagcaaaaaaacagactttagttggcaccctatccacccatattctccttgcgggaaatactgtgacattaggcttgtccaactgcctgtaagcttctttgattttgaaaataccatttcttccctgcctccacacaactgaatcatcctccaatgagggcctgtagcccctcaaagtattaagcagctctccaaccatatccatctcccaatcattgaagtccctcacaaaaacaagcttccaatccccttggcccgaatcctgatcccacatctcctcaatcgtagcatccctatgcacggcaaggacaaagagttgattgaagcattgggacaacggaatgtcagtgcaccatctatctttccaaaatttgattttggaacccttcccaactataaatgccaaattttcccagcaccaatcagattccttcattatctccttccagacccctactccagccgcaccactaaccttctttggcctccagccataatcctcttgcccatattttgtagtgatcacttggttccagaaattattcttttcacaagcaaacctccaaatccactttcccagcaaggctctattcagagtggctattctccttaatcctagccctcccttgtgtttctctgtacagaccgcatcccatttaactagatgaacttttccctccaagtttcctcccccccataggaaatctctttgtgttttttccactcttttagcaacagacttaggcatgcggaaaatagacagttggtaaattggcaagctagccagggtgctttttatgagagtgattctcccccctttggatatgtactgtcttttccaaagggcaagtctccgcctgatcctctcttccaccccatcccacatagaagtagccctattggggacccctaaggggaggcccaaataatgagagggcaaagaccccaccctgccacctagctcagctgccaactcaagaatatcctccacgtctcccactggaatgatctcacttttggctagattaatccgaaggcccgaagccgcttcaaaccaaaagagaatccagcttaggtgagaaacttgctctttgcttgcctcacaaaacacaattgtgtcatcagcaaaaaataggtgggaaatattcaaggatgttctactgccaccccgtatattgcaccctgaaatataacccccctccaccgctctcctgataaggacgtccagaacctccattcccataacaaagagataaggggaaaggggatccccttgacgaagccctctagtgctagggaagaatccagctggcactccattaacaagaatggagaatttagcagaggaaacgcaactccacatccattccatccacttgggcccaaaacccattttttggagaaccttcatcaagaatttccaattgatgctatcgtaagctttttctatatccaatttgcagataagacccttttctttcctcttctgccacgaatctatcacctcattagcaattaaagacgcatccagaatttgtctaccctttacaaaggcattctgagcaatagacaccaccttaccaatcacttttttgagcctattagctaaaactttagccaacagtttatagagcccccccaccaggctgataggtctaaagtctccaagattctccgccccacttttcttaggaatcaacaccaaaaaggtgttgttgaggctcttaacaaaggaactatgctcatgaaactctttaaacatctccatgatctcctccttggcaaagtcccatgcatcttgccaaaaggcaacagtgaagccatccgggccaggggctttatccccattcatctccatcaacgccgagtgaatctcattctctgcaaatggggtttccagactctctgcatcttgcaggctgatacaacccaccggaatgctaccaatatccgcctgccaacccatgtcttcagtaagcaactgctgaaacgagttcacaacaccttctctcacctcctgctcctctactagccactccccattaaccttaattctatccatagcgttgtgtcttcgatgtgcactagccattctatggaaaaaccccgtatttttgtccccgtcctttaaccaaagctcccttgagtgctgtctccaatgggcttcctccaacaggacccatttcttaaaggaatctttagcttccttttttagttcggcttcctccatagacaaaactctctcactttccacccgatcccaaaaatctacctgatgtaaagctgaagctttattagtttccagcctcccaaaaacctctttgttccacactttcagcttctttttaatttccttcattttgacggccaatctataactagcgctgcccctgacttcaattccttgccaccaggttctaacaatgtcattaaatccctcaaccttaagccacatattttcgaatctgaacggggttgggcctcttcttatcccacccccctctaacacgattggaaagtgatcagaagttggtcgagataacctgccctgcgtgacgccactaaactgatctaaccagctaggagagactaaaaatctatctagtctcgcccacgcctgattattcagccccccactccatgtgaactctcccccctgaaggggcaagtccaccagctctagatcatccacaaactctgcaaatctccgcatggctgagctggttcttctttggctgctcctttcgtgttggaacagagtgatgttaaaatccccaccgagacaccagggatcatcccaaaggcctcttattgcccccagttcttcccacataccctccctttccactttggtgagagggccatacactcccgtaaaaacccaagtagccccaggatatatcaggaaatatcaatggatgttttgacaaaaaaattaatgaaataaagattgattaaaactcatggaagtattggaaaactccaaaaatgatagaaaaacaataaatttgaaaacacattaataaatttgtaacattatgcaataataaatgaatttgaaaatacattaatattaaaatgataatatgtttagtttaaatatattgaaggacaaaaagaaaggatgatatttaaataaatattttttatttaaaaatgtggataacttttttataaacttatatttaattagtatataaaatacataataagataattaaatttaacttatttatataatttattttaattaatttataatataatatatattaataatttatcaaagatgttatgacttatatatataatatttcatacacatatttaaatcacatgaagctatggtcaaatggcataggccacccttgaagtaattttttgaagagtaagtgcactcccacatcggaatttggagagaaaaacaatgtctatttaatagatgttgccccttccacccgcacatgagttaatgggtgggctaggtgggctagatgggctgattttcaacattggaccctgtatattggaataattgctttttggcattaaatccaaaattgaaaagggtgtgaagtggcaccaaaaatttcgtcgataacactgaaaggggtgtgatgtgacattgggccccgcatttaggaataatttctttttggcattaaatccaaaattgaaaagggtgtgacgtggcataaaaactatcatggataacatcgaaaaatcgatgtgatatcagtatattgccgatggatcgacaaaaaatgtggaaaaaacatgaaatttcagactaatgaaatatttgtggtgattatcatgttggtgccgctcgatacttgaaatatcaatgatatttcgccgatatatgccgacatttcaaatcttacttaaactacatcccaaaggcttaatcatggtcattttctaatgtctttatttgaaacacatttgccttggtgcaacatagttttgcaatatgacttaatgtggtttgatatagtatgatatgtgtaattttaaaattaaagaggggaaaaaaatgaaatataattacacttgggagcaatggggcagaggatatagagtttgttaaaatttatgatacacaatatgatatatttttattttattattttgtgtagaagcaacaagtgattggtcagccatatcctcatttattgtggcatagtggaaagtttattgtagttagtttttgctctttttgggttctcctgggtggtgccaagattggttagagaggttttattgggatatactagagttttgtgggaaagaaaaaaagtaaagcgtgaataatgactcctctatgtttgttttgtactatttagcaagagttgaacccacctttgatggggtggagtgattagttcaatatttgatttttttttttttaaatataatttataggcaaacagaaagaatatattgacaagtggcaatcaaaagataaaaggggcgtgcagccttagtacattgagagtatataaaaggtgtcataaggctagaatgaaaccaacaaaaaaaaatgtgggaccctatgcaaacaatgaagttaaacatttattattaattaattaatttattctgtagaagcaatgaatagctagtcatctatatcctcatttattgcaacatagtgggaagcttatcacagttggtttgtgctctttttgggttctccttggtgttgccaagattggttagagaggttttcttgggtgtatactagggttctgtgggaaaaaaagaagcaaagcatgaacaatgactcctctatgtttgttttggacaattttgcaagagctaaactcacctttgatggggttgagtgtttttccattttattacagtgtatattacatagtgtaccataaaattttccacatattaaggaagaaaaaaaaaagatacgtatatttaaatgcaaacatattgccacaatggagtaaagaaatagatgacaagcaatttcatgaaacatagtaaggttaaaggaagtaaatataggcattctttaatattagacatcgatatttcaactcaacaaaaatatgatgtcttaatgaatggatatatgttaaaaatgatactcaaattgaaaatttccatgtttgaatgtaccactgtagaaagaacttttgatggtatgagacaatcaagtgtttcatgttatatactcatcatgcattcttatataatggtattgaatatttaatatccaaatcatatatgttagttttatgttccaaagaaatagtctatctattgttgaagagttttccccccctttctaccatagataacttaaatcctgggatgcttgaacttaggaactgtagtttgttgttagggatttgtggatgttggagagcatgacatatatctgtggacccaaaatcctaacagcttaagcttttaaaaaaaaattggttactcaacatgctatcagagtctcatttggcgagatgtcatgtgctcaaacctcactgcatgtttatttttccaatttattaattccatgtgtaagtgcaaaggaggccatttttggtttgtttgtgggtatagggcctcatgtcaatgaaggtgttaaagagatatacattttgagaccaaattctagtagcttaagcttttaggaaaattgacaactcaatagctttcatcactaaattgaaaaaatgtttaccactcaaaaaaatcgagagagagtgatgaggataaatctccaagatatatatcaggaaagagagttagtattagtgcaattaaagtagaattagtcttagttggaattaaattaggattagcatttgttggagttaaattaggagtagccaataattagaatcataattatgttataagagaattagaattagaatcataataggttattagaatcttactagactttggattttttaaataagcttataaataatgttaattgatgtagaccaaagtattaattaattgatgattaataacattatgttttcttgcatactatgcaattttcaatggtgagactcaattgatttcttctaggtgaaactcttaaaaagccttaatgcgactctaaggtttctatcccttcttccccttatcttctttctctatattttgttttattttattttgctgccataaactttgtcccttatttctctccttagaccctcaaagataaaaaccttaccccacctatttgattgtaggcaaccatcctagggttgtcctacatcagagactgacaactggatttgcaaaatcatagatgttgctagtgaggtgggatgctatttttcctgagttccttattctgctagtcaagttgcagactagttagccaaggagcaaagcacttggtcgcctttgttggaaattttcttccccctttagtgtataaagtttccctagtgtgtgtgtgttgcttctgcttttgtttgtgcaaatggttttagcttttttatggaacaagatactttttttctttctgatcagcaaatgtacaaggattactcatcctccttcttgtttacctttcaatgaataaatttgcctatttctgatccaataataataataataataagttgtgaatttcagcttctcttctaatttcaagatttctgctagttgattctttggaggttttccttatttctatctagtgggaacattatacatattatttttgtggatattgattttctattagttcctcatttcattggcttatgctcattgctctagaaaacattcaatgtttttgttgtctgtaaatgccattagtttccaatactgatattgaggacctgcaacattgttacttaattttaggttatcttctctttaactgcatcaatgtgatttggaattctaacagatcagagaagagtgctagagtggtggaggaggggtttactccgtgtggtagttttgctttattggacttcattgctgggcttggggttcttgaatttctgttttgttctttgagttggttgtcacatgtatgcttttgcgtgcatgggttctcttgcttattaaagagggggggaatcagagaatagagttcccctaacttctcccctcctactataagcttgtttggatagcgcttgaaatgtttatgtatttagtgcttctatggaaatattttcaagggaaataatttttaatagccattaaattcattttagttgcttgttttaggtgtgtcccatttgaaggattgaagtaaatggtcaaagttcatgttactttagatgaatagctttctttctttttttctccaaagaatcctcatctcacaagtagagtggggggccaacaaattaataacaataaccatcttgcttggaccgatatatatcattattaccataatggtagtaattgttcagagcccatggaaactattcatgttggtggtccagttatgctgtcatcaaaattaaagtatggactccaagcagagcccatttagttattgtcacattgaatgtctagtgtcttgagtgcccttccatgcttagtgcttagaaccaattttattttacattcggagcaaatgtcttttgtagagaataaaattaactagtcaaaggagcatggtccaactaatgaggtgggagttgaaatctattttgtctgggacctttttctgatctctatggttatccaaagaacttgtttaacgtataaactggtctaaagacactgtctgtatgccacttcatgttacccgactaccagataggctgcttggtactattgtatcattttaacaaatctgttctctctggcttgtactataatgcatggttccagtactggtgattaggatggtcatggagatggctttttctcattttaccaatttgaaactgttaacatttggtcgacatggtttaagaacagaacatgaaacaggaccaccttgtaatttttgttgtagattcttttatatttataagtgattcattggttttgattttttgatgtgcgttacttttcttgcagagag

SEQ ID NO: 10426 - DNA, 9875 bp, Vitis vinifera
  Intron number 7 from transcript GSVIVT01017869001 (locus G SVIVG01017869001) derived from phytozome v7.0 (chr-ID chr5 ; pos 4161976 to 4171850)
caaagtttgacataacagatctgaacaccatcaaggttttattctacaatatatttctcttgggatgttacatttgattgattgctttggaatgatgaagccatgaattcatgattttttattttattttaagttctcataattatgagttcatttacataactgtcatgttgtcattcaaagtagctggttgaaaatctttttgttaattctctttttcaactatgttttctgttgtccaaccttatttaagacagcttgtgacaatctatgatttcattttgcaggtgtgaattttgtgcaatcaagttgattaaatcaggaatgtgttcactaatttatacaatactttgtcaagtaaaaatgctgtagcctaactcaagtgtttaagaacctgaaaaacccatgctttaattgaagactttaaacagtatagccattaatattgctttttgggtttccaagcaaatgaattcttggagttctcctgaagatctaatgtaagacaacattaggaaggttgtctacaatccaataggtgggttagggtttcaatctttgagagtctatggaggggaagaagaataggaaaaaaaataaaattaaatataggaaaagaaaagataaagaagaaagataagaaactttagggtctcactaagaccttctaagggctcacctaaaagaaaagtaatgggtctaccattgaaagttagaaggtatgcaaaaaatttaatattattcatcatcaatctttaatccaatattacatcaattagccttatttatagacttttggaaaccctacaaactgaataaattaatgaaaatagaaacctaacccatataactaagtcttatttctttcctaaaactcctaaatcttcaaaataatagtaaaaaatagaaaacttaattttcagaattgaaacttcttgtaattagaatttctaaaaaagaagacttctaaattctaaagacttaaatagaaataaaaaaaaaaagaaattaatttaaaacatagaaagtttataaacttttttttaagaaaaattctaaaccttgccaaattctttttttttttttttttttgatcaataagtatataattgtattgcaaagaggcgctaaaatagcgacccacagaattacaccttgccaaattcttagtaaaactcgaatactaacttcttactaattttaacattagagaatgtaaaaaactagaaaattacccaaacacccttaatagagtatttaggatttttattttttttttcaattttgtttctttcttttcttgagtagatttttgagattcatcctcatcaattatctccaacttggaaaaaaacttgacctcaagtttcagtgactttccatgtcaattgaaacctaaaccagtgttttccactatttttcttcattgtcccctattaataacctttccacgcttccttagctcttcttatataatgtgtagttagattgaattgctttttacacttttcttgttgactatccaaaacaatcttgggctttggaagtcaaacattagcttccctttagctcttatatcaattatgagtgtggtattggcaattaaaatctgtgtcattacttgcataaatatgcttgatgaattagttaatctaaagataatgactaacccctcatataacctatccttaggagttggtaaggaactccagaaggactccagctttcctaaataaatccctttccaagtaactcatacttgtctcctcaactctgcatgcttttttgtgttcatttgataaactggtgaagttggccatgatgtactagagactggatcaatagcttgttgtatatcatgcaatggaggaagctcattgggcaattctttaggatacaagtctgaaaaaaaagcaaagatgttttatacttcttcaaccaatcactaaaacgaagaaaatattagtcttcttactttccctctcaaagtcactcatagtgagcatttttttttattgcttttcttttgacttcttaattggtggaacttccttcattgaaccgagaatcttcttacacctgttgtgtagaagaatgtagctattttggtagccgtcatgttgaaccctttgataaaaaggccatggtcttccaagcaatatgggcaatttttattaacaaaacattacttgatatgaataaggaatgcaaccaaacaacaagagtttactagagtagatgtatcattcacctatcccacttgatatgaatttggatgctcttctttttttagattaagcttatgaacaagttgttgtgaagatatatttgaactacttccttcatatataattaaagtttatggtcttccttggcaagaaaagtatggaagatgttagtttgacactaatcctcttattcctttgctattagggcaaccaatagatttacaaggctagaacctttggttaacacatcataataatcgcctttttctccaagttgctcttcattgtgtctcttagcttcctatggatgaaattcaaattaaggttctagttcttaaatataatgacataatgaccatgctctccacacttgaaatataatggagttgtaccaactcttttttccagtaacacccatgggagttttttgcttattaacctttctcccttaattgcattttgaagattattgattgctatcttcaccattcatatgatgaggagtgttggaatttgttctacttaaggatttacttgttgcttgattaaagaaagatcccccactttgtgaccccagacatctagaagccaaaaaattgagtgctgcatcaattttaagtgctagttgatgagcatcatttgtggtgagtttgcataatcactatctcaagttggatctccattcgaagtctagcttttcaagtagcaactttgagtctcacttttatttacttgattttgaatactcaactcatgaaattcttctgtatattcttcaattgatttattattttatttgagattaaagatcttagcgtgtgagagctgttcataatcaattaggagaaagcactctttcatcttcaattttatctcattccctatgccaatagatgattggttggttctatagagttgatcttcgataccatgtcaccataagctcattgcgccttttaattttgccttcacagaatgaagcttgatagtcttaggttatagcataccaaagtaatcttccatagacataggctgatcaagaaaagtagtaggattcaatttgtccctaaaattcaacaacttcaatgtgtaccccttagctaatttatgaacctctttgtgttcatgttacaatggatgtttcctattgtgccccttagctaattttcattataaaattaccttgctcctcatgtactcaattggatgattggttatagtgatggctcccaccattttcttcaatagattgtctttctcgacttctttccaatagtctcattatctcatttagcttcttgttgagtttaataatggcttcttgttaggtttgttgtatagtagaaatttccttcaaacatgtttagttaacattgtgattattagaagctcctagaattcatgcttgggtaaattgcttcactccttaattgtatgcttcaattccagtcaagaactttcgctctaataccaaaactgatataggacaaccataagaaagttgtctattatccactaaggtggactaaggtttcaatcttttaggaattaaggaggggaacaagaataaaaattatagcaacgaaaaaaaaaagataggaaaagaaaagataaagaagaaagatgggaaaccttagagtctcactaaggtcttctagaagtctcacctagaagaaaaatattagagtctcatcattgcatgttgacctcaattagctttttttacaggctttagaaaaccctaaaaacttgttagatagtgtacagttatttcagttatttacttttccttattgtattgtgggttccactagcatgtatatatatacccaagtccaatgtgtattattaatagtttttaataacaaaaattagggattctcccttttctctcttttcacatggtatcagagcctagggagaaaaaacctttcagtgaccgtgtttcattcggtcaccttccccatcttctaaagcttttcggtcaaccgtatcgttgttagaaaaccctcaccgccgtcagaaaaccctcaccgccagcgactttccggcaaagtcctttttcgacaccgaccataccatcaagtgcgcaaggaggagatctttaagttttgtccaagcactggagggagaatctcagtcacgcgcaggccacacgcgtttcttctccggtggcctgaacctcacgcgccggtgcgcgagggcgtgtggagcactttccgtcaatgcgcttccacctccagcctcacctgatgccgtttagccactctccatctgtgcttgtgccatccgagccctacaagtgcattttttggggttttttgtctccgtcggccctctaaacagcctttccggcgacctccggtgacttcctctccaccccgagccctgcatgtgtcttaggaagtgttcttctacccttccaatagtgccacatttgtttttctttactatttggtctctcacagtagtggatcctcggtttttcttcttttagctgcgatttgaagccgtattagggctctcttcgatccaaacatatttcgttctccagataagtagatatgactactaaaagttccattttttcctctattatatctaggtctcctatgattatttcggagaaattggttggcagtgaaattatttgtcctgatctgcctttgtggagttttggtttatgggttaaggttatgaggatcaacttgttacgtaggaggcggatatccttgaggttaacagagtacaatggaggaagatagatgcacagttatgtagtgtgttatgacaatcagttgatcttaagattctgcttcatcttcgggcctacaaaacatgctttaaattttggaatcaggcgaaagggctatacacgaatgatatctaacgtctttataaggtggcttcttctattgtcattgtcaaacaacaagatatggatttatctacttatattggccaaattgcctctcttaaagaggaattcttgatcatgatgcttcttactactgatgttggggatcaacgaacacagattgacaagttcttcatggttcttatgcttattggcctccgtccaaatcttgagaccgtccgcgattagattcttgattagttcctccgttccatcctttgatgatgtgtttgctcgccttctccgtatctcctccactcagactttgccatctgataacacttcagattcttctgtattagtttcttaaactaactctcgaggaggacgcagtggtaaccgaggtagaagccaacgtcctcattccacctattgcaataagaaccgcactcgtgatcggtgttatcagttacatgggcaacctctccgcactgcccacgtggcccagtcatctgatcctcagccgcctcagcctccgacctcctccacatctcagggtatttccctcactgacagtgagtatgatgactatctccgctattaggccactaagtcagcttctattacttctgttgcccagactggtaatgcttctgcttgtcttacccacacatcttctcttggaccttggattctagattctggcgcttctgatcacatatttggtaataagaatattttctcttctattactactacctctgccttacctactgttaccttagctactgttaccttagctaatggttctcaaattgtggctaaagggattggtttagcacatcctctcccttctgtcctttatactcctgagtgttcctttaatcttatctccatcagcaaaatcactcgtactcttaactgctctattactttttctgataaatttgtgaccttgcaggaccggagtacggggaagacgattggcataggacgtgagtctcaaggcctctatcacctcacctcgccttcaactcccgcagtttgcatttccactgatgctcccctcctcatccacagtcgcctgggccaccctagtctatccaagttccagaaaatggtccctcgtttttcatttttgtcgtcgcttgcgtgtgagtcctgtcagcttgggaaacatactcgtgtctcattcccaaagcgtttgaataatcgggcaaagtctcattttgaacttgtccacactgatgtttggggtctttgtcggaccgcgtctactttaggatttcagtattttgtcactttcattgatgactattctcgatgtacttggttatttttaatgaaaaatcgagctgagttattctccattttccagaaattttatgctgaaatccaaacccagttcaactattcgtgtgttacgcaatgacaatgtcagggaatatttttctgcaccatttacttcatttatgtcccaacatgggatcattcatcaatcttcttatgctcatactcctcaacaaaatggggtagctgaatgtaagaatcgacatcttgttgagatagctcgtactcttcttctccataataatgttccttttagtttttggagggacgctgttcttacaacatgttatttgattaatcgtatgccctcatttgtattacacgatcagattcctcattcccttcttttccctgaccaaccattttatttccttcctcctcgtgtttttggttgtacttgctttgttcattttctcactcctggacaggacaaactttctaccaaagccacaaaatgcatcttcttgggatactccagacttcaaaagggttatcgttgttattcctctgagactcatcactactttctctccgctgatgtcaccttctttgaggactcaccattcttctccacctgagtctcttcttgtttctgaagtcttatcccttcccattatctccccacctaatgcagtgccttcttgcccacttcaggtttatcatcaccgtcatcgtgtcgttgttcctccttctttggccaaaataccttctgactcactttctatcccttcggcttctcttgccccggctctgcctccttctgctgacttacccattgctcttcggaaaggtaatcgatctactcgtaatcctcatcccatttacaattttttcagttaccatcgattatctttaccctattctgcatttgtttctgctatatcttctatttctcttcccaagagcacccctgaggctctttcccatccaggttgacgacagacaatggtagatgaaatggttgctttacactccaatgacacttgggatcttgttgttttaccctctagtatatctacagttggttgtcgttgggtctacacagttaaggttgaccctgatggtcaggttgattgccttaaggcccgcttagttgctaaaggctatattcaggtttatggttctgattatggtgacactttctctcctgttgccaagatagcttctgttcgtctattgctctccctggctgctatgcgttcttggcctctttatcagttagatattaaaaatgctttccttcatgggaatcttgctgagaaagtttacatggagcaaccacctggttttgttgctcagggggagtctggtttagtatgcaggttacgccgttctctatatggcttgaaacaatctcctcgagcatggtttagccgttttagttctgttgttcaggagtttggcatgtttcgctgtacagcagaccattccgttttctatcatcataactcttcggggcaatgtatttatctggtagtttgtgtggacaacatcgtcattataggtagtgatcagaatggtattcagaaactaaagcaacaccttttcacccacttttagactgaaggcttggggaaactcaagtatttcttagggattaagatagctcaatccagtttcggtgtggttctttcccaaatgaagtatgctttagacatcttggaagaaaccgatatgttaaacttataccaggacaagggaagcctttaggagatcctgggagatatcggcgacttgtaggtaaactgaactacctcaccattactcatccagacattttttttcctacaagtgttgttagtcaattcctacagtcaccaagtgatagccattgggatgttgtaatccgcactcttcgatatatcaaaagcacatcaggccaaggtgtgttgtacgagaacaaaggttatacccaggttgttggttacacagatgcagattgagctcactcacacacagatagacgttccacttccgggtattgtgtttttattagaggtaacctaatatcctggaatagtaagaaacaagatgtagtggccagatctagtgctgaagccaagtatcgagctatggctctggcaacatgtgaactcatatggctgaaacatcttatttgagagttgagatttggaaaggatgaacagatgaagctcatctgtgacaaccaagccgctttgcatattgcatccaatccagtcttccatgaaaggactaaacatattgaagttaactgtcacttcattagagagaagatcgcatcaggatgtgtggcgactagttttgtcaattcaaaagatcaactagcagatatttttactaaatctcttagaggtcctagaattaaatacatttgtaacaagcttggtgcatataacatatatgctccagcttgagggggagtgttagatagtatacagttatttcagttatttacttttccttattgtattgtgggtcccactagcatgtatatatatacccaagtccaatgtgtattattaatagtttttaataacaaaaattagggattctccattttctctcttttcacaaaactgaataaaataatgaaaataaaaacctaacttgtatggtaacttattagaactcttatttcattcttaaagctgctaaatctttagagtaatagtaatagaattaaaaaaaatatataaactttctttttagaattagaaacttaatttataaaaatattgtgcaattagagtttctaataaagaagatttctaaattctaaaggcttaagtaaaaacttaaagaaaatttaattagaaaatagagagtttcgaaacttcttttaaaacataattctaaaacttcccaaattctaaataaaacttagtccgtttggccgttcttttagaaagcatttcgagcataaaaaatgtttttgaagaataagatgtttgacaaaatttagaaagtacttttaaaaaagtgaaaagttgctataatgtttcttggagaaacacttgataggtgattttccctaaaacacttccactaaaaacacttcaaatagaaacactaccaaacgcactcttaaaatactcaactgctaactaattatgacatagagaacctaaaaactgaaaatcacctaaatacccttgatcaagtaatttaagatttaatgtatttctttccactcctttttttagtagacttatagattcgtcctcgtcaaggtgcttttcaggttgtctatctaatttgaaatcttgtaattcaagaagtgtgaattaattataaattaactaaaatggatttgatacaacttgtaattcaccaggatgtaacttttcttgtggtcctgatttatgtttgttaattttaccattgtccatgaaaatggttcttattactttattttgatcataggtagcaaagtcttgctttgttccagttttactagg

SEQ ID NO: 10427 - DNA, 12963 bp, Vitis vinifera
  Intron number 4 from transcript GSVIVT01016183001 (locus G SVIVG01016183001) derived from phytozome v7.0 (chr-ID chr1 3; pos 6938700 to 6951662)
ccagttagcagttgctgcttttagttgtaagcccttttctgtatttacatcttttgtagttgcttataggcattacagattatctctcaagaataatgcatcatcgttttgtaataagaaaatgctctaacatcactcccaaaggttctttaacatcctccaatagtgcttgtgccatcttggaatgtccttattgagtatttcattttgcatctcaacatcattactagaacctcagtcgtgtcatattctatgtgcctattgaagttggtttttgcaacttgcattcacataaaggctgcttgagaaaatttgctgattagttacaacaacacttacaacattgtgatgtgcaatgtttacggttattgtggagaaaaattgaatttctcattcatattttgaaagtatacaaccttagaaatatacattgtagcagaaaagaaagaataaagaaagaattgaaaactaccctattaaaggttagaacggattcagagaagctttctttggggtggtgggactttggagtgcaaacctcatcttgttaaatggacgtttgtttgttgtgacaggaggaaagagggcttgggggttaaaagtcttgcacttcttaataaggcacttctttgcaagtggagttggcattttgggggttaagagaggggaactaggttatttgtggtaggcatgaggaagtaagaggggggtgggcaactcaggaggtaaaagaggggtatgaggtttggttgtggaaagcaatgaggaaggattgagatattgtgaaatctaggtgttcctgtgcggtgggcaatggacagagggtacttatttagaaggataggtggtgcggggataaccttttgtttgtgttgtttccttaactttttgctttgttaatctctaaggatgcatgggtggcggatgtttggaattctttggctgaaatggggggcaagggctgaaatccttatttctctagatcttttattgattgggaggtgaattttgtggcgagatttctgacttgtttgcaagggcagcaagtttgtcgggatgtggaagattctttgatatggtcaatgacaaaaagtgacaagtttataattaagtccctttatcatgtgttggaaccagacatcggtggatcttttccaattggaatttggatttcatgggtttagccaaaagttagtttttttttctagggaggcagtgtgaagtaaagttctaaccttggatcaactgcagagatgaggttggtttttggcaaatcgatgttttttgtgttttcgacatgaaaaatctattgatcacttgttgctccattataaaatgacaagggttttatggaagctgatttttgcattttctaaggtgtcttgggtgctttcttcatcgattaatgatactttgctaggttggcatggttcttttgtgggtaagaaacgaaggaaggtttggcaagcaatccctttgtgtttgttttagatgatgtggaagactaggaacaatattgctttctgtaatgatgttttttctattcaaaagttgaaaaaggagtttgtttgctttttgtggtctgaggctaagttgtttgtcaatgagtgcccactgactttagttggattttttgaatggttgggtactggttgagtctgttaaagttctttctatactcttgtggttgagtcttagtgggtaagggaggtttgttatcttgtatacttggggctattttctggtggcttttttatttaatttaatttaattatttatttataaaaaaaaaaagatccctacaaatcaaagattatatacacaaatatacacaaatctacacaactggatatttgtgtagatattatagtacacacacacatgtagctatattttttttttttttgataagtaaaagaagtatattaaacgaaaagaggaaacaccaaaaaccggtgccctctaagtatacagggagtatacacaccaccttccctaactaagagcctatccagtctacaaaacttacaagagaagaatgactctctgctagggaacccctgacccaaaactaaagattacatacaaaagaatatttcaacctttgaagcgaaaagtcctcatccccaaacgctaacctatttctctccttccaaactgaccaaaaaatacataaaggggccatttgctaagccttcttgcgtctttttcccacaaaccctccattccacccaagaagggttgtcttcactgtacacgagagaatccaagatattccaaaaagagagaaaaggaggttccataggactcgcgtcttgacacaatgcagtaaaagatgatccactgtttcttcttcagatagacagagaaagcacctgtttgccaaagagaaccccctcctttgaagttgttcctgtgttaaaactttaccccaagaagcctcccaagcaaagaaagctaccctgggaggcactcttgccctccaaattctttcactagggaacaaagaaaggccccccggctccatcatagaataaagggatctaactgagaaagccccattatttgaagctgtccatatcactctatcttcctcctccctttgaaccctgaaagcttggatcttctgtaacaaccactccaccaaatcaatctcccaatcgttaaacgcccttgcaaagagaggagtccaaccaatcccatcaccaacaggattccacaccttcgaaacccaagcattcttcgacatggacatggaaaaaagagatgggaaggattcacaaagaggcccatcaccacaccacttgtttgtccaaaatttcactctttgcccattacccaaatggaaagctaccctgccatcaaacaacccccacttcttcctaattgctttccaaagtccaactccgtttcttcccatcacatcccgagtacaccaacccccctcctctatgccatacttgaggctaattacactcctccacaacgcatctctctcattagcaaacctccaattccacttacacaaaagggcgttattcatcaaagataaatttctcacccctagtccaccttttcttttctccaagcataccaagttccatcttacaaggtgaggtttatgggctaaagttcccccaccccacagaaaatcaaataaataggcatactagacatagtgcttctaattagggtgagtcttccccctttagatatgtactgcctcttccacatagcaagccttctacgaaaacgctcttcaaccccatcccacaccgccaaagagttgaaagctgcccctaggggcattcccaaataactagaaggaatccctcccactttacaccctaactccaaagccaaaccctctatattcagcacccttccaaccgggatcatctcactcttctctaagttaatcctcaaacccgagcacgcctcaaaccacatgagaagccaacttagataagtcatctcgtctaaagactcctcacaaaaaaccaacgtatcatccgcaaacaacaaatgcgatatatgcctcccctcacccctcccaccactcaccttccacccagataagtagcccccactaatagcccttctcatcatactactaaaaacctccatggcgatcacaaacaaataaggggaaaggggatctccttgtcttagccccctcgtgctttggaaaaaaccggatggagacccattaactaacacggagaatttcattgtggagatacaccaatcaatccactttatccatctctctccaaaccccatctctttaagaacagccagcaaaaagctccaactaacacggtcataagccttctctatatccaacttgcataacacccctcccacattgtctttcaatcttgagtctgtcaaaatattgtgtgaatggtcgaataccttggccttgagttttgtatattatatataggctttacaaggatgctatacatggaaagcaaataaaagcaaataagaatcctcatgattctagtcctatacatgtaaactataatctgtcaaataatatatgctaactgtacagaataataaatggagaaataaggaaacaattgtaggctaaaataaggaaagaagtgtgggttaaaataaggaaagaagtgtggacagcaaagctgtcctttgacagcccccctcaaattgatgcaggttgatcaacaagcatcaatttgctacttagcaagcaatgtcgatgacgagggagagccttggtgaagatatcaacaatttgtaagtcagtggaaatatgtggaagagtgataacacgagcttcaaaggcttcacggatagagtgacagtccacttcaatatgctttgtgcgctcatgatagacagaattggttgtgatctgaatagcacttgtattatcggcatgtagaggtataagatcggtctcagaaaaatctaactccgcaagcaaacctcgaagccaaatgatttcagaacaagcaagagacatcgcccggtactcagattccgtagatgacttagagactctgtcttgcttcttacttttcacaaacatcttaaactaaaactcccaactaagatagtttttgccattgaaacgaacaatagaatattctccagacattatgaagacagaaatagcctaggaaacaaaaaaaagaaaaaaaacatcgtcaaagagcctaaatatgataacaaacctccaaataatcgaagatctccaagagcctagaagcgaagaaacctaaagaaaactccaagatcacaccacagatgtgttatcacaatcaccaaaaagaaaaaaaaaaaggaacccaaaagctgggctagagtccgagagcccctagggctaaatccgagaacccctagggctaaatcagagagcccctagggctaaatccgagagcccctagggctaaatccgagaaaacccaaagaaaaacctagaaagcgtataaactctaggttcaaaacacaagctctgataccatgtcaaaatattgtgtgaatggtcgaataccttggccttgagttttgtatattatatatagactttacaaggatgctatacatggaaagcaaataaaagcaaataagaatcctcatgattctagtcttatacatgtaaactataatctgtcaaataatatatgctaactgtacagaataataaatggagaaataaggaaacaattgtaggctaaaataaggaaagaagtgtgggttaaaataaggaaagaagtgtggacagcaaagctgtcctttgacagagtccacagcctcgtttgcaatcagcactgcatccaaaatctgtctaccctccacaaaggcattttgagactctgagatcactttccccaacacctttttaattctattggccaacaccttggccagcagcttgtagaggctgcctacaaggctgatgggcctgaaatctttcaaatcttcagctcctcccctctttgggactagaacaaggaatgttgcattaagagattttacaaatctgcccctctcgtgaaattccttgaagaagcccattatttcagcctttactaaatcccaactgaacaaccagaagaccatggtgaagccatccgggccagggactttatccttgcctagatcttaaagtgccacgaacacctccccttctgtaaagggaatttccagcccctcagcctcatagctgtctaatctcatgaagggcagcccctcaacaccaggacgccaccccccttcttcagtgtacagatttttaaaagcacccaccacactattttttaaatctaactcctccgtatgccaacaatcatccactttcagcctagacaaccagttccttttgctatgcgcgttcgccatcctatgaaagaatttggtattattgtccccctccttcaaccacaattcccttgatctctgtctccaagaaatttcacacacatgtagctatatattatagttgtaataatattctacaattataataattttcaacactccccttcgagctagtgaatagatattgtccattctcaccttgataatgatttcttgaaaccgggtgttggctaatcctttcattaagacattggctaattgacctctagtggacatatttgacatgcaaattaagccattgcctaacttctccttaataaaatgtttgtttgctttgacatgcttggttttgtcatgttgtatcaggttatgtgcaatattgatgactgacttattgtcgcaataaagtctcatcggtgtttcctacttaatcttcaagtcctccaagataatcttgggccaaagcaactcacagattccttgggccattgcacgaaactatgcttttgtattagattttgcaacaatgtttggtttcttattcctacaagttacgaagttctctctaagaaatgtgcaatatcctatagtagaccttcgatcaataactgatcttgcataatctgcattaatataggccttcaatgatagtttagtgcttttcttaaacaaaattcctttccttggagttgctttcaggtagggtaggattttgtatacaacctgtagatgaactttcttcgggttatgcataaattgacttactaggctgatcgcataagcaatgtcttgccaaccaatctctggtccatacccttatctacaactgcatcatcatttgcttttccaagcttgtgattttgattagtaggtgtgtcaaccaatttacatcttgtttttcctatctcctacaataagtcaaaaacatacttctgttaggggatacaaattccttttttgagtgagtcgcttcaattcccaagaaatacattaatcttccaagctcctttatttcaaactcttttgctaagtatgcttcaatgcttctctttctttaagatcatttccaatctctattatatcatccacataaaccaatagggcaattactccccatcaggacgagtgcttgacaaataaggtgtgctcatcgttgatttgtttgtagccaatagttatcatgactttgacaaatcttgcaaaccaagcccatggagattgttttaacccatacaaagcttttttcaatttatatacctttttttccctttcaagtgcaaatttaaaccaggtggaagatccatataaatttcgtcttcgagctctccatgttgtaatgcatttttcacattaaactgttataagtttcaattagattgggcagccaaagagagcaaaactctcatagtgttcatcttggctattggtgcgaaagtatcgtggtaatctactttatatgtgtgagtatagcctttggcaataagcctggctttgtatctctcaagagaaccatctgctttggactttattgtgaacacccacttgcaccctactggaatcttctctcttggtaacttaaccacatcctaagtcccattcttttcaagtgtgtccatctcaaccctcatggcttgtttatctttcttactatttagtaacttggataaggtcttaggtatgactatgatatttgggttggtgagaaaatttctatgagatgatgacaatctgttattagacacaaaatgggaaagtggatataaagggtgttgagtaaatgttctcgtgccttttctaactgcaattggcagatttagatcactaatatcaatagaatgaggagaaatctcagaataagatggattatttacctcataagaatcggttggttctgactcttggacctgcataggttcaatgatggttacttccttccttgagtaaaccaaagttggccttgtaggatcaggaacttgttttctagggtcaagactagcaggttcaagaatttatgagtgcttggacacaaactcagacatagacttagatacggatgattgtgcttgtgagggtttattggtttagacacatataggggcaagttaagtaagaacaagtctcctatatccgtatcttccatgaatgatgtctccctcctaaggataaggatgattgaagtaattttcatgtccaacaaagtgtacatcggaagatacataaaattattgaatgagtggatgataatatttgtaaccttttttagtagatgaataccccacaaaaacgtgcttaattgctcttagatctagttttcctctattattatgagtgtggacatggataaaagaaacacgacaaaaaacttttggaacaagattggtatatgttgtaaagtttgggaagtattttgaaaaaatttctagtggacttttgaatcccaaaactctagatggaaaccagtttataagatgagtagcaataagtattgctttcccccaatatgatttgagaacatttttctagaacaaaaaagtttttgtaatagtaagaagatgaccattttttcttttagcaaacccattttgttgagaaacattaacattcatggataataccttcattttgaaaacaaggagaaaggacttgattgaagtaatcctttacattattagatctaaacttcttgattcttgttccaaattgagttgtgaccatattgtgaaaattgggaaatataatactcacatccaatttttgtttgagaagaacgatctaagttactcaagtgcaatcatttataaatgagacaaaccatctagagcctaaaatattaggaattgtggaaggatcccaaatatcaccatgaactaacacaaaaggacttgaaactctttaattacttattggaaaagaagcacgatggtgctttgcaagctcacaaacatcacaatgtaatttttccttcgtgtgtaaaccgaaggaaatagggggtttgggttttgggaatatttctctgaggaatcttgctcttttagggaaatggctgtggaggtaccctagagagggttcagctctatggcatcaggtcatactaagcatttatggttcacactccaatggttgggatgccaacacaatagtcagatggtcacatcgctgtccttggaaggctattactcaagtctttcaggagttttcctcgtttactcggtttgtggtaggaaatggggaaagaattcggttctgggaagatttgtggtggagggaccaacctttgggatcccaatatccaagtctatttagagtagtcttggataaaaacatacctatttcttcagttctcggtcctactcgtcctttctcttggaatttaaatttccgtcgtaacctgtcagattctgagatagaggacttagaaggcctcatgcgatctctcgatggattgcatttatctccttcggctccagatgccagattgtgacccttatcttcttcagggcttttttcagttaaatctttctttctagctttatcccaattttctggatctcctcaggtttttccttctaagttcgtttggaattctcaaattcctttcaaagtgcagtccttcatccgattagtggcacacaagaaggtgaatactaatgacatgctacaagtgagaagaccctacaaagcccttagtccggatatttgtattctgtgcatgaagcatggggaatcagctgatcatatttttcttcattgctccttgacgattgggttatggaacaggttatttcagttagctaagatggattgggtccccccgaggagcatccttgacatgatgtacatcaaatttaatggatttggttcgtctaagagagggatagccttgtggcaagctgcaaacatcgctcttattcggattgtgtggagggaaagaaatgcgaggatttttgaggataaagcaaggaatttagagtttatttgggactctattgttttccttgcttctctttgggcttattgttccaaggtttttaaggggactccccttaatgtgatacaacttgattggatagcagtgtgtactccataaggagtggtctttttagagtgtttgcttgtttttaagtgtatttttctatagattagctttctttggcaggaggattcctcatcctttttttgtacttatttttatctatcaataaatctttgtgtcgtttccaatcaaaaaaaaaaaaattcctttgaacaataaaggataaataattttaagaatgccaaaagacggatgtccaagatgacaatgatgaagccaaatcttatcttttattgcggatgagatttcaaaaaggaatgataaggatacctgattcttagtcctattttgaccaaactacaactcaagatagtaaagtccgtccttttccctagtatgtccaatcgtctttcccataccctgttcttgaaatacacagtaaaagggaaaaaaaatcacatgacaattcaattctttggtaagttgatgaatggaaacaagattggtggaaagcttaggtacatgtagcatatttttcaaaactatggatttattcaagtgaacttccccttaaccaactacggtggttatagagccatcaacaatgactactttcttattgctaggacatgggctataggtactaaacttttgtgaggaatgggtcatatgatctgtagctcccaagttgatgacctaagagcctaggaaagacacatctgagacactaaaagcaagagaagggcaatacttacccgattgagtgagtgagcaagcaccactgggattctcaagggttccaaggagattcttcaatttctcaatctcttccttgttacgctcaatatgttcactaccatcagaattcacccgctcttataaaggttttttattgatttgaaagttggtgaagtgtgcctgagttctttgttatccacctttgaaaccttgttgtccactcttgaaaacccaatttttactcgaagtttgtggctttccatattggtcccttgtgtttcttggcttcttacagtaggtacatcaaattgtgtccttgtttgttgttctggacaaatctgcctgaccattctcaactccaacttgtcgttctggtgctacaattttgacacccacgttattggaacttgttgaaatcattgtcgagccttgttatggttgagggtttaacataaatcctctcctactttctttagcccgaatcaaagaaatgatttcatttaaagaaggcaaatcatcctttcctaatatttgaaccctcatctaatcaaattcagcttttagacccgcaagaaaattataaatctgatccttttcaatgaagtctttttgtatggctgcatcatcgctgcccttcatcttaatacatcgataatgatccatcttttgccatagattcttcaactgattggcatattcagggatagagcgtcctccttgttttgtggtagtggtcttaaatcttaatctcatagacttgagcaacatccctaaccttagaatatgtctgtcaaattgcttctcatatatctttggcagtgggtagaaacacacaagtgtcactaatttctggaagcattgaattccatagctaagacataaccatggagtcttattcgacccaagcctcaaatatggaatcccctggtttgggtccaataccaagtaggtgactcaatttgccctttccttttagaaaggttcaaactgagactgagaccactttaaataatttttctgttcaatctataggctgcctgaatgttctgcaaatcttccgttgatggaggattcacgttgtcaatcacttgagtttgggcagtgttggtgtcatcaacaatctcagacatggtgggtagaattcgggaataatttcagagaaaaatatagcaggatggctttgaaatgacaatgaaggccgttaaaccggctttcaaaaacagaggaaaaaggttaatacaactcaacaatgaagattgaaaagaaaaaatcccaaggagcctaattcggctttgataaccatatggagaaaaattgtatttctcatttatattttaaaagtatacagccctagaaatatatactgcaatagaaaagaaagaataatgaaacaattggaaactaccctcttaaagatccttacaaatcagggattatatacacaaatatacataaatctacacagctggatattcacacagctgtacacacacacacagagctatatattatagctgtatatctcccacatctatatattacagttgtaataatctaccaccggtaataaccttgaacagtcatattgtctatttgtgctgaaagaaacaagataaatttttaggacatttttagtgttgcagagtttgagaaaaaaatcactttcattcatcccgttgagcttcagtttctaaggaatttcaaggattctccatccctctggttttaaattcttatgacctttctcttttccaagtactttttaagcggtggctgcactttcaatattagtgatggcggcatttctaggaatactttgggccatactttgtttcatttattaatgctgtatatgttggggaaatgtagtgaaagctgatattatggcttttttttttgtttagttttggagaaggtagatgaattggtttaaccaacacttgttgaacattattcatcctgtgtcactagttggaagaggtgggtttttgtggttctatgttacaggattgtactggctcacttttatcctctgtagcatcctcaactaaaatagctttctacttattttgcttctcttggagctgggtgtttatttccccgttttcaaggatatattgtcgttctggtagtttgcatggtttagttgagttaattaagtacaattcctaagcattgaaatgtttaaatgaatttacctttttcctttttgttgataaatcataatggcttttatatgatcttactcaccttgactagtaaactacctttggcatagtcactaaatttcaactagtgacaagtacacatctgattccctctctttcgtacaggtg

SEQ ID NO: 10428 - DNA, 10620 bp, Vitis vinifera
  Intron number 15 from transcript GSVIVT01029823001 (locus GSVIVG01029823001) derived from phytozome v7.0 (chr-ID chr 8; pos 87967 to 98586)
agacagctgtttgtggctacaccaactaccattgagtaagttatagttgatgaccagcaacacttctgtttttagttaaccaatttggagtgaactttatgtgatgttattctttgcaactcattttgttaatagtaaattgcttgctgtatttttattatgtgcttttaggttttcaaccaaataatgctacctttttcttttaatatgcatggaaaaataaaattcatttatgctttgtcttgattgagtttgtgagtggattataccacaacttattggctttctgttctttcttctctgctttttctttacctttgggtcttctcctgtatagttcacatgtacttgggttgtattggtaaatatatatgcaatatacaaatctgatcaaaacaagggaggaaaactccttaacaaagaggaatagaagctgaatagccaaaaattgttacgaagaatctaaaagcaaagacataaacaaacactgatcacaactcttggtggcaaaagaatctcaaacaaaagacaccaaatgattcttttttttttttttttttttggctaaaatgtccaccacttggttggcaatatgaggaaaccaatgaatgaagcatcccaactctatgacaatgtcaaatattttgagccatctgccaaacctccgttaacctctttccttcttcgccatccaaaaaatgataaccaaaaaatctcccttaattgcaggatttgacaaggccaaacctttagtacatattaagtgtttatcaacaaaaaacacaaaattcaatacacacacatgttttcacatgttattcaatatcgtaaatccagggtttgcatcttttgatgttgtataaaaagtgaggccaccaatcatgagatttgattactttagtgactgaatgtttatgatcctattaaaattcttcctcttttacaagtgatgagcattaattgaggaaaataaaataagaaaatgaaacggcttaagacaaaatcaatatattatttacaagcactagttgggttatacattgttcatgatagacttgccatgtttttcttgtgctgttgtacttgcaaatctagaagcccaggaggtgtagttatcacttagaggtgaatgtataaacttttcctatgatagggataccatcaaggaagagtttttggttgctaaagttctttaggaaatagagaccttggggttaactatatgattatggaaagagagtcatctaggatgctggttagaacaaaagcatgaggatgtgctggaggtaaaattatatgattaaatggatgattaatacaacatctccattcaagtaactttcctatgattattagatcattgaatgagcatgcaaaccaaaagatgtggagatttgggtgagagtttcaggagtcattttcgtgtaccttaactatgaatagtgatggtgtcaactcatatcaatatgatcatgctctttgggggatgtttaaaaaaaaaaaaaattgccttttagagagaaggtggactggttgatacctactcataaaaaagtaggataatatgctttacctcttatttttttttatgtttggttgaacatctgatatcataaataataagataatttatcatatcctatcgtcaaccaaatatgggataagatatgttatcccatctcttatcctattgcatactatatccagtcaaccaaacatggtttgtggagataagctcagctagatgagggagagaaatttaaaaataaaattaaaaattaaaaaaataacagaagaaaagaaattgccttttagagattattattactactagtactagtactattactattactattactattacattattagtactactactaatattattttgtctttattggctttatctatgttggtgacaagcttaggtagatgggggagagttattactactactacaagtaggtaggggagagttactactactacgattttgtcttcattggctttatctgtgttggtgacaagcttaggtaggtgggggactactactactactactactacgattttgtccttattggctttatctgtgttggtgacaagcttaggtaggtggggttctactactactacgattttgtctttgttggtgacaagcttaggtaggtggtggagagcaagtaagggagatgaaagaataaatccttctatgacctgaggtaacatgcacgcattggaacttactggaatgcatatatgcctgatctatgaggtaaatgtcctattctagtaagtactctatttagcaacataggataagagagagagagagagagagagagatgcttctatgaagtgtgctaacatgagtgtgttggatcttcctcatgaaagaaattgtttaaaatcacaaaaatggattgcaatgcccatatgcctaatctatgaggtaagtcctctattcaggtaaattctctatttagcaatacaagatgggaagtaaagagggagaagtgcttctatgacctgatctaagatgcaggcattgaatcttcctgatgcttctatgacctgagctaacacgcatgcattggatcttcgtcatggaaagaataggtttaaaatcttaaaaatggattggtatgcccatatgcctaatctatgcggtaagtcttctatccaggtaagtgctctattaagcaatacaggatgagatggacagagtgagaaatgcttctgtgacctatctaagatgcatgcattgaatcttcctcatgggaagaaggggtttaaaatcacaaaatggattagaatgcccaaatgcctagtctatgaagtaagtgctctagccagcaatacaagatgtgagagagagggagggagaggggagaagggagggagggagggagagtaaatgcttctatgacctgatctcacatgcatgcattggatcttcctcgtggaaagaatgggtttaaaaatcaagagaatggattggcatgcccatatgccttatctatcaggtaagtgttctattcagcaatacaggatgcctccatgtaacttgctgaagtatttcccatatgattggtttttccccttgaatttttctcttagaaaatcttatgtctgaagcaagatattgtctaattagattgaaaattaaaagtgtctgagaaggctcttgttgaatataatgaatttatagtgtacaatctttccttttttttaatataggtcacatgtatggtagttaggactcctagccttgtatatatatattttctcaattgtaagtagacacaacatgaatgagaatcaaggttttcttctctctctctcttaacatagtatcagagccaagggagaaaacctaattctttccagtttccccgtgtcatcaattccgggaaaccttcctgtgaccgtgtttcattccggtcaccttccccagaccccaaagctttccggtcggtcgaatcgtcgtcagaaaacattcaccgcctgcgacttttccgacgacgtctttttccgacaccgcaaggagcgcctggaggagatctccaatttttcccaaagcaccggagccagaaaaccacccactcgtcggccacgcgcgtttttccgaccggcgcgtgagggcgcgtgagacactttccgacgacgcgcttcctcctccagcctcgcctgacgccgactagccacccttcatacctgtttctgccatttaagccctgcacgtgcctcttttggggttcttttgcctccgctagccctccgaacagtttttccggcatcctccggctattttttctcaaccccaatccctgcacgtgccttgggaagtgttcttctacctttccggtggtgccacggttgtttttcttttctatttggtatctcacacgggcgatttttcggttttttccttcttcagccgcatctaaagccgtattagggctctcttcgatccaaatatacttcattatccagataagtgaatatggctactaaaacttccattttttcctctatcatatctggatctcctatgattacttcggagaaattggttggcagtgaaaattatctttcttggtctgcctctgttgaactttggtttatgggacaaggatatgaggatcacttggttacacaggaggcagatatccctaaggttgagcgcgtacagtggagaaagatagatgcccagttatgtagtgtattatggcaatcagttgatcccaagatccttcttcatcttcgggcctaccaaacttgttttaaattttggactcaggccaaaggattatacacgaatgatatccagcgtctttataaggtggcttctgctattgtccatatcagccaacaggatttggatctatctacttatattggccagattgcctctcttaaggaggagttcttgactgtgatgcctcttactcctgatgttggggctcaacaaacacagcttgataagttcttcatggtccttactcttattggcctccgtccggatcttgagcctgtccgcgatcaaattcttggtagttcatcagttccgtccttggatgatgtgtttgctcgcctccttcgtatctcgtccactcagactttgccatttgatagcatttcagattcttctgtgttagtttctcacactacctctcgaggaggacgcagtggtaaccgagatagaggccaacgtcctcattgcacctattgcaataaacttggccacactcgcgatcgttgctatcagttacatgaacggcctcctcgcactgcccatatggcccagtcctctgattctcagttgcctcagcctccgagctcctccgcatcttaggcatctcaggcttctgttacctctattgcccagcctggtaatgcttctgcctgccttacccacacatcttctcttagaccctggattctagattctagagcttctgatcacatatctggtaataaggatcttttctcctctattactactgcctctgctttacctactgttaccttagctaatggttctcaaactgtagctaaaggtattggtttggcccttcctctgccttctctacctctcacttatgtcctttatactcctaaatgtccttttaatcttattttcatcagcaaaatcactcgtactcttaattgctctattaccttttctaataaatttgtgaccttgcaggaccggagtacggggaagacgattggcataggacgtgagtctcaaggcctctatcacctcacctcggattcatctcctgcagtttgcatttccactgatgctcctctcctcattcacaatcgtttgggccaccctagtctctccaagttccagaagatggtccttcgtttttccactttgtcgtcgctttcgtgtgagtcatgtcagcttgggaaacatactcgtgtctcgttcccaaagcgtttgaataatcaggcaaagtctccttttgagcttgtccacactgatgtttggggtccttgtcggactacgtctacttttggatttcagtattttgtcactttcattgatgactattctcgatgtacttggttatttttaatgaaaaatcgagctgagttattctctactttccagaaattttatgctgaaatctagacccagttcaatatttctattcgtgtgttacgcagtgataatgccatggaatatttttcagccccatttacttcatttatgtctcatcatgggattcttcatcagtcttcttgtgctcatactcctcaacaaaatggggtagctgaacgcaaaaatcgacatcttgttgagacaactcgtactatcctcctccatagtaatgttccttttcgtttttggggggacgctattcttaccgcttgttatttgattaatcgtatgccctcctctgttttacatgatcagattcctcatttctgttttacatgatcagattcctcatttccttctcttccctgaccaaccactttatttccttcctcctcgtgtctttggttgtacttgctttgttcatattctcactcctggacaggacaagctttccgccaaagccatgaagtgcctcttcttgggatattccagacttcagaagggttatcgttgttattcccttgagactcatcgatactttatctccgctgatgtcactttctttgaggactcaccattcttttccaccacttctgagtctcttcctgtttctgaagtcttgccctttcccattgtctccccatctgatgttgtgcctcctcgaccacttcaggtttatcatcgtctccctcatgtcgctgctcctctcccttttgctgaggcacctgctgactcacttcctatcccttcggcttctcctgccccagctctgccttctcctgatgatttacccattactattcggaaaggtactcgctctactcgtaatcctcatcctatttacaattttttgagttatcatcgattatcttctccctattctgcttttgtttctactatatcctctgtttctcttccaaagagcacccatgaagttctttcccatccaagctggcgacaggcaatggtggatgaaatggctgctctgcactctaatggcacttgggatcttgttgttttaccctctggtaaatctgcagttggctgtcgttgggtctatgcagttaaggttggtcctgatggtcaggttggtcgccttaaggcccgtttagttgctaaaggttatattcaggtttatggttctgattatggtgacacattctcccctgttgccaagattgcttctgtccgcttgcttctttccatggctgctatgtgttcttggcctctttatcagttggatattaaaaatgtcttccttcatggtgatcttgccgaggaagtttatatggagcaacctcctggttttgttgctcagggggagtctggtttagtgtgcaggttacgccgttctctatatggcttgaaacaatctccttgagcatggtttggccgttttagttctgttgttcaagagtttggcatgcttcgcgatacagcagaccattcagttttctatcatcataactccttggggcagtgtatttatctggttgtttatgtggacgacatcgtcattacaggcagtgatcaggatggtattcagaaactaaagcaacatctttttacccactttcagaccaaagacttggggaaactcaagtatttcttgggaattgagatagctcaatccagttccggtgtggtcctttcccaaaggaagtatgctttagacatcctggaagaaattggtatgttagactgtaaaccgataaacacacctatagatccgaatgtcaaacttgtaccaggacagggggagcctttaggagaccctaggagatatcgatggctcgtaggtaaattgaattatctcaccattactcgtccagacatttcttttcctgtgagtgttgttagtcaattcctacagtcaccatgtgatagccattgggatgtcgtaatccgcattcttcgatatattaaaagtacaccaggccaaggtgtgttgtacgagaacagaggtcatactcaagttgttggttacacagatgcagattgggctggctcacccgcagatagacgttccacttccgggtattgtgtttttattggaggtaacctaatatgttggaagagtaagaaacaagatgtagtggccaaatctagtgctgaagctgagtatcgagctatggctttggcaacatgtgaactcatatggttgagacatcttcttcgagagttgagatttggaaaggatgaacagatgaaactcatctgtgataactaggccgcattacatattgcatccaatccagtctttcatgaaaggaccaaacatattgaagttgactgtcacttcattagagagaagatcgcattaggatgtgttgctacaagttttgttaattcaaatgatcaactagcagacatcttcactaaatctctcaaaggtcctaggattaaatacatttgtaacaagcttggtgcatatgacgtatatgctccagcttgagggggagtgttgaatataatgaatttatggtgtacaatctttccttttttttaatataggtcacatgtatggtagttaggactcctagccttgtatatatatattttctcaattgtaagtagacacaacatgaatgagaatcaaggttttcttctctctctctcttaacagctctattgctattctaaagcatgtatattggtattggaacttgtatatctcttaggggaagaattttttaatccaagttgccatccctaatatccctatgtattctgttttcttgtatgtatgattgtggacaaggtggtgaacagaattgagaagattcaggggaagttctttgaggggagcaagaaatgatggcaagttgctcctctctccttactatggatggtttggagagaaaggaattcaaagaactttgaagggaaagaaagtttattctaagttgagggatggtcctctctctccatctctctctctcttcctccctctctctctctctctctctccctcagtatttttgaatctccaagcatcatgggtttaatagagtgttatttttttggttaatggaaggaacgtaatatggataatccagttttaatgctgttgctgtattgttttgactctaattcaatccaatgatatcaccaaaatgaaggacaatgaaattcaaaactaagaaagcaccaaggagaaaaagaagcttggacacaagtttttggttgaaggagaggctacaaagaccaaaaataagagattgtaggtgcttctgtaaactaatcaaattctagctagtaaggtgttctaaatctggccattcatggccttatttaaataaaagacttaaattaaaatataaaaaaagaattctatgtagcagtatgtcatgatgcataatggaccttaaagctgttcatcttgtatttgggtagatttcaaacattttggctattgtcaacaactcaattacagttctgccatctcaggcactgcatcagtttaacaagccctgtggactccgagtctactccactttcctagttttaacatcttcttgatggacttttatacatccatagtgaaagaagaagactagagatttcttgttgggaacagggataaaaaagagagattattaagtgaataggaagatttttttgtcaacataggattgaaagggagtatttctagtgggagcaggcatttagaaatttcatagggagcctagtctttatggcttggttgtgaagtttgggtaagattggcattctatattgacagatagaggaaatgatcattgtttttattagttttgtcaaggtttcttgtcttgctttgctcataagtgatgcatcatcaatggctgggtatgcattcatttccggaagaaatgttataggttgggttgtagatctctctttatctgtgtgtttcatgcatgcactgcttaaaataatcatccaagggggggtctagtattagaaaaaggcagagaacccacaccactttggatccaagtgccacttaaatgttggatgtatccacctactgctttgacaatcacctcaattctctgaagattaattccaaaggacaatgcagtttcaaacatttcaaagtttgtaagcaacctgagttaagcatgaagatcatcacggaacaggatgatactgtgcagataaagatgttttataaatggctaatggatctatatcagaaaaacctcaaccattaaaatcagccaactcaaagccttcccagtgataaaggagagtgttatagtatgtgaacatcacattgccaaatctccctcactcttgaaaaataatttcatcaaccataagggaggattatgaaatattgagcaatgcacctgtggctaaccttttatttaatccatatgcccatcatgttgttaaaagggaaaaaaaactgaaaaaaaggaggaaaaagaactgtctgtatcagccatgtaattgactaaatttctgaatcacctggtggaaatgattcaatcttgctggtgccacctttgcaactatttttaggtgctacctattaagaatctaagatattaggatataatacagcattgcttttcttataagtaggattgatattgctggtgccacccttgcaactatttttggatgctctctattaagctattaggacttaaatactaatgcttacagcatcatttgcttaaaataagattggcgctcttctcaaaagaaacctcaagtgctcctctaaaagtgcatttgatttggaattaactggctacttttggcatacattcactgccatgaatcctaaatatgctctcttcttcaaaattctccctttgctccctaaacattaagatttactcctctttcctttagcttaagccaagtggttctttgccctcatctttagaaaggccttagagagagaaaataaaaaataaaaagaagagatattttgaagtacaacaatattgttatatctgtttgttatgctgtgtttttcaggtgtgtttttgtgg

SEQ ID NO: 10429 - DNA, 5421 bp, Vitis vinifera
  Intron number 5 from transcript GSVIVT01030876001 (locus G SVIVG01030876001) derived from phytozome v7.0 (chr-ID chr1 4; pos 18197121 to 18202541)
ggatttaccaaacggtacctctttctgtatgtccttttgtctgtctagtaattatataattttcaaaagttgattaagagctacataatggatgacttaaatatgaaagcagatattaccctttagaagttttctattataaaaagtccatgtttggtgtgctatttacaagtagttagtagttgtttcgttaatgtacttattgaatacaaaaggaatatcgaaagaaaatgcttaaataatttactggttaaaaagattgtatatctaattttctttattctatttttttttaatatggtttgaacctttattgttgtgtacctgaggtcaataaaggttgtgtgaaaccaaggttggttaatctcagttttgatgataacaaaacaaagtttgtaactaatgattatatttcaagtgtgattaggcaagaagatttctaaagtggcaatcaaaaagacaaaatcaagtcaaagggaaatcaataagcagaagtaaaatttttaaaaaaagtgtttttcaatacctaagcttcatagaatctctttgtaaggttgttggtgcactaggttttttcatgtattacattctttatttaagcaccaaaatatccaagaattattttgttttaaattttttaaaattgaatgattttatgttttcaattaaaaccttgtgtcaaatgaattctaatcttgtttaaaaggttttaagttgaaaatgatggttgtagagccaaacatggctcaaccggttgaacaagatgaggaatcgatcgacctgttcagctcaaccgattgaacgctgcaaaaaccttatctattttttagaatgtttgttcaatcggttggggttgaacctcaactaatcgaggtttgatcgaggttcgatcaaggggcggtcgaggtctaacggtcacctgtcaagcattaaatgctaacgactagtcaaccgatcaaaccaaagctccaccagacgaacccccaacaggctagtttggcttcttcttcttttctttataaaaggctctaatcttcattgtttcaacaatttaaccttccaaaacatttcttgaatatatttgagtcttaggagagtgttttttagtgcaccattgttctaaaacttgcatatcattagtgcacttttcaatcctagtttttcttgaacatttgggcctaaagttttatactagaattttatgaaattatttgtaaatctttgagaggaaaaatctaagtgtgagatatcatttagggatcctcgagcgtggagtatcagttgatgggttgttcaagagtggggtatctcttaagaattgtaaagggtgcttagagccaaaagtccaaaatggtggattggaaccataattcaattgtattgcttgaaggtttggtctggaagccttgaaatagtgaaacctcaagcttgggattgacgatagaggagagtgaacgtaggtcgggttgcatcgaaccactataaaaatcttgtgtttgcattctcttttccctactcatttactttatacacaattttctttatattgttttataatatatttgcatataattgtcttttgcattcatataatttaaatttacaaaaagagaccatcactctattcactccacctctagggtgattaccttaggttgtattagcctaattttttccaacaattggtattagagctaggcctcttgtttaagacttaaccatttaggaggtaatgactaatccatcaagctcatctcacattgaaagttttccaaccacccgacctccattttttacgggaaccaattatttctattggaaaacaaaaatgacttggtttttaaaatctactaatcttgatctatgggatgtcattgaagatggtcctcgtattccttttaaattggaaaatggattgatggttccaaaacttaagcaagaatggaatgaacttgataaaaagaaagttcaattaaatgtcaaagaggtttatatcttacattgtgctattgatataaatgaatttaatcgtgtttggtagtgtcagtcggctagagaaatttggagactattagaaatcactcatgagggaaccaaccaagttaaagagtctagaatcaacatccttgcgcatgattatgaattattttctatgaaggattttgaatctattgtagagatgttttctaggttcatggtgattgtgaatgaacttgaagccttggaaaatacctacactgaagtagagaaagtcataaagatcttgaggtctctaccaaaaaaatgggaaacaaaagtgatggttattcaagaagcaaaggatgtcaccaaactcccacttgaaaaactcattgggccactcatgactcatgagataaattgaacaatcatcaaagagttgaagaaaataagaaaaatatagcatataaggtctcaacaaatgatgatgaagaggaagagtgtgaaaatgaaaactttgatctcatcaccaagaaattcatgaagtccatcaagcttgagaagatcaaggaaaaaagaaaatctcattcaaaagaagaatcttcaagttccaaaaagaataagaaaggcatggtggcaacatggagtgaaagtgaaagtgatgaagattccatggaagaagaatgtacaaatgaggatgtcaacatgtgcttcatgactttgaaggaacatgaagatgaggtaaattccaactctaactataatgagtttcaagatatacttcaagaattatattttgatcttgaaaaacttgggttcaaaaaggtctctcttaagaaaaagatttcttctcttcaaaatgagctcaatgagtttaaagaaaaatttgaaaatattgagaaggcaaaaatctcttttgaaaaggaaaatgaggagttgaaaaagaaaaactaatcgttaatatcctctctacaaaagttctcaaacaattaaaagacttttgatatgattttggcaagtcaaaaatacattttttataaaaagaggctaggttacaagccttttaaaaataaaataaaataaatattttaagaattattttataaaggaaacctctagtttttcactttcaaccatttgcaatctttgtgaaggatgaggtcacattagtgatatttgtcccttaagaaatcctttcatattcttcaaaactttaaattattttggattctaaatggaggaaagactaacccttaaggacccaaaaagatatgggtaccaaaggttacttaatttgttttgtaggaatccatgcaagaagaagaatgatatgtttaccttggaaagaatacattgataatattggtaatggtattccctctaaagcttaatttgcaatatccttttatcattttgctaacacttggtatgatttttgttaataatataacttttcgtttcacattaataaaattgatataatgtgaaactgaattgaatgatcatatgcttgtatgctctaatagtgttattcaatgcttgcatgtatgcttgtatctttttaaatgcatatgttctcccatatatctttccaaatcatgctttaaattgggaatgctccaaggttgagcaatcttttatttggaaaatgttcttaaatgaaaaaatgggagattcatttccatgagaaattacattatgcttattgtttatttttaacttttgatattatgtgattctccttatatgatttattgagactttttgtggatgacaaaaaatggggagaagtaatgacaggttgccaacttgggaagaaatgttaatattgttttagaaatcctatccatattaatgttatgtactttattggttataattgcatgcatcatttttaataataatatcttgccaattgctaaattgctttttatgctatttatgtttgattatatcattttgagcacatttaatatactacttgaagtttctaaacttgaatatttttttaaaatttaaatgagcatatattgagggggaactttttagaaaccttggtttgtcatcatcaaaaaacgggaaattatgaaaccaaggtttagttcatctcggttttgatgataacaaaacaaggtttgaaactaatgattatatttcaagtgtgattagataagaagatttccaaagtggcaattgaaaagacaaaatcaagttaaagggaaatcaacaagaagaaaaagacctcaaagataagtgtttttgttttaaatattttaaaattggatgatttcatgtctttcattaaaactttgtgtcaaatgttttataatcttgtttaaaaggttttaagttgaaaatgatgattgttaagccaaaaacggctcaaccgattgaattgaatgaggaataagtcaacctattcaactcaatcggttgaggggtgcaaaaaccttctctttttaccagttaaggtccgatcgaggggcggtcaaggtccaacagtcacctgccaagtattaaatgttaatgactatcaaccgattgaaccgatgttcaactggacaaacccccaatggctagtttgacttcttttttctctataaaaaggctcaaatcttcattgtttcaacaacttaaccttccaaaacatttattgaatatatttgagtcttaggagagtgttttttagtgcactgttgttctaaaacttacatatcattagtacacctttcaatcctagtttttcttataaatttgagcctaaagttttgtactaggattttgtgaaattatttgtaaatctttgaaaggaaaaaatctaaatatgagatatcacttagggattctcaagcatagggtattacttaaggggttgttcaagagtggggtatctcttgaggattgtaaagggtgtttggagccaaaagtataagatggtggattggaaccataatccaattgtattgcttaaaggcttggtttggaagccttgaaatagtggaacctcaaacttaggattgaagctagaggagagtggatgtaggtcgggttgcaccaaaccactataaaaatcttgtgtttgcattctctcttctctactctttcattttatatgtaattgtctttatattctttattatatatatttgcatataattttctcttgcattcatataatttaaatttacaaaaaaaaaaaaatcattactctattcacctccttttagggtgattaccttaggttggattaacctaatttttaccaacaagttgtgtaatagatactaacttgtgcttaatattgaaataatcttatgtctatatgttactaattgaatgaattttgtttctaattatggatagtgatttaggaggaaaacatctacaatctataacaatgtgtattaagttttagttttgtagttagtattatatctatttggttgttgtttatactttata

SEQ ID NO: 10430 - DNA, 9151 bp, Vitis vinifera
  Intron number 8 from transcript GSVIVT01036776001 (locus G SVIVG01036776001) derived from phytozome v7.0 (chr-ID chr1 9; pos 22693004 to 22702154)
ttcaaggtgaataggagcctgaaattgggcatcatgtttttcacttctgaaagttcaagataatcttacttaaatgatgattatgtattttcttttcccatgttcaagtttcttagttattgttaatttcattattaatcttaaaaaaaaggctcaagtttatatctaaatgcaatttgcatcaactgagcttaccccttttcttgaagttcagatgcatttagtgtcaaagaattcaaaaccctagttcctacaaaatatgtaccctttcttgtgttggagaattatcacctgaactctgaacctgttgttttgagcatggtttttaattttgtgtcagtttattgtgatggaatttcagttgggcaggtaatgaaagaaatcgacatttggtaaaaaacaaccatccttattctgtcaattcaagtggagaataggagctttatggttgttttcctgatgcttttgaatattagtatgaacttatatgtgtaagttgaaaataggagttttacagttgtgttcaatgtttttgaatgccagtgtgaattttttttttttaattttttttttatgtacgcatgtgtgtagtgcagtgtagtgtggcatgtacaagctacttgaagaaagagttgttggaggaattttaaggggttggatagccataatctcctagataacttgaaaaaaatattcatcttgtgaaatatggaacatatcttatgggaaaatcaaatacctctgcatacaacttaattgttgtgtcttcttaattcatgaatggaattaacatcaaaatcagattagtagcttagaaaactagtttctcttattcactacattttgcaatatgtgaatgcggtcatttttaattggtgtctatgtgttagatatgtgtaactgattttttttttttttttgataggaaacaacaaagaaatatattgatagaattaagaagtacaaaagaaggatgaggaatcctcccaccaaagaaatctaaacaataagaatacaaaaacaagaaactaaaaggtaaaaacaacgaacaatctctcttagctagacgatcctattggagctacatactgctagccaatctagttgtaacacattaaggggaatgcccttaaaaaccatggagcaaaaaactcaaaaagaagcaaggaagtgaatggaatcccatagattctctgaattcctagttttatcctcaaatatcctagcatttctttctcgccacaacctaaattaaagcaatgcacgcagtttgccacaaaaccatgcctctcttggattttccaaaatctttaaaattgatggacatcatgtcagaaatgcttcttgggagaacccaatccatcttggctaactgaaataatctgtgccacaatcccattgtcaaagaacaatgtaagaaaagatgatctgctgattctcctcgcttcatacacaacttacaaatgtcaggattaagagctttgtcagggcatttacaagtttatataagataattgctaaggtcttatcagggcgtttacgcaaagttcttcatgaaacaatctctggctctcaaggagcctttgttgaagggagacacattctggatgttgtgttgatagccaatgaagtggtggatgagaaaagaaggtcaggggaggaaggggtagtcttcaaaatcgattttgagaaggcctatgatcatgtggattggggctttttagatcatgtgctacaaaggaaggggttcagccagaaatggagataatgggctgtttgtcttcatcaagttttgcaatcctagttaatgggaatgcaaagggttaggttaaggcctctagaggtttgagacaaggtgaccccctttctcctttcctttttactttagtggcagatgttctaagtaggttgatgatcaaagtagaggaaactgggctaactgagggtttctttgtggggagggataggactagagtgtctttgttacagtttgcagatgacaccatctttttctctaaagcctctatggaacatcttcaaaacctcaagattatccttttggttttcgggcaagtatctggtttaaaaatcaacttagaaaaaagcaccatttcaggtattaacactagacaggagctgttgtctagtttggccttggttttggattgcaaagtgtcagagtggcctttgtcttatttaggccttccattgggagggaacccaaagataataggcttttaggatccggtggttgagagaatttcgaggaggttggatggttggaaaaaggcctttttgtctttgggagggaggattacttcaattcagtcttgtctgtctcatatccctagctactttctctccctctttaaaatcccatcatcaatggcttcaaagattgagaagatgcaaaaagattttctttggtctggggcgggggaagggaagaaagatcatcttatcagatgggatgttgttagcagaccaaaggagttgggaggtttgggttttggaaagacttctctgagaaatattgctctcttagggaaatggctttggaggttccctagagaaaggagtggtctttggcataaggttattgcgagtatatatgggacacatcctaatggatgggacgccaacatggtggtgagatggtcacacagatgtccttggaaggctagtacttaagttttccaggttttttccccttttgtccgcctaatggtgggcaatggggagagaatttgtttttgggaagatctttgatggggtaaccaaactttgtactctcaatttgctgatctttatagagttatttctgtgaaaaacctcactgtctcaaatgtccttgacaatttctttccactgtcttggaattttaattttccccgcaatcttactgattcagaaattgatctcctttagagattaatgtcatcctttagttctgtgcttttctccttctttggcagattcaagagcgtggtctttgtcatcgtcaagcttgttttcagtgaaatattttttcttggccttgtcaaaagtctcaaatcctatcttgttccttctggccaagtttttgtggagttcaaaagccccttcaaaggttaagaccatcgcttggttagtagcacatgggaaggtaaacaccaatgataagttgcaattgagaagaccctacaaatccctctgtcctcaatggtgcattctttgcaaaggaaatgaagagtcgattgaccacctttttcttcattgtcctgttaccattggactctggcacaagttgttcaatctagtggggttggtttgggtccctccaaggagttttgaggacatgctggttattgcttttaaaggcttggggaactcattaagaggcaagagactttggcaaatcgcttgccttactttgatttggatggtatggcaagagagaaacaataggatctttgaggataaagggagaacggaagagatgttatgagatttgattcggttctattcttccctatgggcttcttgtactgaaacttttagaggagttcctctaagtgttttacaactcaactggattgcgatttgcgtttcaaaagtttgaagaatgttggggtttctctttgtttttagatttctattggtgggagttttctcttttgttcagtttgtgtaggaagaacctctcatccttcccttggtttcttctctttcttttgtatcttttctttctcctgtatcttttcttctattaatatatttttcttcgtttctgttcaaaaaaaaaaaaaaaaggattaagaactttgtagggtcttctcaattgtagcaagtcattagtatttaccttcttgtgtgccactaacaagacaaaggacttgactttaaaagagacttgagaattccatacaaaattagtagggaaaactagagataaatcggaaaggtgggacagggctagaaaaagagacttgactgtaaataaccctgaagaaaataaagactaggatctcgcatctgaaaccgatggggataaatgcaaacaatcaaatgaacgtatgaaactttctaaatcttttatctcagaatcggaaaggatacgatgtaaattaaagttccatgagaaggggcaatcagaaccgagaattgaacatatgagaatattttaatctgtgactactctaaatagtcttggatattggaaacccaaaggttggtccccccaccacaagtcttcccaaaagcgaattctttccccatctcctaccacaaaccgagtatactttgaaaaatcctgaaagacctgtgcaaaagccttccaagggcaacgatgtgaccatctgactatcgtgttggcatcccaaccattagaatgtgtcccataaatgcttagaatgacctgatgttacaaagttgaactctccctaggatacttccacaaccatttccctaaaagagcgagatcccttagagaaatcttcccaaaccccaatcccccttttgccttcggtttacacactacatcccaactaataagatgatctcttttacattccccaactcctgaccaaaggaaatccctttgcaatctctcaaattttgcagccactgaagcgggaatcttgagcaaggatagaaagtagataggaatgtgggaaaggcatgagtggataagagttatcctacctttgaaagataaataagtcttttgccacccatctaatctccgcgagatcctcttaatcactggatcccaaaagccacaagcctttggattccctcccaaaggaagacccaggtaaagtataggcaaatcagaagccttgcaatcaagcatcaaggccaacctagagagatgatcttgatcaaggttgatgccaaaaaggttactcttgtcaagattgaccttaagcccaaaaatttgcccaaacactaaaaataaactctcaagagtttgcagttcttccacacgtgttagaaaagaagatggtatcatctgcgaattgcagatgggacacccttgttctattcctacctacactgaagccctcctacatacttctttcctctactctcaacaacatcctactcaacacatcggcgacgatagtaaacagagaaggtgatagaggatcaccttgtcttaatataggcaaggtagagatatgggtgagtcaactcaggaggattatgagcctcactcgtggacaggtggtagaaggctggttgagaaggctaaatcaacgactaaaggatggtcttctgttggggcagttggtagagtgaaagagggtgaagaaagtcaaaagactaaagatgtatctaaggggacacatggcaagagaagagcggaagtggggaacagttggttccaaccctcctctttgttcaatttgaattcaaataaagagagaataaggctttttgggccaaagcaggttggtgaagtttgggccgaaagggacaaggcccactcaaatgttgaggattggcattgggcctctaatgcaatgcaagagagaaggacccaatctcctcttaaacccataccactggtggaagcaaatttgggctgggagaggggtgttattttaaaaggcctgttatcgacgttgggccaagaaatgggtggaaagcagcccatttttgagaagggctctttatgcagagaagactcctttgcaatgggaaaggggaagtcagtcttaaaggtctctgtttctcaactgaggggttctacgacgaagtttggttcaaagaagttgtggactactcttatccctccaatttctggttgctgacaaggggttcaaagtcgaagcgagcctctaacgcatgagattccatcttcagattttgttgctcccccaaagggcaatgctttcgaagcgggaacacagttggaacgaaggttcagtgcgagtcctctcacttttagtcgatcgtcagggtttcgaaaaagttgttctggggaaagggcttcgtcgagaagaggagacatggataatcaacaaaggtcttctcttaaggcttctagacattcaaaggggaaggagaaactgcacaaatcctctaacgttgaagacagagcagtctctgagggtttcgggggttttgttcatcgtgactcttcagtcatggtttttccttctaatccagtaatcagagaaaaagggctaaactctgtggggacttgtggaatgatggtagtggaaaacattgaggtatcttcttctccacttccttagtcatctttgtcaattttcccccctcctatggcttggcacatccacctctgagtccttctgatctcgttcttcccagttcagtaattcagtcttagtatcctacgaaatcctgagttgtatctgaattgtttttaaaaaaaaatgacgatggtgctttatgtcaagattttgttggcaattctaacctagatgttgtggagtcccagttagcttgtctgaaccaaatgtctgagggtattaactcccttaagaccatgcctagcaaaagggctaaagttcgtgaggtcttaagttctctggatattaacgtgtattctaggcggaagaacagattctccacaggtatttgagacctgtaggaactggtatggaggtttagggttaaagaggtttttccatgaaaatcatcagttgtaatactaggggtttgggatctaggaaaaaacgaagggtggttaaagattttttgcagcttgagaatccggaagttgtgatgtttcaggaaacaaaaagggaggtgtgtgatagaaggtttgttggtagtgtttggtcgattaggaataaggagtatgctactcttccggtgtgtggagctttaggagggattttgattatttgggactcaaagaaactatttagtgaggaggtagtaataggctcattttctgtctcagtcaagtttttgttgggtggatgtgggcccttgtggctgtcctcagtttatgacccaaacaattctttacattggaaggatttttgggtagaactcttagacatttatggcctttcctttcctttatggtgtgtgggcggtgattttaatgttataaggagaatttcagaaaaattaggaggctctagtttaacttctaacatgagggactttgatggatttataagagattgtgaattagttgacccccctttacagaacgccccattcacttcgtcaaacatataagagtcacctgtgtgtaagatattggaccggtttctttactcaaatgagtgggagtaattcttccctcgaagccttcaagaagttcttcctagatggacatcggatcattggccgatagttttggacaccaatcctttcaagtggggtctaactccttttaggtttgagaatatgtggttgcaacatcctagtttcaaagattgcttcaatagttggtggaaaggttttcagggaattggttggcaaggtcataagtttatgagaaagttacaatttgtaaaggccaaattgaaagagtagaataaggattcttttggagtgctaaaggagaggaaaaaaagcatcctaagtgaaatagctaacattgatgttgttgagcaaaaaagggttatttcttttgaactttcagctcaaagagctttaagaaaaggggagttggaggaattaatatcgagggaagaagttcattggagacaaaaagttagggtgaaatgggtaaaagaaggggattgcaattcaaagttttttcacaaagtggctaatggtagacgaaataggaaattcatcaagtttttggagaataaaagaggtttagtgttgaataatattgagagcatcacaaaggagatcttactttattatgaaaagctctactcgagtcctcttggagagtcttggaaagtagaaggcttagattggtcccttatctcaaaagagagtgcttctaggttggattccctttttactgaagaagaggtttctaaagccatttttcagttagatagggataaggtgccggggtctgatggatttaacattgcaatgtttcaagattgttgagatgtgatcaaggaggacttagtgagggtgttcgcagagtttcacagaagtgggattattaatcaaagcaccaatgccaccttcattgttcttttgcccaaaaaaagccaaacagaaaaaatttcagactttaaacctattagcttgatcacttgtctctacatgataatagccgaagttttatcagggcgattaaaaggtgtactacatgaaactatccattctcctcaaggtgcttttgttcaagggaggcaaattttggatgtagttctaatagtcaatgagatagtggatgagaaaagacgattaggggaggaaggagttgtcttcaaaattgactttgaaaaggcttatgaccatgtggattgggattttttggatcatgtgttggagaagaaggggtttagtcctagatggaggacatggatgagatatgtgtaactgattgccaataggaacttgtttctaagctaattatgatttggattgttattaattaatttattctgtatttggatgcatatgcatatctactaaaaacaccaaaagagagggtggactgtgggtaggggttgttattttatgtctcaagtgtacaaacaacaccctgaagcaaaaggaagagaaagcataaaaaaatttcatataaagcattcaaaaattaactacagtttattccatgactgcattactcttaagtttgttaaataattgccacacaccttaggtattaactcacaatcattacgtggaagctatttttgtgatattaccaagtctcatatatgtgaatgttaactagccaataagctttatttttaacttttttattttttgtttttgattataaaaatgtaagacattttgcagacaagaacctaacagaagggggtgcttgtaatgccaaagcctgtagtactaatgcactctcctattgtactgtatagattttgaattggagacaatggttataatatgtatatatatatatatatgtttatattgtgtttattttttcacattctattgagttatcagatgctgaagcatgggttgatttcctttgacaggtccttcattttctatatacttactctgtagtagt

SEQ ID NO: 10431 - DNA, 816 bp, Vitis vinifera
  Intron number 8 from transcript GSVIVT01015433001 (locus G SVIVG01015433001) derived from phytozome v7.0 (chr-ID chr1 1; pos 3626796 to 3627611)
ctttgccagaactcgaagtgggtatgttcacatccaattcttttgttctctctgctaggattttatgatgcttaacttttcagcatatgtagatgttctctttcctgaagtttgtctaacattgttctcaagaaacatttaggatctgtagatataatatgagtgataatacatgccaaggctaaagatatgattcccactggtgcatacatgtgaatgactatatgaactatcttgaatcatatgctttgttggtgtaattaattcgtattattatttggttgaagcaattatcatattggtccacaacatttgctggtccctctttgtgaaacttctgattatcagttatctattgatctttaattgttaaccaacttactttttccttgtgttgattttaacatatgtattctccacatcattttttcaaaatatattctttgctatcgtctctttccttggaattgatttattctaagtgattttggttccagactttgcttcctacaagttatttttccttacatgtgcatgttcgaagaaaaggaatgatgccccacaagggtctggacagaaattttgtgaacaattattagaggcagtgagctcttattacaatgcaaaaagaagtttatgcatgtctaagtgtttcgtgtgcattgatattttagcaaatgatgatggcttgagagcaagatctactaattgaatatagtgaatgtcttttaagattctgatgcttcgtggattatatggtttctaaaattggttattgatatgtagctttcaaagctcttgggaagctgatcctgg

SEQ ID NO: 10432 - DNA, 3937 bp, Vitis vinifera
  Intron number 13 from transcript GSVIVT01028677001 (locus GSVIVG01028677001) derived from phytozome v7.0 (chr-ID chr 7; pos 12022051 to 12025987)
agtctctagaaagtttgaaggagaacaactcaaaagtaagttcctatggtgcttgaaaacttttggatttccattaatgaaactagaaacatgggcatgtgttcttttagtagaggcaagcattttccattaatgattacttaaggactacagtgtctgcagttaattcttctggccgttctctcaatataatcagtttcctaaaacataatgtgatatcacaagattcttttgataaatgtattctatgcttgaattttagggttcttgcatttccttgagcatttctaggcaaaaaaaaaaaaaaaaaaagaaagaaaaaagaaaaatggaagtcattacacaataatgctaagaattgtggcgccctgattgagttttggaattatggagaaagctgaatacatgtacactgccattagtgggaaaaatatgtgttgtgtgtgtgttcacatgcctacattttggaagccttttgcttaaagtgtgttttacatggactcaggtatgtgtgttaagtatgggtatgtaacttaagtgtcagagtcagatctcaggacatggggatttggctgaaccatgaagctgtccaaattttgttatttttatttttgcaccaaacacgaatgcgaaacattagcctgtttgtcacagatacttcacttgttttgaaataaacatgcaacagaaattaggagtttgaacctataagtcaactggaaatatgttcaccccttcttttggtggatgcatgtgcacctgttgagtacttatctgcaagtgttctctgtccataattataccataatgtattatgtttgacatgggtatttcaaatactttgaaaaatctccacacaatgttgctcaaagaacattaaatcctaggagagaggaataaaatggtgaaaagaagatattgaataacattatgcttttcaaaagggtgtttagagaaattaggcattttcctcttgataatttgaagctccactttgaattgttggtattgtttctctaaacctttttggttatgtttggttcccagaaaatactaaggaaagaaaaaaaatgctatggaaaatgattttctcatgtttggttgccctatggaaaataccaaagaaaatcaaatataattaaaattaattaaaaatttataaaatttcaaattatttaatctttatatcgaagggttaaaacaagtgaaatgagtttaaagtaacatataaaaataatgtattgactttaaatctattttttattttccttcactttttctttccttccacttctcctctctattttctttccctcacattttctctcaaattttccgggaacccaacatagcctttgggatcatgataggtggatgggacatagcatggagctcttttcttggccttaaggagggcagggtttgatttggaagattattgtagtgtgtgaagccctatttgaagattattggccttggaaatgctactatcactacccattaacactattgctaatatttgatgaggcaaaacacattaaatacatgcaaagcttgcattaaagacaaaatgccatggcccatacatggattggctgcatacaagggccacacaacttggaagtggaggtgtttcaaggagtactagtactgctacaaaacctactactagttctattactgttattctgataagataaatgcatgtcagtacatgggaggtatacaacaggacctcagagcttaaaatgctaaaatcctgaagagaaaaagatatgcaaaattcaaaaagaagaacttgctgcaaagaagcaaaaaatagttgaatagactctgaagaatatctctgcagatagaggttttcaaagattacttattggttggggtagggatgtggaagattcaaggtttgatccccaacaggaataaaaaaatatcttacctacaaaaaggctgctagcatttcatgatcttggaattgctgcttagatggatgcctatcagagcaaacaatgaagagggatattcatgaaaaagaggaaaaaaaaggagtttttgagtttatgagtagaaggaatttgacatgtctctcgaacttctatttatatataaatttttcttggttattctgttctttcttttctttgatatttttggtgatcttcattcttgtcttttccttctatccttctaataaagtttgttgccataagaattcgttttctctgattttctggagaacgcctcagcctcccttgtaatccccttcaagagggataaacttacaagagttcacaccaatgctgccatgatcttgattgctcttgtagcaggagcaacggcaaaatagggattggttaagcccatgaatttagaagcttcaaatttttggagctggtaagaagtgccatatgatttacctggtacaaagtttggatttgtccagtgctagagtatttcttaagttggttcaagtaagtagctacagagtggtagcaatagctaatataggatagagaagacatctcaaagtcttattcgatatttatccatccatatcctagttttccatgtgacttataggttctataaaacacttgcaacaaataggctctaggcagttgctttggcaattctttctcctacttattttactgatccatgaatttctggagacctgatagaagtagtgcacttcttctcatttgaggaaacaaagttagaatcaaactattctaaagaaagaggacaacagaaaaaaaaaaaaaaaagaggaaaaaagaagcccttgaggcctggctcaagtggtaaagggttggggtgggtttatgggaggttctaggttcaagtcctaatggggacaaaaatggaaaaagaaaaaaaaaattatctttcagaaaaaaaaaaaaaggaaaaaagaaagaaaaaaaggctgtgggcacccaaaagcaaaggttgttctattgctcttttggaattttagtaaggcccactttgaaatatgaaagaggaaaccatatcactgagtggtttctgggatgttacctaagctttgagaagctgaatttttttttttttttttttccaatttgattaagctttatttttaatggaaaaattctttggctttcttccccatgttagtatgagaaaatagaaacaaagtcatcaacatgcatattgtattgtgaataagtttttcttcttctccatcatgattcatattatattgtgtataatgaaattatttatatccttggaacatagatgtaagcatggacaatcctgtaggagcaacatatattattgcaggagtggattagacagcaatacacattaagtttcacgaaagacacttagatccaaagaggcaaaagtcaaagcatttaccaatattttgtatgtatgcaaacattaagattgtgtttggtttatggaaaacttaaggaaaaatgtgagagaaataaaatagaaaggaaaaatagaaggaaagaaaaaatgaaggaaaattaaaaataaatttaaactcaataaattatatctttatgttcaaattatttcacttattttaattatttatataaaaattatataatttgaaaatgtatcaacttttaactaattttaatatataatttcgtaactaattttaaataatttgaaaatatattaatttgtaactaattttaatcatatttgattttcttttgtactttttatataatgaaacaaaacactagaaaattatttttctttatattttttttttcctttcctcgaacaatccaaaggttggatgaagtattctgctaaatattgtcctgtttggggattgattctcatacctgagagcttgttccagcatcaaataactttccaaatgctgattaaatgagccttgatgataacagggaacaaattcttgttggctgaggaa

SEQ ID NO: 10433 - DNA, 11126 bp, Vitis vinifera
  Intron number 8 from transcript GSVIVT01030703001 (locus G SVIVG01030703001) derived from phytozome v7.0 (chr-ID chr1 4; pos 14012739 to 14023864)
tatcatcttggagtatcatctctgctaaatcttttatttgtaatacatccttctgttatatttactgtggtattgaatcttccacattgaaggtggcctttgactatgctcaataagacagcctcaaggcacagcctagaggcaaggataagtaaagtctgatacctcactaatagctaacacccacataaaggctcacatcgtactgttttaagccactagctagaaatgtaccctgcacttgtgaaaaaatattcacccaatgactacaaataatttattaggagcttacatatatagatagatatggtgtcttcctttatctattatacttttttttttcttttttcttttttccttttttttggccttttttcttttggttacatttggacttttagaatgcttttctggtgcaaatggggctgttagagtgcacaaattcatgctttctttaatcaatgctttctccattaactcaataacttagcagttcaacacttatgctccttagggctcaatctataagccaccttattaggtaaagtaaatgccaaagtaaagccaatgcagtgttgaatataccttgttggaggaaacctcagggagatcagtagggaagacctctactttgtctctcatcaatgtctctatgccctttggaagaaggggttgtgatctttctttagccactatggtataaaattttcaaaccttagggtcccaaaacaaacttggccttggaaagaaaattgatatccacaccttagattacgattgaactagacttctgtcacataggtctcaaaattattttcatattatttgtgtaaaaagaggtccttccatggtcgatttctctatcatattgccatgattgcccaaatgatgtatggcatgtgtccatcgccataatgttgtacttattttttcatggtatattatggcaatcgaaattgaaacaagataacattgagtgaatgttacctctttacccttctagaaccatgataacgagtataaccttgtatgctcagtttttacttgagcttgtctgcgacttcttgagacagcatgttttcactaatcctgctatgatgattattttatggtttacacacctttccaccaattgtacatgtactatggaaaatcatagttcttagctaatcttttcattttgatggtctagctcagggggattttatgaaactattttcctactttctttcgttttttcaacctctcattagtttatatcaaattcatactctattatatctttttcttaatagatttatttatttttaataattttctaaatattttgttggctagttttttaatggtgggttccccttggttttgattccactttcagttgtatgttgcaattaacattgtaattggtatttcatataataataacatggatatttttaagaagattgtcaatttttcttagttctatctttatttaattgttaacaataagggagttagggttctattctattctattttttaaataaaaaaatagtgtcttcataaaaaacttggatcataaggcactaatgtgttgtgaactacttaaggattaggaaggtttttatactgaaggcaaactccaaatttgtaaacaaaaagcttctcaaccttaattattgatattttcttttttaaacattgctttttttttttggtaaatttttttaaatgaaataaaatttcacaaaattcaaagcttgtgtttactaactaaactatttggtattttgattttttataatttgtaactacaattcattgggattacttaattcgaaatatgatttgaactgtttgtttctcccttcacataactgtgtttagaagtgcttcattatttgattcaacaaacgttattgtttattgtattttttttttattatctgttcaaaagttttctttggtttaatcatttttgcagttcgccccaccctatttcacaatgactagagccttagtcttgtcatcatattggatttcatcattgtggtccttcccaaaacatcaccatagagtggttctctttcaaaatttgtcttcccttaccctaatgtctaacagatgctttctaagagtctcatagacctatctccttcctcaccacatttaaaatagccaaagccaacattcttgggattctgagttgttgttcttgcagaatttctgaactcctttatattatattcggtacacaccatacacatatatatacacaaatgactgaataagaaaaaatcaatctagcttaattttctcctaaaattaggaaactgaatcataaggaaatatcctaaatgatctctccttttttattcctaaaatactttcctaaattaaaatcctaactttggcattatttcaacactccccctcaagctggagaatatatatcatataatcccagcttgcaagttaagtcttcgaagttaggcctaggtaaagctttggtgaggatgtctgcggtttggtgcttggtaggaacatagttcaatttaaccgtctcactagtcaccttctctgtgatgaagtgtctgtcaatctcaacatgcttggtcctgtcatgatgcacggggttctttgttatgcttatagctgcctgattatcacacatcatcagaattggagatgaactcatttgtcccagttcactaagaaccctttttatccaaatcccttcacagattccctgtgcaagagctctgtactcagcttctgcactacttctggctacaactgattgcttcttactcctctaggtaacaagatttccccagacaaaagaacaatatccagaagtgcaccgcctgtcaatgatgtttcctgcccaatccgcatctaagtatacttcagtgtcacggttctctgtctttctgaagaatagacctttccctggtgtcatttttaaatatctaagaattctgtagactgcttccatgtgttcctcagtggggctgtgcatgaattgacttacagcactcactgcaaagccaatatctggccgagtatgtgagagataaatcaagcgcccgacaagccgctgatatctccccttgtctaccggtgttctttctttctcgataccaagtttcttctgactatccataggagtatcaattggtttgcatccaagcataccggtctccttaagaagatcgagtatgtattttctttgagagactacaattcccttccttgatctagccacttccataccaaggaaatatttcaagtttccaaggtctttaacttcaaactcttctgacaaatgcttcttcaaattctgtaattcctccatatcattcccagatagaataatatcatcgacatagactatcaatatgaccattttcccggcatgagacttcttgacaaatagagtatgatcagcctgaccttgtttgtagcccagcttcaggactgcttttgtgaatctatcaaaccaggctcggggagattgtttaaggccgtacaaggatttttggagtttgcaaacctgattctttgccatactttcttcgaaaccaggtggtatttccatgtagacttcctcttctaggtcaccatttagaaacgcattttttatgtccagttgttgcaagcattaatcttgattgacagccaatgagagatgaatcctgatagtgtttagttttgcaacaggagcaaaagtctcctgatagtctatcccataggattgtgtaaaccctctagctaccaaacgagccttgaatctctcgactgatccatctgctttgtattttatggtgaaaatccacttgcaccccacaggtctcttcccaaccggcaaatctgtgatagtccacgtcccattcttctcaagtgcatcaatctcatcttgtactgccttcttctattctgaaatttttaatgcctcttgtattgtgttgggaacctgagtattatcaagagaagtagcaaatgctctgtaagatggtgatagcccttcatacgtaacataattcccaattggatgatctgtacatctcctaacacccttcctcaatgcaatcggcagagtagaatcatcaatgctgggaattaacacctctccagccctatcctcacctatgttctcttcaggaagacttgaattggagtcaatatattggccacatgttgactgtgatccgtgctctaattcctgtcttttcctcctcctgatgtaaacttgtaagttctcattagcaagttgtggggctataggttgaataggcatgggagactggatggtcacgggagaaggaacatttgtgtgctgggctggctggactgatgacgacatgggtgtggacaactcagtgggcgcgaattgggaaggatttggtgactctgagtgaaaagaaggtacaccctcaagacgagactcccaaacttgatgttcattcatgctctccccctgaacatgaaatttgggatagaagaagacatgttcaaagaaagagacgtccatggtggtgtaaaatcttttgttggttggagaatagcatttgtaccctttttgggttggagaataccctaggaaaatgcacttatttgctcgaggagcaaatttgctacgattttgaggatacacatgaacgaatgccgtgcaaccaaatactttgagtggtaaatcagaagaggcggcacaggtgtgaggaaattgttttaagaaaagttgacgtggggattgaaaggtaagcactctggatggcatacggttaatcaaataggtagctgtgagaatagcttccccccaaaaatagtttagaacattagaggaaaacataaggcaccgggcaacctccaagagatgtctattcttgcgttcagccaccccattttgttgtggggtgtcaacgcaagaacttatgtggataatgtcgtgattttgaagataagtactgagactactagtaaagtattcctttgcattatctgacttgaggacttgaattttggaattgaattggttttgaaccataagattgaaggtttgaaaaatgtgcccgacctctgacttttctttcataaggaaaacccatgttacccgagtatgatcatcaacgaatgtcacaaaccatcgagtgccagaaatattttttatccgggagggaccccacacatcactatgaactagagagaaaacagtcgaaggtttgtataggatttgaggatatactgttcgagtatgctttgcaaactgacaaatttcacagtaataagatgctggatttttattgataaataatttgggaaacaattttgcaaggtaaacaaagctaggatgaccaaggcgatagtgtaacattataatctcactatctttattgaccttagaatttgacacagaattgaaagactctaacatactctgagactgtacgcaacttgcttgagagacttggtttgagaattggccacatgagaggaggtagagcccggaacacagttcagcactgccaatcatcttccccgatttcaagtcctgaaaaacacacgagtttggatagaatttagtaacacattggagatcacgagccaatttgctaatggacaaaagattacaatccaagtttggaacatggaggacagagtcaagatataagtctttagtaagttttatagaacctgtcccgacaatttttgactttgaaccatcagcaatatggacggatgaatgaccattacttggcttgtaattttgaagaatggcagcatctcctgtcatgtgatcagaagcacctgtgtccactatccacggcttcattcctcctcgactagcagtgagggctatcccggtagtactgccactgccaacttggcttaatagtttctgtagcatctccatctgctctttgttgaatggactcggctcgggaacagatgtgctctcagagttggcagccacgtgtgctctgccatctctgtcagaccgtggctttggtttccaatcagccggtttgccatgaagcttccagcaagcctccttataatggcctggtttcttacaataatcacaccaaggcctatctcgtttctgacgatctccaccactactattaaatgaccgagcagcaaggacagagccatccaatgttggggcaggttgctctttggatcccatcatcactttctttctactttcttcatgcctaacctctgaaaaagcctccctgagacttggaaggggtttaatgcccatgattcggcctctaacatcatccaattccctgtttagtcctaggaagaacttgaacagtctcttttgttccacaatttgcctgtatgttgctgcatcatccgaacatttccatgagtgggtctcgaataagtcaagttgctgccaataccttgtgagtgtgttataatactgagtaactgactgctctccttggcggaagtcatgtagggctgattcaacctgaaaaagttctgaaatattttcagaacttgagtaagtttctttggctgcatcccatatgtcctttgcagtcccaaacagcaagaaattttctcctatgtcattgttcatggaattgataagccatgacatgatcatgttgttttcaatcttccacttcctgaaacctggttctgtagtttctggcatggctgcttctccagtgaggtactcatcctttcctttactgcaaatgaacagcaacacagattgtgaccactgtaaatagttatggccatttaatttgtgtcctgtgatgagaataggaaaggaatcattgccaccaaggtttggaatttcagatctgccccctgattctggtgacgtgacgctggatacttgtgatgatgtcattccgtattttgtcatggaccggaaaggtagaagaacacttcccaaggcacgtgcagggattggagttgagaaaaaatagccggaggacgccggaaaaaactgatcgaagggtccacggaagcaaaagaaccccaaaagaggcacgtgcagggctcggatggcaaaaacaggtaagaagggtggctggtcggcgtcaggcgagcttggaggaggaagcgcgtcgccggaaagtggctcacgcgccctcacgcgccggcgcatgagatgcagtcgccggccggaaaaacgcgcgtggatgggtttctggttccggtgcttttgggacaaattggagatctcctccaggcgctccttgcggtgtagaaaaaaccgtcgccggaaagttcgccggaaaagttgccgggtgtgaatgttttttgacgacgattcgaccgaccgaaaaacgttttctcccttgactctgagaatagggactgatgaccggaatgagagatggccagagagagagatggtcggattgagagatggccagagagatttggccggaatgagtgatggcctgaataagaggtggccagaagggattagggtttcagaaaactggctctgataccatgatgaatttctgaactcctttatattatattcggtacacaccatacacatatatatacacaaatgactgaataagaaaaaatcaatctagcttaattttctcctaaaattaggaaactgaatcataaggaaatatcctaaatgatctctccttttttattcctaaaatactttcctaaattaaaatcctaactttggcattatttcaacagttctaaacatattagaaatttagaacttcttcccaactccaacaatggatcctctccaagttcaacattagatcatttaccgaatatcttgtgtattacattgaacactaaatgccccatgatgacaccatattaaagttatctcacctggaaacatttctagccctcacaatggttgtgtttcttctaaaacatttttttattatttcttattttttactttcaacaatcaaagtcctttggaaagcatttgaaatggtccaaaatgggtacaagcttaaactttcgaatgatttgttttagaactccaacaaaccatgctactagatcttgattcaaaaatttcatttctatccaccaattcatgaacctcttctatgtatccatgtaatgatttgtttctttgttgtaagttatgctatatgtacatcgtatgaacataatcaaatgggaggaagttctctatcagcctcttgttcaccttcccaaattagtaacccttagctttctccatggttctcacactaagttcttccataaaatggctaatgctcatagaagaaagaaatttttttagctaggattaaaattaatggggctttccttcgggagagcaagttaaagaagtgtgtggaattggcttttcacaattctttatttgatacaaaagagtggagatctagcatcaacaacttggattttgaaattttagaggggtagtaatcataataattggaggagccgtttttagatgatgaggtgttttgttggtttgatggggttgaatgaggacatggctccaacactggataggtttttaatgaaattttagcaattaggttgggattttgtggataatgaagtgatggggttttccaaggagttttatgattgagggaagtttgaaaaaaagtctcggtgctatgtttttagtgttaatcctaaagaaaggaggtgcataggatctgaaagactttacgcctattagtttggtaggtagtttgtataagctcctagctaagttttggcaaagagactaaataaggtggtggacaaagtgatctccaaaattcagaatgcttttatagagggtagatgtatccttcatgcagttctaatagctaatgaagccatagaaagagcaatgcttatggagtcatgtgtaagctaaacattgaaaaggcatatgatcatgtcaattggagtttattgctttgagttctcaaaaagatgaattttggtaaaaaatgatggattaaatggtgcatctataaagtttttagtgattgttaatgtcaaccattatggtttcttccaaagctccataagtatgaggcaaggagaccctctgactccttatttatttgtagttgcaatggaggcacagagttgcctccttagaagggtaggaagggaggtttgttcttgagagttagggtgagaggaagatgtggtgaggaggaggaggtatcccttttgttgtttgtagatgatactttaatcttttgtgaggctttccaagattaaatggtttgtttaagttggttgctcatgtgatttgaaactatagcaagcttgaaaatcatcttagaaaaaaacaagtttattccaattagttaggtggagaatgcaaaggacttggcctttgaactaggttgtgaagtaggagagcttctatctacttacctgggtttagccttaggagcatcatttagattaatggcaacctaggaggaggtggaagagtggttttagaaaaggctatcaatgtggaaaaagcaatacatctctcaaggaaggaggcttatgttaatcgggagtatattatctagtctacccatatacttttcatatctttgttcaatatttcgaggaaagttaagttaaggcttgagaagattcaaagggatttcttttagggaggcagggcttttggagaaaaagttgcgttttgtgaagtggttgattgtttgtaaggagaaaaggggttgggcattaaatgactttcattgcttaataaggctctttggtgtacgtggagttggtgatacactactgaaagagtagcttttcgaaaatggattgtaaattgaagaagaatcgattgatcacatccttcttcattgtgccaagaaaagggtcctctaacaattgctttttactatttattgggtgcaatctggcatggtaggggaacttttttaagatggtatggatcctttatgagcaaaagacgtaagaaggtttcaagttgcaccattgcttttggaccatgtgcaaagaaaaaatccaatcaaaccttgaaaagttctttccttagaaatctgtttttgtagttggagttgtatgtagatataggtgttatgtcttgaattgattttgttgaatgattgagtttttgctaaaagagggagttgtttttgtgtcgtctctattttggtcataccttttaatgcacgtttgtgctttgtttgtttgatgcttgtttataaaatcttttcacttacctagcaaaaaaattttagttcttcccatcaagctgatgttctcccttttggtctatagctatcaattttactatcatgatgggttcagccttttttagggtttcatttctttcactcttggggatgagtagaggattagattctaacttgatgtgaagtgtgtggaattgagtttgaagacttaatttatggtcctctatgcctcagatattactaggaaagtgtaggtagctgattattggtacaagctggcagtcttgaaatttggaatctaaattttatcagtacattccatgattggaagttagaagaagcgggcagttttcttgcttagatttacttgaagcagtttatcatggtgaacactaacatgtatgtttcaaatccttggaagaagggcttcttggtttcttcatactttatggctctctttctgtattccattgagattttctatctctgctttgtggttttgttctaagttatctaaggttgatttccttgtgctatgagatttctagggaaagattctcacaatagatcagttgaggtggaaggtttaactcttgtgaattggcattgcttgtagtgaggcatcttttgttgaggactctctctctctctctccctctcttaatgtaatgattgatttgggagggtatttatggtttggaaaattttaaaccaaaagaatggttcctttttctttactattcttttttggcatgtggagtccaatcatatcatgtcttcttgcttctgttttcagtaattttgtccttttattcatttcattacttgttaattatttcagttcgtttgacttagaaatgcaacataatttttgtttccatttgatttactcaagaatgcaacataatttgacttacaggtgctctatctccagggaaaaattaaggactctga

SEQ ID NO: 10434 - DNA, 3297 bp, Vitis vinifera
  Intron number 1 from transcript GSVIVT01038356001 (locus G SVIVG01038356001) derived from phytozome v7.0 (chr-ID chr7 ; pos 13473428 to 13476724)
gattctggccgcaggcgtcagttcactggcaagaggttcgttttctctcttttttttcttttctgtttgtttcctcccaaaatagtaagctctttcccgagaaaagcaattggattgtagttttttccgtgtaaatattccattgtaaaattgaagcataaaggaagttatttttatttttatttgtttatttttgtttcgttaacaaattttctggaaactcttttttctggggaaacaaatgggattttccgcgaataggttttcctcttttccagttttgccttctgatttgtgatttaattgtatttggcttcgtttggattgtaactatctacatgagtgtgtgattggcctgacagtagttgcttttgttacttggttatggcggtttttcacttagattttgcactggattgtgtgattgagcttgagtccggaaataaggttttcaaaggtttatcttttatatcagtacctatggcccagtgcttccattcgtctataccaattcaagctcattatggagttatgtcacatcaggtagggagtgtagttgataactttttgtcttgtgagcaaagtagtagtgcgtcctaatctcgtgttgatttcctattaacaattttttttaacatgatttctataatattaccatgttccacggctgtaaagccagattaattttccatttaaatgaaaatcttgcataattacttcaaagtgaaagaaaaatcaaaagctagcatgttgtagggttggggcagtgacttatcaaaaggctattaaggcttatgccttgaggcttgcctcaagatgaggaggctatgcaaatcgtagcctatgttgcatgggtttgagtatgagtgtcagatgcaagtatgtttcttaatgaaattttttaagttagaattccaaaacataattcacagtcgtaatcctaaatttgaaagataaaaatttaggattcaatgctctttttcaagctgaaaatatgaaaaattaacgaattaatctcaataatggaacacatattttatcacaaatttataaatttgaagatgaaccacataaaaaccagtgagctattaatgaaacctaattaaaattttttgttacattttctcagtaaccaagtataattagaaacattaagtactattcaattaccaattgcctaactaattcataatttatttttatataattttttattcttgtaataaatttggtattttaggatatttggaaatatgttaaattacaatttgtttttaaatttttagttctcaaatattgttatgataatcatataaattaacaagaaacatagtaattaattttatagatgtttttcacaagtaaaaattaaatagttttgatactatacaacattcagaaattaataaaaataaacatagcacttaacaatattcatgcatcaataaaaaacaaatgacctaaatgcctaataacaattagcagtattcagatttttgtcaaattcaggtttattctgatttcagataaaaaaacaaaccctaactttaagccatttataagttaagagtataggtagctactaattaactctttaattggagagggaaaaaaagacattgagagaacaaataaaggagttgctggccagtgtaatggttgagctcttatataatcattatcttaccattgatggataaaggaaaagaccattgcaattgatggatgaaaaagaagaatgggtggatattaacactaatggggagaacaatagagcaattaggtatgactataattcattggaggatctgactaattatagtgatggtaggcaaaagattatttgataaagccatgagagagtatgattttagaagaaaataatgaactaaataataaactattgacaatgataaacagttaatatgattattatgaattgaatgattttcttattattcatttttcacataattttagtagtaattttttgacttcttgagattttttctttttcttttggggcgctgtgggggtgggggtgggtgttgaggcatcttgaagcagtttgggactttacttatcttctttgtgggccttttttagtgaagcttttgctggcatccctttgagcctcattctgctagattggaatctaatttggagaaccatgaggttgactaaggaaacactttctaaatggctaccaccaccaataggttttgttagactaaattttgatgggtggtctttgggcagcccagggcaactagggttagaggattgattagagaccactttggcacagtcataagagctttctctaaaccatcaggtcaaggaagttttattccttttgaaagattgttgcatacacaatggtgtattttgtgtaggagaaattaggaatctgcataccatctatttgatgcttccagtggtgatctgggattgtggtttgtgctttttcttgtccgatgttgtttgggtcctaccttgctcaatgagttatctgctatcttgttcgcatgaaaagttaattgggaagaggaggaagatacatggacctgcccctttttgcaagtcttagcccatcttgaagggatgccataaaagaatgttttacaaattagatgttttggtcttgaaattaaataatattatattgatgctacttctctgtctgcttttgtcaacaaggactttgtggatataagagcttctctatttagatttcattgatagcatgtaccctgctagaagttgatgttttggtcgttgtgggttaactctctcctttcggtttcctttggttgtaaattttatgtttcatattcacatgggtcacatcaacctttggcatgttttagttaaccatctctcctatgggtttcttttgattgtaaattgtgtgcttcatgtgcacttgggtcacaacaacctttggcatgttttagttgattatccttcctttattatgaaggggaaaaaaaaggaaggaagacaacacattcatttatcagtgaacatcctaatttcgtggagagttctccacatgttttaaacaccatatcaattattattctgaatttgaagttaaatgaagccattatgggattctttgaaatttataaacttcaaagtgtatcgcgcattagaaagaaagtgctataagatccaagtgcttgcaccttaccgtcagtttgtttacttagtttgaatggttgaggggtcctaattcattaagaggcgaaatctgtttaaataactcatcatttctctgcaggcagaggcaag

SEQ ID NO: 10435 - DNA, 3645 bp, Vitis vinifera
  Intron number 1 from transcript GSVIVT01021814001 (locus G SVIVG01021814001) derived from phytozome v7.0 (chr-ID chr1 4; pos 7032086 to 7035730 reverse strand)
tgccttagaggtgcaattaacattgtgtacaaggtgtgaattctagctaggtttgagatagtacaacccattatattgcttaactaggccaattgtcttctttgtaatcatgtcctataccacataaaaattaggataaaatattaaattatatctcaatgcttcagtaagtttgctaattgataacaagtcaactcaaaattttggaacatgtaatatcttatcaagaatcaaatcagaaaatagtttgatagatcatgttgacttaatcttcgtttttccattgtcaggtaaataaaaaaaaaccaatataagtgtttaatttaccatgtgttggtggggatttggatatatgatctatctcattgtcatccaagtccaatataatgttgaaaatagatcatgttgagtagtattacaagtgggtgtaagtgcaacttaacatttgtaaagacctaatcattaccattttctttacgaagtaaggccatgagttgattatatttctcggtggtgaatgttgtcatttccatagttggtcctctaggtggtttaatggtgttggtttgaatattgtgaataggaagcctcttccctattagcttcactttatttccatacaatttgtcgtctactaggaatccctgcaaatagaaacgattgttaattaagcggtcatcttagtcacaatggctacacttaagttaccttctcgaagtcccattttcttgtgccatgggaagtcaattcatttggaatacatgagaggattacattgcatggtggtcaacatttgtttcacatttgatagttatatcagtctattgttcttgttggagcataagagcatgaatcttgcgagtatcttgtaaaggtctcatcaccaagattgattcagggatggttgcatatgattcatttagtccaataagaagttatataactctttcattttcttctcatttagcaagggctttcaatcctctacaattgtagcatagaggcttatggtatgaagccaattcatcctaaagagtcattttaatgtagtaaataaggacagattgctgtcattatcgatgattgtcatttcttgtcaaatttgaaaaattttagaattgtcttcttatgaaaacctctctttgagatcttccaaaactttggctattgttgaagcatagatgacagtactttgctatagcaagatgaattgtgtttattatctatgacaagaacatatcattgtatcgttaccatatatggaattttggatttgtagatgctagagccttaatggattcatttacaaatctaatcttgttttttgtgctaagattgatatgcatagcacaactccatcgctcatagttgtatcattaaagtggcttaaagattataaccatcctcgaatgatctgagtggtccaaaataaggggttctgaaacatcaattgatgtctttatagttttcatgtcaggatgaattgcatttaagatccatgacaagaccatatcattgtatcattgccatatatggaatttcgaatttgtggatgctagagccttaatagatccatttgcaaatccaatcttgttttttgtgctaagactaatgtgcatagcacaattccgtcacctaatagttgtatccttgaagtggtttaaagtttaaaaccatccccggatgatttgagtggtacaaaacatggtgttttagaaacatcaattgatgtctctattgttttcgtttcaagatgaattacgtttagaatccatgacaagaccatatcattatattgttgccatttgtggaattttggatttgcaaatgctagagccttaatggatccatttacaaatccaatcttgttttttacaccaagactgatatgcataacacaactttatcgcccatagttgtatccttaaagtggtttagtgattagaatcatccttaaatgatttgaatggtgcaaaacaagggattcaagaacatcaattgatgtctctatggtctttatttcactcatgatgttgtgtttgtggagcaaggtgttttgattttgggccaccaatatcgagttctttgatatcatgtgaaaaatagtaagaaagagagacaaatatgaagaatttctcattgtatacagttaagaatcagtcacataagttttatacatagagagaaaaaactattctaggtatatgttctatgattaatttctaattacaacaagaatccttataattattccaagccataaatacaagaaattatacctacaatcactcctaatcattgttgtacacaaattatacgatcaaaagtcaaagtagtttttttttttcctttaatattaattctacaaatagagggttcctcttaattcaaagcacataaaaaaaaaataaaaaaaattcaaagaaactttggagagctcttgaaaattttccttgaagacttaaaatttcttgaaaacttcaagaaaattcaaagatttcttaaagaataaaagaatatttgaaaatttcttaaagaaatttagacttcaagatttctttttattggaagaattcatgatttattgtttgaaacctcttttgatctaaattaagtacaaaattgtttaaaagggcgtttctatctttgtaagaagaattaggggataatgaatattgtcccctcaaattatcaaatttataattttacacataatctctttatttgataaaatttatgtgcacaagagtatttaagtttatccacatccttaccacatgggtgtccaattgggatgtcaaggttgcattttgtgaccttgttaagctgattaggtaaggccaagattcctaggcctatccaaatatctgattgatgattcattagtacatatttttacaacataaattaatataactttgatatatgttatatttagtcaatgttaaattctttttctttttttctttttttgctcttttagaccctcatttaggttgaaaatatatgacccgcggtcaaaccaagataggcaagcacatctcctagctattaattataatacattttgagcatctaccctatcccatgctctctcctacccacaagcctctaacccaaagtttgttcaaaattccaccggaacgtgaagaagtttcattgaagtatgaatcacactaaacttacagcaaagtttaaactagtttgttatgaattccatatcaatcaagacaagctctttaaatttatttaaaattttgaaataaaaataaggaaaaaaatagaataaataaaaaacaaaccctcaagttgggtttgtaattaggtgaatgtggctcactaaaatttgttaggaaaagacaatatttttcatatagattgatgctaaagaagcaaaaggacaagaaatttccaagttgcaaaatgttctacatgaaatgcaagtataactataaaaagcctatacaacaattatcaaagagaaagaagcaacaaggattgcaattgaacaagctttaccaattatcagagagtttatatatcataaccatacaatgaagcatgttcattagtccttatggcatgtagaggcataatatcaacacaacaaattgagttagtccaataagatactgtttgtttgaa

SEQ ID NO: 10436 - DNA, 1090 bp, Vitis vinifera
  Intron number 1 from transcript GSVIVT01017419001 (locus G SVIVG01017419001) derived from phytozome v7.0 (chr-ID chr9 ; pos 8289971 to 8291060)
ttttcttactttttagtattttatgcaaatataggaaaattattttcttttttctttttttttcttgctccttttcaaacatgaatcacactttaaaagaaaattaatttttaattaggagttaagataaatttaaggagaaacaatgaatcacagacaacaaaaaattaaggaaattgaatttttgaaagtaagtataatcaaattgcttcttttgatacaaaatttgaataaaaattctttcaatgaaaattcaaggaaaggaaaaaacatttttgtctctagattataatactaaattatgtaaaaaatctcctagcatcatttatattcatatttctttttatagatttgaaaaattcaacaatttggaataaacttattcaatgaagaataatttttagatttaaagattattatttaagatcataaatattaccatcattgttgatgtctaagaagatcatattcaacaatttttttaatatgttgtttttttatggtaattaattgatgtcttgtaatttttaatatttaatgaaaaacattattttaattcatctagagctcttaattcatgaagacctcattaatggtaagtaatagctgaatgtaagtttggagtcaaagacatgtcaaggagatgattagttacatgtcttattctcttttgtaggtttctgccaattgaataagcttcaagagttagatctttcttacaacttattccaagggatccttcctccatgtttgaataatttgacatctctgaggttattggatctctctgccaacctattctccggaaatctttcttcccctttattacctaatctcacatccctggagtacatcgatctcagttacaatcagtttgagggttcattctctttcagctcttttgctaatcactccaagcttcaagtggtcatacttggaacggataacgacaattctgaggtagttggaagggataacaacaaatttgaggtagaaactgaatatccagttggttgggttcccctgtttcagctgaaggctctctctctatccagctgtaagctcaccggtgaccttcctggttttcttc

SEQ ID NO: 10437 - DNA, 10519 bp, Vitis vinifera
  Intron number 1 from transcript GSVIVT01028990001 (locus G SVIVG01028990001) derived from phytozome v7.0 (chr-ID chr5 ; pos 10177514 to 10188032)
aagaaattaaaataatctgtacatcagggaagacggtgagtgttgcttcttaggaattctttcaaacagtaggttgtcattatttatggattaagtatttgttcctatattttgatgtctacatctaatgattgatgttatgttataattttaatactggttaaaatacttgtagcatgaaggatttaattgatgcatcggcccaggatcaattttaatatgtggatgtagcaattggacttgaatagattttaatgtaggactagtttttaaccagaacatttgaagttagagaagttaatccatagttgttaaaacacccaggcaatgtgtcacaatggttataagttcacaaatgattgcctaaagtatggagaaattctaaaagaactacatttacgaaaacatcttttggaaaaactacagtccaagcaggaaggaaaaggcaaagggttgtggctcttaagaaacttagttctactcaatgggtggaagactccaaaaggttgcaagggagtagttcttaaggtgaagtttgaaggtgtagaaagaaattgcatggctatgtgtagaaccatgattaggagggtgtatattgttcgagactctatatcttcaaagtgacttattatgttgaaagactaccttaattggcaattggttaaaaacaatctctttccatttttagttctgataaagatagtgatgttatgttgtggtcaaggatgaaaatatcggtaatcatggatatatcggtttttcgattttatggatatatcgacagatattttggaaaaaaatatcggtagaccttaaattgatcaaaactcatggaaatataagaaaaacctcatagaaatgtaattataagtataatagacattttaaatttattttgttaaagaatttaatatatgtatgatataatttatcatatttgataataatatcgtatgtatcgataaaaaatatgaattttgtaagcgtatatttattattaaattacatcaaatattattccacaataatattatgatatttaattataatatgtcaaattttaaaatatatttaatattaaaattatgatccatttaattcaattgtatctaataatataaaataaatgatgatatatgtataaattttttaatatttatatttctatatttaattaatatataaatgatataaaaaaaaagttaagaaaattatcaccataatttttatatttttagtggtcaattaaattaaatttaaaaatcaaataattagaattaatttgtttgttaaaatattttgtttttatcatggtatgagtatatatttattctagtatatgttttgtaatatatggcaaggtagcccaatggtgagtagggggctatgaaggcttgtttgggcttgggtttgagtcatgcgccctgcaagtcaaaatttggatttttttcatttgagttttcactgggcagcccgaaaagataggtgattttttgctgaaaaattggtgcttaaattcaaaaaccggtgttttttttttttcatagtttcatcggtttcttggcagaaaccgatatattgccgagatattggcgaaacacaccaattttttttggaaatttcacccttttgacatttcgccaccctattttgtttccacgaccactgaaatgcgatatttcaacaaaatttcgctgaaagttttggaaattttcattcttggttgtggtctttatatgctcgctttggtctgaggcaaagctgtttatagtagaatgccctcaaactttggtgaattttatagattgggtgggatcattgtaagatgttgggccttttggtgggtgggtctttatatgtttttggtctcttttggtggcgggtgtataggtttgtataccttacataggctgtataccttgagtcgctctttaggcgtctctttttaaatgaattttctttacttatcaaaaaaaaactattgtctaggaaatcctagggcctgtttggttgctgtttttgaaaactgttctggaaaacagtttttgagaacaatttttaagaacagtttttggtggtttttaaaaaaaaattgtgtttgggaactgaattttgaaaaacagtttttgttctcaaaaacaaaaaaacatgtttggttgagttaataaaaaaataatttagaacaaatataacaaaaaatacgtttgaaagatgttttttttttcttttctaattaataaaatattttcttcaagtaattttatattataaatttataaataatttttagatatatagttcatttaaattaaaaaaattatttattttattaatttaaaaataaaaatatttttttatttaatttttaactttattaaaaattatagcatattttattaagttgagataaaattgttctcatgatttgttaattttttttttatctcttctaattctaaaattcaaaatgccaaccctttctttctccacccacttctctcatcgggcatcaagaagcccttttctgaagttgccctccagccgagagaatccttaaaaggccctattttcctctgccactctcaatcctcgcaggtactaatctaatcatgttattattattattatttttttgcaacccccgtttgattcccaagaaaatccatcccccattcgatttccgggaaaattcatcctcgtttgatttccgagaaaatccaagcaaaaaccctgcaacccgtttgattcccaagaaaatccatcccccatttgatttccgggaaaattcatcctcgtttgatttccgagaaaatccaagcaaaaaccccaaggaaaaccaaaaaaatggattttcttttgctccctgcgttttctggatccgttttagggtctctttgctattgtgccattggatttaaatttcacgaaccttgaatcaaaactgagaaatgggaaaaatcaaaaagaggcgagcgactgtgctggagatgaaaacgggaagaaaaaaaaaacacgggaaacagattgtttttttttgtttaattttgttctttgaacagtaaaaaaacggggaaaacaacattttgttgttctctaaacagtgtcattttgagaacacggggaacaacaaaaacaaaaatgactctctcaaccaaacgagtttttggtgttttttgttttcaagaacagaaaacagttcttgaaaacattaaacaaacaggcccctagtttcttgtatctcaaaaaactctttctatcattaatcactaaaagtttggattttttcaatgtgaaatttgtcacttagccaagcatgttcgtatgtcatatccaattcaactatacaagtcatctcatcctttttccataatacatagtgatatttggaggtcgtttaagataaagaacataatagggactagatggtttgtgtcctttgtagatgacagtctcccaatgtaagtatgttctagacttgctaaaggagactaggatgcttagttgtaaacctgtagacacacctatggactgcactattaaattaggaattgttgaaggaagtgctctggtggatataagggatatatcaaagacttgtggggaactcatctatctctctcacctaagatcgaacattacttttttcattcaacatggttggccaattaatgaacaatccaattgagaaacatatgaaagccatgtaatcgtatcctaagatatctcgaaatgacttcaagaatgggactctatttccaaagaacatagaaaagaaacattgagtttttttaaatgcagactgggctgactccataactgactgaagatcaatcttaggatattgtacctacgtatgggggaatttggttacttgacgaagtaagaaacattctgctgtaactcggagcaacatagaagtagaatttagagctatgacatatggaatttgttaaggaatgtggttaaaacgactcctaaatgagctaaaaattctaatagaagattttatgaagatgttttgtgacaattaagctaccataagtattgctaaggacttggttcatcatgattggacaaagcatgtggaaatagatcaccattttatcaaggagaagatagaaaaagggataattttattgctttaaactctaatagttctctaaacagtagacgtcctagatgcccttatcaaggcgctttctagaaccaactttgaagatttgagatccaagttgggaatgatcaatatttacaacccgacttaagggagaatgtgtaaatccaatggaaatctgaaatgtacaactatgttaacaactctgttacaactacaactgtgttatagttgtgtcataactacgttatagttgtgtcacaactgtggtatagttgcatttcccataattttaaaaggcccaaggtgcaaaaatatcctatagcttaggtgcaaggtgcaacacaaggcggacgcttgagtgaagtgaaatctgacctagtatgcatatcaattttataaaatatgatctaaaatccaatccagtcaataaaaaatttaagttttcaaacatttaaaagaaaattcaacaaaaaaggtaacgaaattatataaaatttaatatacaattagaaatttcaagaataaaagtgtttaaaaatgaaaaatgaagtagataaggtatgtcaaggcgcaagtcttggcaaacaaggcactatagttagggagtggttgcgccttaagctagggagtggtatttccagttctaactttttccttgattttatgagagactttttctcctaagattaatgattagattttttttttctaaggaagatgaccttaaccattcatgtataaatatcgacattataattagtttgaataatagagaaaaagaagtattgtttttccttcaaatttcacaaatttcttcaacatgcttgcaagattatttacacttatccgttcaaaataaagtagataaggcaggtctcttcaacaaggcacacgtcttggccagcaaggcactatagttagggagtggtatttccagttctaacttattccttgattttatgagagactttttctcctaaaattaaagattagatttttttttctaaggcaaatgacctcaaccattcatgtataaatatcgacattataattagtttgaataatagagaaaaagaagtattgtttctccctcaaatttcacaaatttcttcaaaatgctttcaagattatttacacttattcgttctttactcacttaagacatgatgaacttcctatttctccttcctttagccaccttttggaaatatttagagttgcaatccgcttctcttacccatctcaccttagtcttttgcctccaatgcacctcttcccttaacatcagatcctccattccccattccttaaggccttaagagctgaaaacttaggagattgattcccttcctatttacaagcattaaggctaattgtgtcttgaagaatattcttctttctttccttaaaatctttctgaaagacaccttattccattcttttagttttgatttgacaaagtgtagccttgttatgaatctatgaccttcccacccttcgccttgaaattctcaccaccataagctaaatctttccttgaactttggatggagtaaacatatgttctcaaattgaaaagaagctaatccttactataacatatttgcttctaggatggtcgaacaatggtcaaaggttaacttgggtaggacttcttggggacttgagaagctttgctcctactcatttgaatataaaaatctatccaatctcttgcagatgtgggattcttgcaaattggaccaagtaaaaaagtgttcctaagaaaggggtcgattaactcattttctctaatggaattcattagagttcctcatggtagggtttatttggaaccacccatcttctccgaaattctccttttgatgctaaaccacacaccctctcactcaactctatcctataaatccttcttaagagtggtattgttgggtctatacattgagttgagctaaaagatcccatctccctctaagtctaacctgattgtaatcgacaaggatcttaatatcaactttgagcatctatacttgtttgaatccccatataatcaatacccctctcaaagccccacaaatgggagcatgctacccataaacctcctatcactcatcttactctttgtttcttgagacatcacgatgtttggggatttatgatgaagaaaatccttaacaatccttcttttctttttctttttctttttttaatttttattctttgataagaaacaacactttcattggattgaaatattaagtacaaagaaaggtgagaaatccttccaagaagtacacaatcttctatacaaagaaggataagaaaggtcagtaagtgcagactagctctaaaggtcaaatttaactataattcacataggtataaaatcccctaaaaaaggaatcatatatctggcttcacattttgctaatgcatctgtcacatggttgcctaagtgaggagcataagagaagtaacatcctgactctgcaaaaatgtaaaaaaattggcgcaaatattaaacccctgcttgtaggtttagagaatgctcttaatactttgccaccataatctctaatcaaccctccaatccctagctaccctggtttgcccaaagaacatccatcaaaatttagtttaacaaagcccactagaggtggtattcattccctaagtttctccttagtcaatcttgtggttctacaaactaggtttcaatcaaatagaatgagtctcaaaggaatgcctacaaaagctttactagcctaaaatgaagaagaaaaataaaataagcccccaagtgcttcttttctttcaagatcccaagccttgaatagtccagctaatgatcttcataccaacacttaaaagcccaaccacttttgaagcagctcctatgacgcaccaatacttttggatacaggtctgtacttcttcttgaaacacaccttatcaatagaccacacactgctactgtccatagggagaacattctcattgtgcttgacaagcttgactttcttggtggctgaaactgaatgataaaggatgctcttggaattctttggaaaattttaattgaactattcttgtatcaacattctaagaggatttgaccctttcaatatctgattcctttccttcactaaaaccatagaattccaagagacagaccttgtaaagtggtactgatggcatattattatttatttatttttttgataggaaaccatgcatgaatatattgatagaaaaagtacaataaaaggatgaggaatcctcccgccaaaggtaaaactaaacaacacaaaaagataacaagacactacacgatgtcaactacggacaagcccccttgactataccgtcccattggaactacacattgctagccaatctagttgtaatacgttaaggggaatgcccttaaaaaccgtggaacaaaaagcccaaaaagaagctaggaaatgaatggagtcccaaatattctctgaattcctagctttgtcctcaaatatcctagcatttcttttccgccacacaacccaaattaaagctatgcacgcgttttgccacaaaactaaccctttcttggacttgccaaaacctttataattgatgaacatcatgtttgaaatgcttttcggaggaacccaatccatcttggctagttgaaatagtctgtgccacaaccccaatgacacagaacaatgaaggaagagatgatctgttgattctccttgctctatacacaatttacaaatgttagggctaagaactttgtggggtttcctcaattgtagcaagtcattggtgtttaccttcttgtgtaccacaagccagacaaaggccttaactttgaaagggacttgaggtttccatacaaacttagtggggaaaaatggagatgaatcaggcatttgggacaaggctgtaaagaaagacttgactgtaaacaatcctgaagacaataaggactaggatctcgcatctgaagtggaagtggataaatgcatacaatcaagagagcgcatgaggtgttctagatcttctatctcagaatcggatagattacgacgaaaattaaagttccatgagaaagggtgagccgaaccgagaattgaagatataggaatatttttatccatcactactctaaatagtcttggatattggtctttgaagatcaggtccccccatcacaaatcttccaaaaagcgaattttttccccatctcctacaacaaaccgagtatacttggaaaaatcctgaaagacttgtgcaatgaccttccaaggacaacgatgtgaccatttgactaaagtgttggcatcccaaccatttgagtgtgtctcgtagatgctaagaatgacctgatgccacagagctgtactctccttaggaaacctccacaaccatttccctaaaagagcacgattccttaaaggaatcttcccaaaccccaaacccccttttactctcggctcacacactgcatcacaactaataagatgatctcttttaccttccccaacccctgaccaaagaaaatccctttgcatcctctcaacttttgcagccattgaagcgggaatcttaaacagagaaagaaagtagctagggatatgggaaaggcatgagtgtacaagagttatcctaccaccgaaagataagtaagccttttgccaccggtttaatctcctagagattctctcaatcactggatcccagaatccacaagcagttggattccctcccaaaggaagacccagataaagtataggccaatctgaagccttgcagtcaagcaacaaggctaacctagagagatgattttgatcaaggttgatgccaaaaagattactcttgtcaagattgaccttaagcccagaaacttgaccaaacactaacaataaactcttaagagttagcagttcttccgtactagagttagcaaagaggatggtatcgtttgcgaattgcagatgggacaccctacatctatttctatagcaatagtcagtctaattgcatttgcctttatggacaacccaatgcataaaattagagaaggaagtatactaatattgggggcatttttttcttctaaacaaaccaacaaattataccacttgttaggaatatttatgcatcattgaaaaggagcaccatctgcacagcagccatctgtctctcccattctttttgtttgtttgtgaacagaaagcaacaccttcattcactaaatgataaatacaagaatcatgagtctaagatgtacaaatattagtctgaaagtaactgagtttccagcaacacaaaaaaactgcccccatccttgcaaggaataaatagagatactttacatgctcaagcagggagaaaatctccaacaaaagaggccaaacccattgcatctgtctgtcacattctgattctggaactatatagttttaccaatagattcaaccttctaaactcagtcaactggtacgttcttaatagaatctattggccaccaccagaatagctttacatggtgtaagatggtgattgacagtggaggttttttctttccttctttctagaaaataaatctcactgtgtatgcagaacctgcttttctccctcctatcagaatcctccaattataaaatcgtgtcctcagtatctacagtagctgtccaaagattaccatagaagtggcttcatccacagtaatctgcaacaatattggagaagtgctacatataggaaaatctccacgctctactttttggtcagaatttagaatctggtccaagtatgtattaaagtgattttttaccataagacaagggaattcagacaactattaccattagaaccagcacctatgcatgcaaagcagaaatttagggcacctgtagagttaaataacattaatgtaattcctaatgccatgaacttaattctgttgatctcattttgcatcgaagacattagaataaatgtgaattatcatgaaatattgctgatgtctgagcagacacatgccgtgagtatgatgttgggataatgggagggtgcaatatgttagatcagcttgtttaattctatctgacaatctagaaaacatatggacctatccattggtctttaaccatataaaattaagatatattgacatgttgaaatttggatgtgttgattaacatattatagtaacactttgcagctaatatatatattgtgatgtcccatagttgacatgttagttatgttgctcatacagccttgcatattgctcatacagccaatttggatctttctttatttcttttggatttattttttgaagctgtaaagttatattatggttttatggtttctttaaattatagattgttgccaatccatccg

SEQ ID NO: 10438 - DNA, 12965 bp, Vitis vinifera
  Intron number 5 from transcript GSVIVT01025735001 (locus G SVIVG01025735001) derived from phytozome v7.0 (chr-ID chr8 ; pos 12441088 to 12454052 reverse strand)
ttggatttaaggtctctagccgaaaggtataatgcattttccttttatgcttttaaacagccagtgtgttccttctaacattagttgcatattattatctttgcaaggtattttgtgtaaggctttgtattattgaagctttctaagatatttcatagtcagattttatgttggaatgagttgctcctattaaatacattaaatttagcactaaaggtcggtttctccaaaatgcattctcagtttcactttttaatgaaataaattattaattgcatgactagtttagtaattttttttgcaaactatttcactagaacggaactgatctacttggacaacaagatgctcaagtggtaaagggttgaggagggtttgtggaaggttccaaattcaagtcccaatagggacaagaatttacctataaaaaaaactaaaaaagatcgttgtttcaatagcattacaaaggagctaatggaaagttcttcttccatgaactttgaaaatgattatagctaattaaatgccttttggtttttgaaatataagttgatggacaaatccaactcaaaacaatgggatcttagttgaatagcttttctggaagtttcttctgatagaaacctctttaaaattagtttagttttatatggtattccgtgaactttgaagatgattatagctaattaaatgccttttggtttttgaaatataagttggacaaatccaactcaaaagaacgggatcttagttgaatagcttttcttgaagtttcttctgatagaaacctttttaaaattaatttagtattatatggtattctgtgaactttgaagatgattatagctaattaaatgccttttggcttttgaaatataagttggacaaatccaactcaaaagaatgggatcttagttgaatagctgtttttgaagtttcttctgatagaaacctttttaaaattagtttagtattatatggtattcttttgtattgtgtggattttagcttctgcttgtagacaagatcattataaaccattgccttttttgggccttatagtttaataatagtatccatacattattgacttccatatggcctttttttttttattccttgtgttccctcttgtgtcgcatctcttgccctaaaacccaagctagttccttgctctttcataggcttcactcctctttgggcccttctctctccttttgtctttgccttctttagatgaagagaacaatggagtggtgattggtgattggtgactccttagaaaagttggttctcagtggagatgaagttattttaggtatctatggaagaaggaaataaaagcttggttcataggattttggagagaaggcaaggtgtttattggtggagtttggagtaaagggcctcccttggcctttggatggagtggaatattattcccaaaggaacaagggtgaacctttttttagggagttaaaggagaaagggagagggtacatgctagagctgcaaagtaataaaactggtcataatttgttggtagccttttctttgaaggctaggaggttctcgattatcttctcaaagggggttgacttagttggttgggctactttggcaaagaagatggacaacttaggattaatctccatttcctgtagacttgtgtctattggctcaattgtccctatttttaaggtggctgcaacatcaattcaagtgagttgattaaagcatagaacttaagtttaagccacaaagctccccttatcattagtgggtgacgctttatggatttagcataatgaggatgaggttagtagaaaaatgaaggcactaaagatgttgtttaggggtgcttgggggaacttctttaacaactcttgcagtacaaagcttgggaaaattggccttagttaattgcaatttgaagggtggtgttaagttggctctagtggggatgattatataagatggaaggtcactagactcccttgaaaatgtggtgagatgaatcttcttctctagcagtgggtcctctagaatctcttagtttgaacagtttagaagaggggtttttgtgagtttgtggaagaagctcactgaagttggtcttctaaaaggtttgcaacctttaacaaatttttaaggataccaatcaatagttttgagaaggagatttcgactcttctaagaaaaatggaagccaggtgaaaaaaaaggccaccctttcttaagatagggtgaggatcatacacttgccttggcaacaagttttgtgttgtatttgtaaggtggctcttctaaatcacccatgattaggaaatggtcaattctttttttctttttgataggtaaataaaattagtattaaaaacaccaaaaaagggtgcaccaaagtacacatgatgtatacatcagacgattaaaagcaccaaaaaaggatagggaaaacaaaaaatactccctcccttaaaccgaacaaccaatcaataaaatcaactaaggacatagatgtttttcctataaacaaatcggtccaagataataagctacacaaaaacaaaaattttagcctttgaatagagagctccatgttctcaaaagatcttctatttctttcttttcatattgtctagaaaagtcataaaggcgttgctttcaaacttttttctgttttcttccaacaaaagaaccatgctaacctaagagcatttctctaactatggaataaatcacccaatacaccccaaacaaggagaataagagctcccacaataccctcgcctttccacaatgcaaaagaatgtggtctcctcatgagaatgacaaaggatgtatctattggccaatgaccaacccctcctttgtagttggtctaaagtcaaaattttcccctaagttgcctcctaagcaaaaaagcttaccttaggaggaatccacacattccacacaacacttgttgggatcgactctacacttcttgcctcaagaattgagtgaaggggtttaacaaagaaggatccactttttgtcttcacccatgacaccttgtcctctccttccacaacaaccaccttatcttgaagccttgtcaaaaagcactgcacaatctcaatgtcccggtcatttagaggtttagagaagttgggaatccaaacacccctctcattagagtgcaccttcaagtttgccaccctagcctcgttagagtgcatcaaccgattgttcagtcttccacaatatgtgaaaaaacccattatcaaaaggagattgaccgaggaaggctcatctatcaagtcacaaaatcatatcatggttctctaaccatgttaaagtctcccccaaatgtagcaagggtatttctagagcccttaatgaccctctctcctcccaaaaagtttcatgttctctctcttcccttgagctataaatcttagaaaacacctaagtgaagttatcctcacaacatttgaaatgacaatggattgaataagaaccaatctccatctcaagcagctccaacactcttttgtcccaaaaagccaccacttttctggctactctcattgcttctagagtacccaattctaagactctactcgcctttaaaattctaactagggccatcaacataacatcactaaggaggagattgatgatactcttctgaggttgtataaggataaagttcctagatgagatgttttttctttggcattttgacacaaattttgggacttcgttaaggaggaggttttaggtcttacggatttttttgttaggaatacctttgagaaaagtccaaaggacttctaacccattagccttatgggtaatttgtataaaagtttagctatggctttggtaaatgggttgaaacaagtgattgggaaagtggtgtcagattcttagaatgtatttgtagaagagaggcaaatcctagatatgattattatttttttgataaataagcgcagaatgtattaacaagagacaaaaaagccacaaagcatacagagagtatacaaggcagctaaggcctcgcaaccaaaagaagaagaaacaaaagactcaccaacccttaactggaagctaactactccaaaaagcctataagggagagcgactcctctccaatatacaatttaacccaacccaataaattacaaacaaaagaatttttaagcttctgaattactaaccccccccccccccccccctccctaaaagctagtctatttctctcattccaaactgtctaaaaaatgtacagtagaatggatttccaaatcttttttctttttttctccacaaaagagccccttcagctaaataaaatctcctttacagtttctggaaaaacccactgagcgccaaacaaaccaagaacaatatcccacaacactctagccactgtacagtgtattagaatatgatttacagtttcctcttcgcaaccacacaagaaacaacaattaggaagctaccaccctcttttctggagtctatcaagagtaagcaccttcccccaagcgacttcccacacgaagaacgcactttttggttggaactctatccacccaaatgctactttttgggaaaacgacaacaatggagcttactaacaagctgtacgctttcttgattctaaactgcccgtttcttccttccttctaaaaaaccgagtcttcctccaaagtaatcctgtgacccctcaaaacaagaagcaaattgcctaccatatccaattcccaatcattaaagtccctaagaaaccttaaattctagctgccttggccgaaattctggtctcacatctcttccactgtggcattcttatgaacagccataacataaagatacgggaatctttgggacaacattgtatacccacaccaaagatcagtccagaatctaattttggtgccttttcccactttaaatgccatattttcctagcaccaaacaaattccttcaagatctccttccaaacccctactccaaatgccccatttgccttctttgtcttctaaccaagatcctcttgcccatactttgccacaagcacctgcttccaaagatcctctttaacacaagcaaatctccatatccatttgccaagcaagactttgttcaagagggctagctttcttaagccaagcctccccttttccttatccgcacaaaccacctcccaattgattaagtgggctttcttttccatattaccccctccccacaaaaaatctctttgcaacttttctaacctccttgctactgtctttggcatgcggaaaagggacatttgatacaagggcatactagtcatcgtggtctttataagtgtaattctcccacctttggatatatattggcgtttccaaagggcaagtctcctcctcactctctcttccaccccatcccacaaagaagcggccttattaggcgaccccaaaggcagcctcaagtagactgcaggcagctgtcccaccctacaccttagttccactgccatctcgtccacctcttccacctccccaattggtataatttcacttttggccaaattaatccttaaccctgaagcagctttaaaccagaaaagaattcagctcaaatgcgttaagtgctttttctttgcctcacaaaaaacgactgtatcatcagtaaagagtaagtgtgaaatattgatagcctgtctctacctcgctggatgctacacccagagataaaacccgcttcaacaaccctcctaattaaaacactcagcacttccattcccatgacaaataggtagggggaaagagggttcccttggcgcagccccttagaacttggaaagaacccggctggcactccgttcaccaagactgaaaacttggttgtagatatacaactccacatccatcccaaccactttggcccaaaccccattttttgcaaaaccttcagcaaaaactgccagttaatgctgtcatacgccttctcgatatccaatttgcaaattaggcctttctctctcatttttttgccatgaatcaatcacctcatttgcaattaaagaggcatctagaatctgtctccccatggaaaacgcattctgatcgggggaaaccacttttcctatcactttcttgagtctattggccagcaccttagccaacaatttatatagcccctctaataggctgatgggtctataatccccaaggtcctcatccctccctctctttggtaacaagatcagaaacatattgttaaagcttttgaggaaagaattctgctcatggaactccttaaacatatccaatatctcctcctttatgaaatcccagcagctttgccaaaaagccacagtgaagctgtccagtcttggagctttgtccccattcatatccattaaagcagcatggacctcagtctcagaaaaagggagctccagcaactccgcttcttgctagttgatctgctttaactgcagtctccctatgttcgtctttcaatccgaacttttatgagagcagttgctgaaaggcgtttgctaccccttccctcacttcttgctcctttgataaccacacctcatttatcttgattctgtccagggaattaactcttcgatgagcagttgtcatacgatggaaatagctcgtatttctatcccattctcttagccataactcccttgatagctgtctccaatgggtttcttccatggacacccacttagtgtatccctccttggcttcctttttacagactatttcctcctccgtcaaacttctctccctttccaccagatcccaggactccccttgtcggagaactgcaactttattgcactccagtctcccgaataccttcctattccaaatttttaaattttgtttaatctccttcaacgtagtagccaatctatagctagcactgcctctaaccaccatcccctgccaccaacaacgaattagatctttaaacctctcaattttaagccacatattttcgaacctgaatggggagggtcctcttcttagtccaccaccctcaagtagactgaaaaatgatccgaggtagtccaaggtaaccttctcttgaagatactattgaactgatcgagccaactgggagtcgcgagaaatctatccagtctggcccaggactgattattaaggcccccgctccaggtaaataatcccccttgcagcgggagatccacaagccctaagttgtctataatttgagcaaatcttctcattgctgaggttattctcccttgtctactcttttcactttgggagaggataatattaaaatcaccccctaaacactagggttcttcccaaattcctctaatcgtcccaagctcttcccacaagcacttcctttcttctctggagaaaggaccatagactcccctaaatacccagacaacatcatcttccacattcctgaatctgcaggaggtggagaactggcccacctcccaatccaaaatttccatagaccttttgtcctagcaaatcaaaatgcctcttgtcgatccagtagtatccaaggccctccattctaagaatctccccgatcctaagcttctcaccacccctttagacattgcttgtatctttgtctcttggatacacaacaaatccaccttttactttcttatgacagacttaattattttccttttagaaatgtcattcgctcccctcacattccaactcaaaattttgaggttcattggacatccgctagttggcttcctctgccctgaagaggacatttcttcttaaattccccttcatagttaattgaacactctagcctcttaagctctctttcaaaatttgatttctccaaaagacctttactgtgtatcatttcccgcctttttctgattttgaccaagaaactcaggatttccttttccaggccttcagttgagaaacccaaaaaatggttgaatttggccagactgctttcctcccaattaatcttcttttcaccccttacttcttggggctcagactgagctaaaccccactcctaattccttgccgaatagccgacacaattaacctcaaccaagtcccaacaaccattgccattctcagcgggcccgtctgcgactgggatacttgacaattttccttcttgaatatcctccttaacaccccagaatggtcgtaatactccccctctggagtccgaccaaaagaaaaggaattagaaggagaagaccttgagactcttaagccccacgaatttaaaacagacccatacctcgaagcttcttccactagcgcacggtctgtcattgtgaagtggatatccacttgctgcttcctccagtcttccttctctcgcatcataataaactcaagctctgagttacactccttgcaggttccagtgagaactgaggagcaagccttcaatgaaagcccacttgcagtaagctaggtctaggacgggccaggattgtcccttaacaggataaaaggcccaataggcgacgcgttcacctcaacggcggcccaccccttacccttggaacacgacgacccaacctttggcccatctccatcagccacaaccccctttaaaagttctcccactaatgggctttgtgaaagaggcctaacagtcctcttcgagcccacaagacccacggcaaggccagacgaagacggcccagcaactgaagggtcaaaagaaggccgagtcatcgacccattttgaacccgattttcaatctcttcactacccgccccatttgcctgccctccagtcccatctgctaaccggaactgctcctcgagcctcgcatttgccaactcttccactcgcgggccagcgcgtgcaacaacatcacccctaacctctctacttggtcgaccagttgagccacgacagttcaccgtgttctgcttcagcgacagcaagacctctcaccaaagggagaggtaataggtcgccttctctacctcgatctccaacgagcttggccagtcttcaccgttcgttttaactaaaatccgagcccactgtagttcctcaattctctctgtctgtgggtcgatggttaagaatccaccacacacttctcccactcttctcaaaatggacgggacccaaaatcctcacccagtcttcatttcttaattcaccttcttccaaacacccagaccttggactccagcactccaatcccatctaaatccctcctactgaccttttcccagagatgaggactcgtctggcttctttcacaaattcgaactccaatagaacccgttccttccccaaccttaccaaccctagctttcctttcaacccccaagaacttgccattagccaccccaacctctccaaatcctctcctcctactaaaccagtgttccagcttccgactacataatgttccaatctactcaagtttttgcttatttcctccccttttacctccactctgaccattttactggccttgctccacgacctcttcaccatttcaacatacgaccttcccgaggccctctcttcctgtttgttctcctttttgtcgaaacaaacatccagttttcgtaaactctccgccatagccaaccatccccctttttctccactgcctttcgagatgcatatgttgtatctcttcttctccaggtcgacaacccctaaccgaagaaagcagcccgcactattggcgtcacgcactagggagtagcttctctccttttccttccatcccttttcccattttccttctttcctgtccttgatgcactggttcagatcctccagaaaaagccctacactcgccggccccagtcggacccatgacgaaaccccttttttactttccacgatgattacttggggtttgccttttctctcctcaactccaacttcaaaaacctttgactccaccccaaagctactcccttttcgttttctccgattctccgctcgactttttccctcatcaccgtcgctctcgcgcactcgctcgctctctctcatctcccaaagctaagattttcagtgattttttatctttattccctagatatgattcttattattgataagagtaatggtttgagattgaggagtcatagaaagggagttctttgtatgttagacattgaaaaagcatacgaccaagtaaattggagcagtttttagaggtgatgcaaaaaatgggctttaaataagaatagattgaatggatttagttttagatttaattgtaaggttttcaattttggttaatggttcaccttttggattttttcagaactcaaggggtttgagataggggggagttttttgtttttgtgatagagacatttagcattcttttgagaagggcaaggaagggttgcttcatgttattttttattttttattttttattttgatgagaaacaacatattaatatattaaataaggattaaaaggtataaaggaaggatgagaaatcctctaaaaaacaaagaactaaacaaatggcacctccaaaatactaaataaacctatactttgtgaggcaattacacaaaacaacctctcttactagctcacaccttttgacctacacaccaacaaccaattaaattggatcatattaagaggaatgcccttgaaagttgtgatgcaagatgcccaaaaggaagcaaggaaatgaatagtatctcaaagagcctttgaagtccttgccttatcctaaaatttttttgtatttctttcatgccacacaacctaaatcaaagccatacatgcattttgccatagtaccaatcctccattggagtttcccattcccttatttgcaatggttatcatatgcaaatactccttagaggaacctagtccaacttagccaatccaaataatctgtgccacaaccccatagtcaaagagcaatgcaaaaaaagatgatctaccgattctccacactccatacacaacatacaaacatcaagaccgagggttttgtagatttcctcaattgtgatatgtcgttagtgttcacctccttctgtgctgctaactaaacaaatgacttaacattaagagggacatgagatttccaaacaaaattagtaggaaggaaaggaattgggtcaaaatgattagacaagaccacgaagaaagactttactgtaaataaacctgaagaagataaagacctaagtgataccaaaagactaatactatgatataggtgataccccttaaaggatgggagagtcaatttgctaaaaaacactctgaagagcctgccaatatgcctcatgtccctttttgttatttctaagttaatagcattaagattagagaaaattcaaagggatatccgatgagggggagggctagggcttttgagaagaaacctcatctaatgcattgattgtcgatatgcaaagataaaaagaatggggtctagatatcaaggagttgttcattcttaataaagactaattaggaagatggtattagaaatttgctatggagagagatatcgtttggagctgggaaagtctaaggaagggccttgagaatggcactcttggattgggaagggtgtggtattgacttgtggaaggtgagaagaaaaggatggggaatttttaagcctacgacaaggtttgaggtaggcaatgagggaagaatcaaactttggcgtggtgtgtggtatggtgatgttccttaagggctcttttccatctctattctcttttgaagcttccaaggaagcttggttggatgatgtttgggtgatagagggcaggttggtcttgtgtaacctatgcttcttaagatatttccaagattgagagatgaatgatgttgaggagctgctttgagagctacatgtgttaggaaggagtgatagggagaaagatacaatggtgtggaaagctagtaagagtggggaattcttagtgaagacttttttttgtccttagaattggaagaagaagagtctttcctttctaagatagtgtggggctcttgggctcctattaaagtgggtttctttgtgtggaggctgcttggggaaggattttaaccatggaccaactcaaaagacaaaaatggatttcggtgagttattgtcatatgtgtaaaaatgtagaagaatcagtaaaccatctccttatccattgtgggaaagctgagagtgccacaacacttttggttttccttatttggcatcttgtgggttcttccttcttcagtgaaagaattgttaatgggttatcatgagagttttgtgggtaaaaaaggaaggcaggttattctggacaatttgatgggagtgtaattgaagaacctttgaagaggtgcaacattcaaatcaatctcttaaggattcccttatttggaacctacactaatggtcttgaaggactctacaagatgatgttcaagttgggtcctcatccttgatagagagtggttgtgctctaagtatttagaatgtggttgtggttgtggttgtggttgttggttgcggtgttttacttttttgatgtatactttctgtctcgtacgtgtgtgcttctttccttgattggcccttttagtaattctcatttgccaacacccatgcatttcatactatctattgtatatactttattgtagatgcttttcaatatgctatgatatggttgttttcagctttgtcaggaagagcaataggaaccatgattattgaactttcaaaataaaaagctgcatgtacctttactttccaacatgtgccagcaaatccattattttatgctgtgtcttttccaacagtgctcattctttccctgcagttgacaatttttatattttgtttgtgcaatttttgttggaattgtacagttctatcatatgtgtccttttccattctttacaggttttacaagaagtattgaggtgctactccattcc

SEQ ID NO: 10439 - DNA, 6150 bp, Vitis vinifera
  Intron number 17 from transcript GSVIVT01030703001 (locus GSVIVG01030703001) derived from phytozome v7.0 (chr-ID chr 14; pos 14042826 to 14048975)
catttctgctttcaaagaggtaaaattcctggaagattcatcatgcatgtgttatataggattcatgaaatatgaatacctgaagccaatttttctgttctagttacagataataattttctctagaactatgaaataaactgaaataataaatgtgatatccattaataaacaatgaagaaaattgcctaaaaaccagtcttagaagactaactacattaaagtagaagacattcttgctcattgttgtcttagttggtgtgaattccatttaagctaacctaagtaatcacccaagaaagagggtttcaggaggagggatgtgagggtgttgaattggatgatgacctcttttcagctgtcaaaccaaatttcaacacaagtaaaatatggatgcaaatgatgaaaaataaagtgttgaaattgaagagagtaagggaatataaaaggaaaaaaagcttttgtgattctggtcaataaacccactctgtctacaccctcttaacttccttacaaaagccttcttctcaaccaagactctgattatccttctttacacttggattacttatgttctaatggacctttacaacttctatgcgtatcctctcacctctctctctctcctcacaagattacaaggaaaaacatgtacaaaagaccttcacaaagggtaagctataggaatcccacatattctattagttgacttcccataatatcagaattgtttcttgattttatgtagtaaattatttagttgacttttgtgaattaggaatgtgataattgttaagaggattcttaggagtcagtcaactattctaattagtttcctttcttagacttttgttttgtttttgtgtgtgtgttttgttttagtattcaaatctcaatgtgatgtattattatctgcatcaattctaaaagaaaaataatacaattttttattctccaatatggtattagagctataaacacctttgttatatggccctttgttgcttgaacaccttaggttttttcagtcctccaacctctttgtctttatttataacctctaaatctgtaggactcaaatcttctgctattctttcttcctatggaatgtaagaaaactcaagatgagtgtgcaggagattccatgcatcagaaagaaaaagagataagtaagagtgatagtcaaatttgtcagattactatagagaaaataaatgggcagaattctcttgactggtgttagtttgtcaaattgtttctttagaagtaaagggaaaatgggatatctaacaagagctgttaaggaacctaaacccattgactacttgtttagtgcttggtatgctgaaaattctaagaatgtgtcttgtctattatagtacgatactaataacaatgtgtccagatatttgtagatgtctatatgcaactgctcttcctttcaattcagtgaaggacctttatttcaaaataatgttggaatctattgtttcatttggtaaggcattgaagcctcctccatatcatgagtcacaattttgaaaaaaaaaaaaaagaaatggaattaataaatagggttttgttggaaagttgcaaaatagaatggaagaaaactagttgcactctaatgtatgatggatggactgataggaagaatggatccattaccaattttttttgtaaacggtttaaggactatttatctaaaaagtattgatacttcaaaattcgcaaaaaatgatgaaaatgttgtcaaagtagtaatggataatgctttaacatatgtgaaagctggaaagattttaatgacaaagagaaagcaattgttttggactccatgtgcttcccattgcttggaccttattctaacatatattggagatcttcccattcataatgatacaatgtccaaggaaagaaaaattacagtcttcatctacatgcattttaggtgctaaatatcatcaagaagtacactaagaaaagggaattagtgaaagttagtgttagtagatttccaacatcatacttaactttaaggtgcttgcatgacattaaaatcaggatgagggcaatgttttcttttgaagagtagcaacgaaggcagatgacataaaagttggggataatactctagctgaccaaacaatctagtcatccatcaaacattacttgaagtgtgtaatatcattagtgaaagttttaatacttgtgtatgtggatgtaaaacttgctatgggatattttatgaagcaatggataagctaaaggtacaaaaaataaaataataaataaatcatggagtgaaaaaaaaaattatcaacctatttaagatattgttgacagaagataggatatgcttgcacatgcgtgttcatgcaattgcatattatctcaatccaaggtaaacattctatataattttctttctaaatgtatttatcccttttatagttgctttagcctttaatcaaataatttttttggcatataatatagattttattattctcttgaatttaatacagactataagatcaaaatgagattcttcaaaactattcaaagaatatgctcttttcctatgatgagagagagttgataaaacagttagatttattccataatgctaagaagatgttcgggatggacataacaatccaaatgaggaataaaaagcaactacgtaaatttagttgtagtaaaatatacaaaccataagatatgacaaaatgtgttacttaaataatactagtaattgatgttatgattttgaattttggtaatattatggtgggaatcctttgaaagatgacttgtagtgccacatgatgtaaaagaaattggaatacatttgatcacgtacgaaatatgatgcaaatttattttattgtcaataagaactaccaaaataaaattggtaggtttttgaataattgaatccttaaatagttgcattgtacaaaatgcacgtgtatttatcaatcacaatcgatgattaaaggcaagacatcaaagaagaataatagagggtgaaacttacaatcaaatttcattatcagatgtgggattcaatgatgagtggattaccaaaagagaagatgcaataagaaaaagtagttgataaaggaagagaggtaataaattagtagttgaaaaattagtttataatataagcatgaagtttattttattaatatttcatgctttcttttaatcataatggttatattacttatttgtaggacctagatatcttacattggacaaaagagctaaaaaaaaaatgggaaaaagtattagaaagtaatgatgaagatggagatggaaaattataataagttaaagaagagagatgaagcaaagaattgttggcttctaaggatgatgatagtgatgctattaatgaaattgatgattgagaattgagataggaaaattttgaatgtttagggagtttttggaaatttggaacttagatagctttttttttaatacttgatatttattgtcatcttttagatcttagatttatatcatactaaagaatggaatagagttttctttttcttttttctttttttcctctaggaacactacatatgtgtgtgtgtatagatatgtataatattataatttaggactgtatcttacattacatgatactcttttttgacaaaatgatacgcattacaatacgcattttgataaccatgtgtctatatgtagttcaagttgattttataaaaatttaatttaccctttaattgagatagaaattattggatattgtttttactaaaattttgggccgttacaattttcatctgacatctgcatgttgtcttgatgtatgataaatttaatttaaaattgcaaattctcaagtttccggtttgagtccaagagtgttggagtattgtatcttttagtgtcccaaaacacaacatataacctctttaggagtatgtgttctacccagcttgctagtaattcatgaatgagcagatatggttgatttctaaatacttttgacagcttctctttttctatcatccaacttagcatgtaatttcctttggatagggtcattttatctttaaattttcaattgtcatgaaacttcagcatctatccaagcctgtggaaacatgtgaattatttttaacaatagactaaatatgacagagtaatgtccatgatggttgtccaaatttcaattgtcatgaaatttcagcacatatccaagcctatggaaatgtatgaatatttttacattcaactgtatgacaaagtaatgcccatgatggatgaaacgacgaataaaagacagataactacctagaagttctaccctctgatttcacttcaagtaagtaaattcaatttgggataactaatcattctgttgctagtgcttggtaactttaagatgtgctttgtactgcatacatatgaacattgggtcaaggatacatcaaagccatcagttgacctagcttacaatgtggttacaacatttgaaaccatactcactaaaaaataaataaatgaacaatactttgtaatttctagtacccgatattaatggacttccacagatattaattaatagcttaatacccaaaaaaacatcacaatgctctatcaggaagactaatgaggatatgacttcttagggatgaagaagtaaaaggcagctaataactgaatcattgagaataaaaagttggtaagggtggtaccaaaaaaacaagcagcagaaagaaaagaaaagaaaggagaagaaatgggcagctgaagaaaatggtaagggtgaaagaatacctggggttacaaaaattaaagaacaaaggggaaataattcttggggcattaaaaaaaaggaagaaaagtgggttgtgaagaaaacggtatacaatagtgtaaacaaacttttggggttataaaaattagaagaaaaggaaagggaagaatatgaaatggaatttattggtgaaaatggttcttgctgtaatgaaaattggaggaagaaaaaagggtttgagggtagaagtggaatcaaaataatttatgaaatgggccaggacgaagttatttcttgtagagagggcagtttttagcttatgcaggaagttgttatgtatttaaataaactttcattataacaaagttgttcctttgagttacgatttcaactctggcttcaaattccagttgaagtcaaatacaaggtatctcaaatgaggccttatactctttgagcgcctacctaatttaatacgattcttttcaccaattaaaatgtttccaaatagatatgagtttatgcataaaaaatgaaaattttattttagcgtaccccttagtaaaacaatcagatctcaaatttagtgatcaaatgctataaattaagtcaattcaggacaatatcactctttttaggtgaatgtgaattacatcttgatagtatatgttcccaaggtcccttgatcacctaagattttgatcatgctatatctcacttgctgattagtcaaagtgttcaaagtcagaaacttaaatccattgtttctgatattgaagggcattttgcctttagcattgatgagattctatagtgtaggattttgtttttcttttttctagatgggttatcatttaccatcctattgattcaaatacagtgacatgctaattcaagtcaacctctccaatgatctagatacagcatcttgtaacatagaggttgactctatccgataaagcacccattatgtaaccaaatatggattagtcgagctatacagtgtcagtgatttagattccctacatgagtcatactccgtagacctaattcactttcaatttagcttgtgactccaaatgatcccattactataatgccctaaatgtgaaataaaggaaactagatcatgaaaatttgtcaaataaattgcttttagtaaatataatctcaacaagaatatgatgtttattctgttttcacttattacaatatgtttatattttttctcattagtaaattgaaacattacaccattgaatgttgaagttggcaattaatcaaggattgggatattatgctttgtagcttccacccgagggttccatatctaaatctgctgc

SEQ ID NO: 10440 - DNA, 12624 bp, Vitis vinifera
  Intron number 1 from transcript GSVIVT01022940001 (locus G SVIVG01022940001) derived from phytozome v7.0 (chr-ID chr1 2; pos 17785166 to 17797789)
cctcaaggtgacttaggtgcaaattgggcttttgggttaatttaatagtttcacatttctgagtccttgttttcaagattttaaggagcattaggtggctcatgatgaatgcaattggatggattcagcttcctcaagatgtttgaacatatacccaagtgaaactctcaaacaagttttgacattatttttggataattaatcaaaataataatttttgaaagaaatatctatcaattttagtccaataattattttgactaactattaaaagtgatttttaggattttatagagtaataagttttaaaaagaaggcagttttaaaatttaaaaagtgcctttaagagtctacttggtaatcttttaaaaaacaattctcagatcaattttaaaaataagtccaattatttttataataaaatagtcttgttagaaatactgaacaattgtattgtatttcataggagaaagaatatacatcagtgcctttatataggaggcatatgtgtgcggtacaagtaacctaactgggcctaaagcccataacataatatacccatataatatacccataatatacattaacagcccccctcaaactcaaggtggatgtgagaccaacttgaggttgtcaattaaatcacgagtacgtcttgtaggaagtgacttggtgaagatatctgcaagctgatctttgaaggagacgaagaaaagcttaagagcaccatggacaagatgataacggataaaatgacaatcaatctcgatgtgtttagtccgttcatgaaagacatcattgtgagcaatatgaatggcactctggttgtcacaataaaggggagtagcagaggaggtggacacacccaaatccttaagaagccatcttagccaaaggagctcagatgtggtatcagcaagggcacgatattctgcttcagtactggagcgggccacaaaagtttgtttcttacttctccaagaaatcaaagaagaaccaagaaggaagcagtaacctgtagtggacctgcgatcagtaggatctcctgcccaatcagcatcagagaatgcacggagtacaagaggagattgagctgagtagaaaaggccatgaaaaatggtacccttcaggtatcgaagaatgcgcagaacagcagcatagtgagttgatcgtggagcagacaaatactggctcacctgatgaacagcataggagatgtctggacgagtaactgtgagataaactaagctgccaaccaatcgtctgtaaagagaaggattggacaatggtttccccccggagggtgtcagatgcgcattaagttcgattggagtgtcaacattcttactgtcagtgagtccgacttgagacagcagatcagaagcatacttggcttgagtaatataaagaccatatgtggaatgagtaatttcaagacccaggaaatagctgagatgtccaagatctttcatctcaaactgctgactgagaaaatccttgagttcttgaatgccactaaggtcattaccagttatgatcatatcatccacatgtagaagaagcaaaatagtgcctttatcagtacgatgaagaaataaggcagaatcatacggactggcagtgtaacccaagcgaaaaatagtggagctgaacttggcaaaccaagctcgtggggcttgtttaagaccataaagtgcacgtcgaagatgacaaaccttgtttgattcaacaaagagactaggaggaggttgcatatagactgcttcactcagatccccattaaggaaggcatttttaacatccatctgaaaaaggtcccattgacgagcagcagcaacagctaagagagcacgaacagatgagatacgagcaactggagcaaaagtctcttcataatcaatcccatattcctgtgtaaagcctttggcaacaagacgagccttgtagcgctcaacggatccatcagagcgagtcttgatcttatagatccacttacaaccaaccacagactgtccaggagggagaggaaccaggtcccaagtatggtttttggttaatgcatcaagttcctctttcatagcaatctgccataaagggtcagtagaggcctcacgataggtttgaggctcgtgaagtgtagcaagggcagtgtaacaatgatagtcaagtaggtgtggaggaatggatcttacccgggttgagtggcgaggtggaatgtcttgtggaggatcttcaggcagagtaggagcaggggacccagtctcaaagtggggtagctcgtcatcaatctgttcatctgcaacctgtctaggagaagcatcaaaaatatctggagagaagtccaaaggaggatcaaaagtatttgtagaaggaacaagagactcatctggaaagatttctaaaacagaggagttagtcaaggaagaatgaaagtgagagagttcaacaaacaatcgatgttcccaaaaaacaacattatgagaaacacgaagacgatgagagacaggatcataacacctataccccttttgagtttcaccataaccaaggaaacaacagagtctagagcgaggctcaagtttgttgtgctcatgagactgaagaagaacaaaacaagcagatccaaatgagcgaaggtgatgatagacagggggtgacccaaagagacgctcatacggagtctgattatggatgacagcacttggaatacggttaattgcatgaacagcatgaagagccgcttcaccccaaaatggggcaggaattttggcagaaagaagcagagcacgaatagtgtcaagaatatgacgaagttttctttcggctcgaccattttgctgagaggtacctggacaagttagatgatgtacaatgccataggaatgtaacagagcttgaaacgcatgttgagtatattcaagagcattatcagatcgaaaagttttgatacgtttggagaattgtgtttcaatcatttttgcaaaattgctatatattgataaaatttcggaacgagatttcatagggaaaatccaactataacgagaataatcatcaataaaaacaacaaagtatcgagatccaccaatactagcaacaggagaaggtccccaaacatcagaatgaattaactcaaaaatactattagaaatggattcactgttattaaaaggcaaagctggctgttttcctaactgacaagaagtacaataaaaaatgtctttagacacagaacccaacagacccctagacactaactgttgtacccgagaagatgatgcatgaccaagacaaaaatgccaaagtgcaagagaaggtaaggaagaaactgcagcagctgcagtagcaatagaaacagaagcaacaggtggaagatgaagattgctcacgggaaacatacacccaactctaggaccggtcccaagctcctgccccgtccttggatcctgcacaatacacccagaatagtcaaaaataaggcgatgacctagttcagctaattgtcccacagagcacaaattataggataggtcaggaacatggaagactccaggaacagaaagattagaggttgaaacaaaacctagactattcccatgcatggtggaaccatcagctatatgaatatttagaggatgtggtgcagggtcaagtttggagaatagggatgagtgaggtgtcatgtgattgcagcaggcagaatcaaaaagccaagtttgagacttaccaggtagaacagataaggtagtggaaagagatgcattactagccatacgaacagcctgagctatgatctcctgtagttcagtggaggagaggttgatagtagatccagaagacttggactcaactgaggtggaagccattggcggagtaggctcaatattagcaacagcagcagtagatttgttacgacggtaacaagtctcaatggtgtggccaggacgcttgcaatagttgcagaactttttgttggtctgcttgcgacgattgctagaaccataagaatcacctgattgctggggttgctctatgagtggagtagatggagtaatagccaaaacattgaacttattctgggcttgaagggttgcaagacaagcttcttctctaaccaactcatttacagcagtatcaagagagggagtaggactgcgattgagtagctgaccacgaatgggctcaaagtccttgtgaagtgacatcaagaattcatagaggcgaaattcatctctaatggaagcatattgctgagcatcttttgagcatgtccaagttggatcagaaaggtcaatttggtcccaaataaagcgaagctgatcataatagtcattgatggattgccttggttcttgcctgagttgatgtaattcaaccactaattgatattttagggatccatgagtagtggagtaccttttggccaacatatcccatgcagattttgcatcatcaaagctgcccatcagattggaaatagagggaatggaagtgttccgaatccatgtgaggatcatgtggttatgactatctcattcaatcatgcgattaagaaaaacagcatctccttcacttgctcccttgacaggaatagtcattacaccagtacaataatgccagagcatgcgacccttaagaaaactgcgcatagcttgagaccaagataagtaatttttatttccctccaatacagtattgatggggctagaaagaaaaatatcctttttatccatttagagacacaatatgcaaaaacagactgcaaaagtgaaatctacgcgaaaaactgggtaaggagaacctggtcagccctggaaaagtcaacggtcaacactggtaaaagtcaacggtcaacattggtccacgtgggggtcacggtcaaagtcaacggtcaacgatggcaaagtcaatggtcaaagcgggtcaacggtcaacgctggtcaacggatgacgtggagatgatgtcagctagggctaacgtggcactgacgcgttagtagttgtgacgtagctagggctgacgtggcagagagaatgacgtacgggctccgagggcgacgaggtttccacgaatgtgtagatcggcgttggacgatctcagtggtaccgtcaaaattgaaatcggagcaatattcgcagcggtgatgcgaaaaacagtgatcttgtgcggtgtgaaactccttaaggactgcaggtccggaacccaaggacgacgcctggatgacgtcagaggttcaacggcaaaaggctgtgacgacagttgtgattggcagaagcgttaaaaagaaaggaagtcacactaatgaagacagactgctaagaaagggtcagagcagtggctctgataccatgttagaaatactgaacaattgtattgtatttcataggagaaagaatatacatcagtgcctttatataggaggcatatgtgtacggtacaagtaacctaactgggcctaaagcccataacataatatacccatataatatacccataatatacattaacaagtcttcttaattcataaaggtcaaaagttcctattttctatattttatatggatgcaaaggacgctctatactattttaaaaatctatccccagaagttattttgattaggttatttttaaaacgctttttcttttttttttttaaaaaaaaggataagttatttttaaaaataattttttattttgattttgtaaaaaacaaattgttaattcaatttaaataatataaaataaatttaattcaagtattattaaacaaaaaaataattttttaattacaaataaactaaaataaataaatagtttttaataaaatatgaataataatattataataaatcataaattacattttttttatataaatattattaaaatatagatattaacatcttataaaagcattatttattttgttgaaactaaataacaataatataaaattaataattgctaatactatttttaaaaatcattaaacttatgactttgcttttaaaaaattgtactcaagaacaacaaccaaacaatggtattaatttttaaaaacaattttatttttaaatcataagcccaaatagttttttattatttagcaaaacaaaaaaccctcaaagttgtttttttcttaattgaaaataaaaaattattttaaattcagatttaaaagaaggaaaataaaatattattttaaactatacataaatattgcctttttttttcattcccgttccattattacttaacattaaaatggaaattaacaaatatacatccaagtacaagaattgaaataaccaaattattcatccctattcaatgacaagtaagaatggaaagaaaattttcattctcagtacttattctcatgtaccaaatattatctcaaagatttgagacccttaatgaagttaatgttcttcggacctttttactattaaattttaggacttggcctcagtatgataagatttcaaaggttatatatccatcggatgggcgtaaatatcttctacagatatgcttgagtaatagagttttggagtgatttattaataaagtccaatatttaccgagtgttgtcactgtgatatttagaccttacctccacatccaccaaaagttatttgaatcagtttgcagtttgtataacttaccaacattgatactatattattgtggttctcttgttgaattgcctgcagtgatgtgcaaattgattaggttgcatcatcttgatattagtcatagtggaatgcacgagatgccaagtcaaatggatcactttttacaaaaattgagtaactatagagcgggcaagcaaagtgggaacagggttgcagagttgagggagctttcccacattggtggaagttttcaagtggtgcgggtggtggtagaggtagagggtatgccttcaagtgggtcctctagaccacgagttggagttcatgcacgcgttctttaattttgaaggatttgcaaagaaactttcaaatatccaaaatcttaaattaaaaaaataaaaaaataaaaaaaataaaaaggacccagtagaataattttgtatcataggaataagagttgaatccaccaatcagcaagaataattattaaatgaatcaaccgtattgagacaaaaagtcttcaggtgtgaaacgcttgagactttcccaaaggcaaaatcattcaatagaaaaaggactccagctacaagcaaaacaaaggggcaaatgtatataaagataaaagtctgcattcattcccaatcttccttggatcaactgtagaccacagggcacgcctcaaccccgcaaaggatactcatttccttcaccttgatcaacagacccttcactctttttcttatacgtcctcctggctgtgtcattcattatccattggagcttgaccttcttcctccccatagcctgatgtttacttggatctgtcaccaagaatatcaaaatatcttgctttcccattgatttatgggtcttcttatagacataaaagcgcctgtaagagggggtgcaaccctttgaatggacaataaaagctaatccttggaaatttttgttttgggtataaatgatcattatttcgattatttttatttatatttctggattgcactcagtgacaggtttttaagacttaatcctttacagatattgtgttttctagatctaattgaatctaaagtttttttttttcccaaaatttgtttcctatttattatggtcaagtccaaattgagtaatacaacatcacttgtaataaattaagtaatacaacatgccactacctatttttccttagattttattttcaaacagtaaaaaagcaagttgatacgatctattttaccttaaattttattttcgaaaactaaaagaaagttgacacgacctatttttcattaaattttattttcaaaaataaaaaacaagttgacacaacctgttttttcttaaattttatttttgaatagcaaaaaataatttgagatggactatttttccttaaatttattttcaaatagtaaaaaccaagttgatatcatagtaacttatcctatttatcatgctcaattccaaagtgagtaatatgacataactcatgataaattaggtatgataaattaggtgatataacatgacctatttttcctttgattttattttcatacagtaaaaagccaaattgacatgacttacttttctttatattttattttcaaacagtaaaaaaacaagttgacatgacctatttttttccataaattgtatttttgaatagtaaaaaaaagaaaattgatgccacctattttttcttaaattttattttttgaatgttaaaaatcataataacacgacctattttgcttgaaatttatttttgaatagtaaaaaacaagttgataccatagtaacctatcctatttatcatggccaattccaaattgagtgatatgacatcactcatgataaattaggtgacacaatatgacacgacctattttttttacattttattttcaaacagtaaaaaaaataaattgacatgatctatttttccttagattttattttcgaatcgtaaaaatacaagttcacataacatatttttccataaattttattttcaaagagcaaaacacaagttggcacgatatttttgaacggtttgcaaggactgccctctcctaccagtagtagaatcttaggtctttaaaaaaattagagatctatgactagcccaagctccaatccttaacataagagcaactgccccccaacctttttgttttaacaatccagaagtgcccactgctaaaaggtcagagcagaagttttggacaaggaaagattaacatcagataacacatattccacacattgtgatcgatgaccaagttttataatgaaggtagcattacaccactttttagtcaagtactggttttgtcctaaaagtaattttctcaagaaaactgatatgcttaaataccaattttaatttgaacaattataaataggaaaaaatatgctttaaattttctaatttttataataatttcttgttttctttcaagttatcagtgattcttcactcttataaattgatgtttcatatcttcataagaaatcttcttttaatcaataatgtcttattaaatgcttcatattatcaaggagcacaatatgcatattgaaccaaaatcctccaaccttaaacttttaggaaaattggtagtttaatatggtatcagaacttggttttgtagggggttatgagtttgagtcaactctccgcaatttgcatatttgtttctctcatttgtttcttttctccctctttacaattctttagtatctctctccctcaatttgcaattctatggtatttctccacacgaggaagggtgttaaggagcatgatatacattttgaacccaaatcctctaaacttagtttttttaagaaaaatgatagttctaccaaaaagtcaagcaattttgcatgtctagtttcataacttgtgtctcttgtataactttatggaccttgaattcgtaacttgtgtttcttgtataattttgtgtaccttaaattcatttttattagctaactcactgaaacctcgtggcaagcctttgatcctagttttctcaacaaattcgagctatctagcagacaatttttatcatctaaagaccaatatataatttatatgttacttgaggaattagagaaagctcgactttgttggagagtggagtggagtatgcagcttgttctgtgattccaattagtaagacatttcaattcctttattttaagtttctaagctacaaactacaatgatttacaatttcatatgcattatttttcaggttctctatgttaatatcttagttcttctttagaaacaattggtatgtttcttttgattcatacttttcataaagaaaattgtcaaaaatttaattttctttcttttcactttttcatgtagaatcaaacaagaatatttttttttttttttactatgtttgtgctccttatcttttttctttatgatttttttccttcaaacttttaagaaataaaaaattatttggcttacatttataaaatatagtcatatagtataatataatattgtgtaggctctgagctgatacgatattcataaggccttagctcatggccaatatgcaagtttagattgaattagaatttccaaactttaatattttttagattggctttaaattgaattgtgtttaaattcctagtttcaagagacctaaaatggtggtgatctttttgattcattgatatttttttttttttttttttttttttgcttttttcaatcaagatagaaagtatatcaattttattaattaataaaagatgttctctttgcaaagcaaaagacatggctgtggttggagaagaaacatattgagacaacttaaaataattttgtttctagttggaattttgctttcaaaacttataaaattggtaagttaaggggttaaattgagatatgaatttccgtgtatgttggtttttcagaatttatcataaaaatgaatacagtgaaggaaaaggagagggaatgaaaaagaaggggggaaaaagagagttaggattgactagggttttagatgagtgtggtgataaaaatgatgggttaagtcccccattcaaatagatgtaaaatcatataacaggggatcattcttgataaagatcaagaaactaacagcttcaacaactcctcaacaaactgatgtattgatcagttagatagttacacctgcaagcagctagaactcaatcaagattttattcactggagaagatttgatagaatgattcgcagctggatatattcatcccttactcctgaaattatgggacaaatagtagggcactagacatctcatgcagcatggactgcattagagaaaattttctctgcttcctcaaaagcacagataatgcaactaaggctggagttcaaaccactcggaaaaagatctctttccatgatggaatatatactcaagctcaagacactaaccgataatttggctgccattggagaaccggtcacagagagagatcaagttttgtagcttcttggtggtcttggagctgaatacagccccatagtggcgtctctcacagcttgagaagatgaagtatctctccactctgtccacagcattaattctgctcacacatgagcagcgcctccaatttcaaaactccatcatagaaaaagaaactctatccactcatattgcttctcacagtcgaactactcaatcaagaacatcccagaataacagaaataatttttctcttcaccaacagaatggtttttctcatccttcaagaagaggacacccaggaggtcatggacaagaacatgtttagtgtaacaatatccatattatgttcattcatatctcaaatattaaagctatattaaaactattaatattgtaaatattaatacttattcttatatattcttaaataagatattgatagatagtgactaagtatatcccgaacaaatactataataatgtgcaaaataaatataacatgtgtttattttatagaaaagtttgatttatatataatttcacatattttataggatatctctcaaatcttatgacaaacatcttgaatattcataaagttaatttcattattcatttattataataataatattcaatttattttttagttaattatatctttattatttgacttttctcatttatgttgaatattataatgataatattaaatttattttttaattacttaactataactaatatgattatcacttatgttgattgctgaaaagttaaattgtaattaaacagtaaaaagttaaacaggggcttcccacctctatttcttttctaaaaatgagctactatctcctggtgaaacatcaataccaattctggaaaggggaagatttgcagcatatagctcacattccacgcattgtggtggacgatcaacaaggttcttataatgtgctataaatgattttcttcaaaaggcagtaatttgtgatcaaaactttttatatcagctttgccttaaggaattgtgaatcaatccgatctactcataccgcaactctataaattttcttccctgttactttgtgtaaggttatgtttggtttccggaaagtattaaggaaggaaaaaaaaatgctaatagcccaaaggagaagtataataaagatcggggcattaatggatgagattgcctgatcaagcgggcctaatcggggcccttaacatatgggcttggacagcactaattctggtcggaataggcaggcttaggttggtgggaagagtcttgtcccagtggaagggccaatgctaggtagcctggcccgaagcttgtttttcctttcttttttttcgtctcggtcggaagcttctcttttttaagaatgggttccacaattaacactgcctatccactaggtgtgctaaatggtcagccggccttatcaggaatcttgcatattatactcaa

SEQ ID NO: 10441 - DNA, 3427 bp, Vitis vinifera
  Intron number 17 from transcript GSVIVT01020503001 (locus GSVIVG01020503001) derived from phytozome v7.0 (chr-ID chr 19; pos 18298516 to 18301942)
tgcaaagatccagtaaatctcactactaaacctcttagtgagaactgcaacagccacaaacctcccatgccccttccacctacagatggctttgtcaagtacattgatcccatggaaaaagaaaacaatcctgaggtggctgaacaactaccaatcccaaagaggacaggaagagcctctatctgcacaacagcaaggaggattccagtagctcctgctccacgacgcaactctctaatcccactccccagtgcaccaagctccgcacggtctccaccatcatttttaccactgccacctattgaatccgataataaagaagatacagatggtcaagaagctaactgcctgcctgaacaaactgcttggagtagtcccaaaggactcaaggctagtgagggtaagaagctaggcagcatactgagacgaagccttcaaagaaagattcacatgaagtccccaatgcagcaaatgagaaaaggtggtataaatgtagggatggagaaggttagagtctccattggaagccgaggaagaatgacatatagagggatgctcagcaatgctagaagagggggaacaatgcagcaaaagcagagccagaaggacaaggaaagggggtggaatataggaacagcagggagaactggcatataaaagccgaaaaattttcatgcaggactggtatttaggagtttcttcccatcacatgcatggggggatcaatagagaaactaggctgtgtgtggatttgtttgttaagatgacagtagtcatctgtttaaattattccaagtgttggtttctttttgtatatagaattcactacatttggtggcattatgtacttattgtgaagattgaaattttttagttttaatgcaaatctgacaaaatcacacgaaaacaacaaactggtatatgcttttaccattttcacctcacatttttttttaatagcacttgctatacatattaaaatattttaaactatgtttgatttaaggaaagtattaaataataaggaaaaattatttactcatttttaattttattataaaaaaatatagaaaaaaatcaaatataattaaatttattttaaagtttatatacttttagattatttaatataaataaaataagtttaaagtaatatataaaaatatttattaactttaaatttatttttattttttaatacgttttctctttatttttatcacacataaaaaatagcaatcataatcatcaaaactaagttttagatcaccaaatattatcattcaactagcaaaaaatgtcaaggtaaaaagctaaatgaaatttgaatacaccacttaggacttgttccttttttattttattttatttttttaactcaaatattagagttatttttatttactaggattttagttagatcaacctaagataatcacccaaaagaggtgaatatggtgatgctcttttcacaaatttgaattatatgaatgtaagagataattatatataaatatataataaatacaacgaaaaataattgcatataaaataaagagaatagggaaaagaaaatgtaaacactcatttttatcatgttcggtgcaactcaacctacgtccattctcctcaaactcttacttgagtaaatgttctactatttcgaggctttcaacccaagcctccaagatttacaattggattatgattctaataatccctttgggacctatggcttcaagcacccgttacaatcctaaagagataccccactcttaaacaatctcttaagtaatacctcacacttgagaatccctaagcgataccttatacttaaatttttccttcttaaaagtttataagaaataataggaaatattctcataaaatcctactacaaaatttaggctcaaataatgcaaaataaactaagatttaatgatgcgctataaattttgaaataaggtggtctaaaaaactctcccccaaggctcaaatatattctagaaagattttgaaatgttcaccttataaagcaatgaagtttggagcctttttataagagtttggaggtcaaaatagtcattaaacataatttagggttgcccgatcaagcatcggttcactaattattagtaattaatgctttttgcaagtcattgttagggtttgaggcttcgatcgggcctcaactaggaaaaacaaagcctttgttagtagcactaagctactagaagagagaaagtgtaaaaacacctctcaagcggtcgagtccaactaactcaactagttccaccagttcattgtgacgtgctcaaatactttggttttgggtcaggaacctctgacaacttatgcaacctcttgtaaaacctagtaagaagttttagaaaacatttagctaaaggttttaaatgaaagaagaaaccattctattataaaagaatttaaaacaaattaacataagaatgattttgggtacaaaaataaaatgcatggaaaacctagtgcacctacaaccttacaaagaaatcttataaaatgtcttgaaggcttttctctttgaggtcttcatcttcttcttgatttcctttgacttgatttgcctttatggttgttactttggaaatcttcttgcctgaacacatttaatataaaacattaattccaacatttattttgttataatcaaaatcgagattaaccaaaccttagttcaatagtatttcaacttattttattttaaagataattttatcctaatagaaacttgtttactttcacaatgatagaaaatgtcaatttttttttctttttttttttctcttcttacgcctttaacataattaatacttaaatccaacttctcacttaaaataaaatttatttttaaaaattttggataactctcaccttaaaattaaattaaactatctcaattttgtacaatttgaataaaaaatgaatttaccataaattagaaaggtcatcaagaaaaattgaacatgactaaaatgtaatttatttttgtccattttctcttgtgtcaaatttaaatctaatttttccatgaattataactaaaaaaagaagccaataacataaaaactaattaatttgaataaaaaatcaatataaaataaatccacaaaaatccaaaatcgaaatagaaattttaccaagtgctattatttttttttataaatttatcaaattttatatggtaatttttttttcatttttaatgaaattaaattctttaaagttttgtagattagttcattcaaaaataaaaataaataatattaaaataataaatttggatcataaatgaatttcctacaaattctcaaaattttaacatcttaatgtgtaataaaatgaaaaaaaagaagtctatagactattattatagttagaagtgctt

SEQ ID NO: 10442 - DNA, 5163 bp, Vitis vinifera
  Intron number 7 from transcript GSVIVT01031132001 (locus G SVIVG01031132001) derived from phytozome v7.0 (chr-ID chr1 4; pos 1859101 to 1864263 reverse strand)
tgtttgtttctcccaagtgttccgtggtcgcggaggtaagttgataagctttgatgtttttgttatttagcatgattgtttattctaaatagtattagcaaactgaatcctgtgaacttgggtaggaatttaagtatggagtgctttgtgatatgttcacatttgacagagtaaagataagaaaaaaatagagcagatttttttaccttgtcgatcatttctatggcaactactaatgtaatgagggaatagttcaaatgagttattcaaaggcaacatctgttaaatcctcattggtgggaaggacaggatgatactttgcagtctcttagaatatatatatattgataaataaagacttaaattaaagaaaaagagccgccagaaaaatgacccaaccacaagaaaacaaacctcccttctccaccaaggctcaaccgaaagagaacataaagaacctcaacaagtacccaaccattcaaaaaaacctaccatagtcagtgggtaatcagctacaaacaacttagactctgaccacaaaaagcaaattacttccctttttagcttttggatataaaaaacctcattatcgagtgcaatgttgttcctagcctttcacaccattcaaaacaagcacaaagggcttgcttgccaaaccttcttgtgttttttccctacaaaagaaccatgctaacccaacaaagtatctctaaccgacaaaaaagcactcgagacactccaaaaagtacaaaaatcagttcccataaaatccttcttgtttcacaatggatcaacaaatgatctatggattcttcatgttcaaggcatgagaaacatcgatttgctaaagaccaacctcatctttgaacttgatccaaagttagaactttacccacattgtctctcacataaaaacactaactttgggctgacccaagaaatccaaatgtccctcattggaaaatacctacccaactttggttccaaaacattgtaaagggacttaattgtaaacttgcgacaatctcttggaatatacattgaaggtcattgacctgcttgaaagggcaacaatattgatgtaagtcaatgagaagggagggcgactttgcaaagcaagaattaacaattgagcttttaacatttggataagtgaaggatagcggatcttgggacatatctatatccttttttttttataagcgaataacaaaatatatttaaagcacctagaaagaggcgcaccaacatagacatgacgcagtcaatggacacctagtttaagcgaaaatgagataaacaaaaaatccctttccttacatgataaagctcaactaatctagaaaatctattagtcattgagtgatcctctatgtacacactaatccaatccacaaaagtatacaaaaaatcggatttaattttttggtccaacttctcagcatcattaaaagccattttgtttttttttttctttgaaagaatctagaacaaacacaaaggtatagccctctaaacttttttccgtttctaccccatgaaagagccatgtcaacccaaaaggcttttctaaatgaaaaatacatcacctaaaccactcccatgagagaaagtatccacaaaatacctgttttggtagttaggcaacttagttggggttttgtgaaggatgagagcatgaaagatttgtaaagagtttggatgcttcttttctaatgctaattcctaagaaagggggaacggaagaccttaaggactttaagcttataagtttggtaagtagccttcacaagttgttagctaatagactaaagaaggtggtgtctttttcctaaaaggcttttgtggagggaaggccaattctagatgcatctttgattgctaatgaggctattgacttgttactaaaaagcaatgactgtggtttaatctataagcttggtattgagaaggcttacaatcacgttaattggagtttcttacttttggtgctaaaaaacatgggttttgatgaagataagtggatcaattggcgtatttcctttgtgagctgttctgtcctttttgttaacagttctgcatggatcttctttcaaagcttcgaggtttgaggtaaggcggacactctcccttatttatttgtgattgtcatggaggtccttagttgtttgtttaagagggctaaggtcgatggtttcgtgttgggttggcgagtgagaggcaaaggtggggagggggtggaagtctctcatttgttgtttgttgatgacacttcagttttttgtgagccttcttaggacccgttgacttgtgttggttgcttatgtggtttgaattcatatcagggttgaaagttaatttggaaaagagcgaagtaattctagcggggagagtggagaacttagaagagctagctcaagagtttgcttgcaaggtttaaattccttaggacgatatggaggagaggtttcacaaaagactagcgttatggaaaagacaatatatttccaaaggcaagagacgtaccttcatctatatcactctctttttaacatgcctatctattttatgtccttattttgcatcccgaggatagtcgaggctggagcaattcgtaattgagtttctctgggaaggaggggcccttgagtggaagccacatttaataaggtgggctatcagacaaaagaaagggtggtttgggagttgaggaatcttttgtcgctcaatagagctttgctttgcaaatggagttgtgttttgttgagaaaatgagcagaaaatatggggaagaacgagggcggtgctcctgcaaagtgagagatgtgtatagattatgattatggaaacccattaggaaggattgagatattttgagtagcagagttgcttttttaatgggtaatgggaggagagtgaaagtttggaaggacaagtggtgtagtgatgaaatgctaagcatttctttcccctatttatttgctttagctatttccaaggaggcttgggtggaggatgtttggaactcatcaaatgttggtggtcatttggcacctcgcttctctaggcggttcaatgattagaagatggatcttatggagtgtttgctcttgagattgtaaggaaggagggtgtgtaaggatgaggaagacaaagtgatctggactaggagttaggaagttaaactacttttctagcaggtattattgggaattattgggtgccatcgaggatgggcttctttgcatgggaggctagttgaaataaggttttaactttggatcacattgagaggagagaggggtctttggcaaacaaatatttccttcgccacgaaggaataatccattaatcacatcctcattcattatgacaagacaagggttttatgggatcttttgtattctttgtttggtgtgtcatgggtgtttccctcatcagtaagaggggtgctttgaagttggcactactccttaatgggtaaaaaagggaaaagatgtggtgggctgcccttctgtgcctttttgggataatttggaaggaaagaaacagtttggcattagaaaacaatgagcattctgtacaagggattaaactttcttttctttgaaatctttgggtgtggtccaaattatttgtagctcttagcctttcttctattgttgattttgtggattggttgggctcttgtcgagagggtgtcgttttttgttgtccctctctttttttttggtggcgcttttaggcgtcctttgtatactccctgtgtactttggggcacttttttgttgtcactctttataatatttgctttctttatccattaaaaaaatatatatatttgcttataccttgttccaaagcatggcccaactcctcatttttagctgatcaagagtaaggattttgccccaagttgcttctgaggcaaagaaaccaacctttgttagtgcccttgtgctctacaatacactcgtaggggaaaggctctttaactcccctgatcaaggaggaatagagggatctgactgaaaaattgctgctctatatctatattcctatttaagcatgtcctctggaaatagatgctgaatagagatccaatgcaatgtgatatcctgctatattgcagatacattacctggacatttatttgtccaactgttaatgtcattgatgacttattggcaattactttggttacttgtttatcaagaattggagctttataatctagtctataaataaaatgttgatatctttctggatgccattgcttcttcattagacttttgagcattgagatttgtatcttttcaagttccacactacatttgcctacttgaaaaaaaaggttccacactacatcatcagaacttttggtttgtgcctaataaaaggcatgagctttgtacagattgttgttcaagaaaagcaaactcctcaagtatatatggcaaatgaatttcattacatctcttgttggaaatcaagcccacgtcgccttcctgcctgtgcatgttcctccccatatttagcatcctctgtttacttccctgaattagtgtaatgtacagcctttattataattgatttaggagtaattctagcaaggtagtttattcactttccatgtaagagtagtttattcacttcccatgtaagagtttattcactttccatgtaagggaaattccctccggtgatagtgtaccattccggaattgtctcatatctgtaggctatttatttatgctttcattcattgtaaaggaaggtatcacagaatgaattgaggtgttcctccatagtttgtcttcaaattcttcatattttagtcttcaaattcttcatcttcccttccctaatattgcatttggataagttcgttcatgacctggccaacaagggggaaaaaaacaccaaagaaagaagttttgaagatctatttaacctttttagtgtccataataagcttatgctattctagttgttactctgccacatgacatgttgattaaaataagatgattattattattattattattttcatttgactttgaagtttcttctgttggatgtgtgaaatagatgaaactattttccttggcaaaatttttttcaagggttttaataattgccttaaatttttctgtaggg

SEQ ID NO: 10443 - DNA, 3371 bp, Vitis vinifera
  Intron number 6 from transcript GSVIVT01009320001 (locus G SVIVG01009320001) derived from phytozome v7.0 (chr-ID chr1 8; pos 7406452 to 7409822 reverse strand)
ctgagaaagctcttgaggtaaggttcagagtttttactttaggacacttgcatgaatgcaatcaaacattgagttgggctactgggtatggatttttttcttttttttgataggtaaataagaggaatatattaaaagtgcttgcaaaatggcacaatagagtacacgtgcaatatacaaaaagggccatagggcaagcaaaagaaaaacaaagaaaagcgaataccaaccaccctcccaaaacagtcacccctgagaaggtccaaacagatccaagtacacaaagaaaccaccaccaggattacaaccttaacagagacaccctggaaacccaatcacataccaaacctctccattgacactcaaagctagcccacaatctcacaaaacaggttctgaaacctcattttgccttcctcttcctctgacagtgagaggggaactgttgtaattcattgagcactctaattttcggagttttctcttaaaacgagcagtggatagaaagttttttttttttttttattccacctgggactttcaccccccttcctttccttgcctccagtttcttcaacagggagctgatttccttttcgaacccctcaactagtatccccacaaagctgctaaaattggcaaacttagtggggaggctatccatgacctccccttttggaacacaaacaagctccagggctttaggagtttccaacttcccagctctagtcctcacaaccttgcccaaagtatccttctcagcgcttcctgaagtctccactagactagcatcttgaagtggcatctttagcgatcaacacctagagtccaaaagtcccaaggaagaggaggatcttggaaacctgttcacctttgccacaagggctttgttagtgaacaccgcatgggaacacacgaaggccgatgcagacgatgccttaagcctctgaacaccatcctcgacacaacttctctgcagaatcgtctgactctctattgagaaatctctccctttatgaagccctagagggccattctctctcacgaccaagtctgaacaaccacaaccctcacttaaacccgccccttagttgaaataaaggatttgtgggcctgacccaaacttaaatcctcctttgctacaaaatctgaagctaaatgggccttagaggcatccagcccattaaggccttggcccaattggagacacaactcttgataacttgagccccacccaaacacttactgcccaaattcaaagaccctgacaccacccctccgtaacggcctggttcacaggggttaaccaaacagtccccaactgctttatcagtatgccttaaatcacgttcttagacttccccccatgctgtagtctctatgggacaaacaactatctctttacctagctgagtactcttgtcgaagtgctacaccacatctccgtctgcagatagccaagggcatccctcctttcccacacttatgctagtgtgtggtccactcttcacatcttcccgtttctccaatccgcaaacaccattgttgttgcatctggaagccaccatcgaaaaactgggtggaacttcccactacaactgaatggagaaactggaagccctcactaccacttgcaacgagccgggctttgctcaaagacctaaccaagattcttgcccattgaagatgagacaacaacgcagtgtcatcatccatggggacaaaacccccatagctgtccgtttatagggtattctaaactgtagtatgttattaatgtttaccttcttgtgtgccactaaccaaacaaaagacttgatcttaaaagggacttgatcttaaaaaggacttgagatttccaaacaaaattagtagggaaagaaggaattgaatcaaaatggtgtcatatgctaattgcggatgagatgctcttattctattcctacctacattgaagccctctaatagactactctcctttgctctcaacatcatcctaatcaacacatcagctacaatagtataaagaaatggggacggaggatctccttgtcttagttctttagttgctttgacctatcctttggcatttccattcactaggattgtgaaaattaccaaggacaagcaacctctcatccaagtcctccatctaggactaaaccccttcctctctaatatatggtccagaaaatctcaatccacatgatcataagccttttcaaaatcagtttttaaaactaccccttcctttcctgggcatcttttctcatccatcatctcattggctatcaaaactacatcccaagttttctagagttcttattgacatatttttttgataggctttgtagtcttaagattcttttgttggattgaaaattgctctgcttcacacatataaaagtggtaaagtttcccattgagtgcattcctctccccccttggtagcttgaatttaatattggcagttcatccttgagtacttgggaccgataggaattgttagcctcattccaggtcatagaggtggcattagagctgtctgcaatgcagctggatttgagctggccattgaagcacatattggcattattggagaatgtgacaatgacaagagagtggggtgcctccaatcttatgttggagaggtattcagtcaaattttttacttctattttttgggaggcaaatgaatggagaggatcacagagatgttagcactggatgcataggattttaggtatcattagagttttgagccatttgttctcttggaagtttagctcagaaaatgaggaagctaataaactggccaaaagagatgccatctctctggttgactttgtcgaggacattttgcccacttgattttaatggtctgtcctttatctccatgggtggtttattatttgtggggagctgaagctgtgttttctctctagttcttttagtgtctatgtacgtttttgttctgaaggacatctcatccttctcataaactattgtgctactcaatacaattatgagtctagtttcttataaagatacttttaagatgaataactgtaataaaagtatattgctaaagtttctgagttcccaggaggggaaattttcaaacatcttgtccagacactatgaattgctaaaagatgttttgaaaaggataatctaatctattgattaacgattaagaggtgaaggaatgaccaactatcatctgttttatttcttgttgattttggaaacctttaattttagctttgtttttgtagctcactatgatcttttcttctttttgttttttctcttttcttttcatccccattgtaggagttacgggcctaccaagctgatattgcaactgt

SEQ ID NO: 10444 - DNA, 6535 bp, Vitis vinifera
  Intron number 1 from transcript GSVIVT01007638001 (locus G SVIVG01007638001) derived from phytozome v7.0 (chr-ID chr1 7; pos 10959138 to 10965672 reverse strand)
tttctaggctgggtaataactaagcaattcaaatcctcgatcttatgtattcttcaaaattgtgcccgagccatgaaatatcttttctgctattgagtctgaaaatgtgaatcttggttcacaaaactacctaggagaaggtgaatgggtagtcctccttttcatgacccaaaagtgggatctttatttcttttataagttctttgaccaatactagtatttaattattaaagcaaagaacaattatatagtttttatataattgacatctcatgtacatgaaaatccatctatctagttttttagaaactctatagatataaaaaaccatgagtcaatccattgcaaagcaaattcactaaatttgaaagaacaagtacatagttttacttagactaaatattattttcctctagaggtcttacattagccaacaactacccttttcatcaagtctgcaaagtagcatccatgtactccttaaggacttgaggggatgcgacgaaccatcatgaccaatcgacatagtgaaagctttgagtgtgttgggaaggcataaagaataataactcgtgtgtaaaaatacaaccaataggtgtatatatagttgaacaaaccctagtgggttgaaccatgaatgataattaaaaacttgtcaaatagttaagacttgtgctaaatgaagctggagtgttcacgtagggtgcccacaatgcacccaagcatcatgtcattacactttgaacaaactcaaccatacttgcatgaacaaccctgtgaacgaatcaacaacaatctcgtattttcaaacccaatctaaaaccctaggaagtacatagacttgaatctaagaatgtttagaacacaattgctaacttaaactagcaagaatagatactaataatccctctctttggaaaatttgcaacaaaataacaattacataaactcatttcaatactttaaattgaactttacatatgacttaaaaactctcatgtttaaaccaagcattctaaacaatgatcttcaatcatcatgtagtgaatcctaaaaattcttgtaaacctatgattcacacatactcaaacacaatacttgtgaaaagagtgtgtaaatatatataaccatatgatacgtaatgaaactttaataacatccataattagactaatatattgagatcatcagtgtcttgatttaatcattatcaagatcaatcatttccaacgcctcccttccccctacaaaatggcaaagagaggaaggaaataagaaaccaaaatatgtagaataggaaatatcataaaataaatgatcaagatgtccaaaataaatcgaatatccaaatacatcaaactatcaaatctaaaagaacacaaaccatcatcataaaaatatagatgagctaggaaaaacaccaatatagcaagaataaacaccttaaaagcctctagctcaaattgtctagagaaggaaaacatttggagctcaaactagactgtaatgacacccatgactcaatagtagcttgaaagatccttctcgatttgacatggtcaacaataaagctattacatgtcctctactaccttgcctcaagtcctcggaccactcctctctccactaccttgctccatcccttgaatctttgcctccttaacataagttagatgtcccattaggtattcatgcgtataactaacatgcttagaccatgtgctctcattaataggagttgtttgatctaaacacctgtaaatcatgctagaagttgaatccaacctccaccaagatgcaagagatcatcaacttctactaagatgtgagagatcatcgacttctaccaagatgcaagagattatgatggtaaatggagtactccttgaatgagaggagtttttgtaggagcacataatgttaaatataacttgagcaatgttaataggatgaccaaataaaacatagtgaatgaatcatgtagttgctataggatttgggtcctatgagaggtgggatagaagatataattcacaaacatagtaagaatctaggttgttttggtagagttagcactaaataatcccataagaatctctaggagctttaaaaagtggtcaccaaagggattttaagggaaaagtaagcaatcactcaaaaaaatgatgaagacccaaggtttttctaattgacctaaatgtcggtggtatagtaatcccatattcatgcataatgtaggtagacaacccaatcaagcaattcatgggctctcaatggcacttcctaaagatgcatggaagagctcacactcaggctctactctaagcttatgaaattgggaatagtaaatctccatgtgctactcaaatatgaagcacttatctaaaaggtcatccaagttaaatggaccttgaatcggagaataaagaccaaatctaggcgtagaaagaggaagtgaagaaacgcattgcctagtgcacctagatgacatctctactgaaacaaataaactagaatttatgggtacaaacataggaaactaaatgttgaaaatgactaggaaatccataggaacaatcttacaaagacaaatatgcaattaattgggtcaaaaatccatattagagcaaagagacaatgtaggaaggaccaacataaccttgagaacacataagaatatgagaaagtgaagtgaaactaagaataaatcgtaagaaatagtgtgtgtgtgtgttggaagcattccatggagtgcttgaatgctcctagcatgggaagggcactcaagtagttccttctattcctaagttatcatcaagtgttcttttagcttctcagatacttaagttatccttcaaacgtaaaatatgtctctcttaatgtaaaatcccttgaaattcatctaaaaaagggaatctaagcaagaaaatgatgaactcatatgcaggctgctctctttatgttatcggtacttaacaaattatgaaattcataaattattcgagtaaacacaaaaaattaactcataaatctttcagagaaatgatctaaaaaagaaaaataattgatatttagacttagggacatttcaagagtacataagatataacaaccataacatcaaacaatagtgatcaataataaggtgatcaattttctctttgatcaatataatccatattactcatctaggttatccattaagtcatatcatgatcaaaatcaaaatcattctcattctatttgacttctatttaacatgaaactctttgattgtttaaacacaatacttaaactccccctttgaatttattgttatttttatcaaatgatcataaatctcaacaagaaccaattgtaaacgtgaaggtgttatccttaaatatagaaaattacctttcacgtactaagtagtctcttccacattggagtttttccaatttgcaattgattacttccctttttggtttaaatacatacaatatagatttgaccaaagtaacctttttcacttcgagcaatatgaattataaattacatcaaacatttgtattttagacaacttcacaacagaagtaccctcgtgagtaatagaaagaatatctcaaggctctttagtatgcttagatattgttatcctatgaaactcattaggactcataccattaaatgttggtgaaagcactagtgtttacctcattgtctttattatcaagtttgtcatattcatgtttgggctttaattctctaatgaatttactagttctattcaaactttaatggaagtccccaatcaaatttacattataaattcatcctctttgcatctctaggaagaattctattcaaactttccaatagggataattgtttttatcaaagtatgaaggattattaatagaagatctcactcattgtgattccattaattaagatcaaccagggattgaaaaaatttaagctacactaacactaattaaaatttggatcttagatcacaaaactacctcaagaaagctcataattttagaaggtgtacccaaggcgtaaccactccatagttatagcatcttgcttgccaagataccctgttcaaaaggagcatctcatttaacttatttttctttttaaatacttttattcttgaaatttttaattgtatattaaaatttatataattttatgaatttttgtttaatgcttcttttaaatgtttggaatcttaaatttttcattaattgaattaaattttggattatatcttataaaatcgatacgtctcttagttcaatttcactttacttatgcatgtgccttatgttttgccttgcgtctaagatgtaggagacttttgcaccttaagtgtgccttttaccctttaaaactatgagggttataggtaagtcctctttttatgaccaaaaaatttaattttcatttcttttgcaagtcctttgatcaatactaatattcaattattaaaacaaagaataatcttacaattgacacattgaaaaccacctataaaagtgaaactttatagatatacaaatcatgcactctcatccacaccacaaccctgccccaccccccgccatggggatatgtggtggatttgggtaccaccaaatggtctgaaatgaagtacgtggcacaaagggagacacactcagctgaggatgtggaatgtgtaggagtcataatccttgatagttcatattagccacaacattccagaccaccttaagatttgatgggtctcgatcaacccacttttggtcaatggtaagtagtcaccctactcagtaagacacatttagttatagttgtagtcgcaggccgttatgggattggccccatgacccatttgatcttactccacaacaaatctcaaaagcaagaaatgtttggtttttttgaaaaattttgagagaaataaaataaccactaaaaatatgatggaaaaaatatttataatttataattttttttacctttttacgtaaaaattaaatgattttaaaatgcaaaaattttgaattcgttatatttaattttcttgagtattttttttttccagaaaccaaacataagattttgattttaagtatttttttttcttttccttaggattttcttgaaactaaatatcaatttgatatttttttctttcaaaaatcttgctccaaatatagggatcttttcatttatgttaaaaataaatttgattaaattcattaatcttaattagaatttttatggttgcttttgaatagttttattaaaagacttttttatttgaaaattttttaatataaaattttttaaaaattgtttctcataaaaaaattattattattattataattttatataacatgaaaatttcccttgaaaattttataatactaatattattcttaaccatttttaaaatttaacaagaattacttttacttcttttactcttaattagtgaaaattaatagatatcttaggattttgttaaaacacaaatcttatatttgatttttttttttttaatttgagaaaaatataacaaaaagaaaatagggaaaaaaaatgagggaataaaaaaatgggttatttgattaaaagattcaaaatccaaatttaaaattccaactttccattttttgaaaaatttaataaaaatatctttgttgttatctcataaaaataacattttcttttaattatttttcaagcaaaacattaaagaactagactcaatttgatggcgtgatttaaaaataaaacaaaaaattgtttttaattttttttaaaactgtttggtcattattctttaaaaacaaagtaaacaaagaataagtaaaaattattttcatctatttattaaaataaaagaaaaatatcaacccgtctaaacatattttttaaaacttatttttaaaaattatttttaagttaaaaaaataataaacaatttttaaaaataaatttaaaaaaacatggccaaatgggtcttagatttacaaataggggaattcttttatccattttaaccgattaattcataaaaaaataataagtttaaagttaatatatttcacttattctcttcttttatgtaaaaattaaataattttaaaatatctaaagttttaaaattaaaactatatttgattccaaatttttatgataaagaaaatctgccaaaatttttttttaaaaaaaaatatttttcaggaaaacaatattttaagttttccattttatacttatatttcagggaatatatgaaaatacgaaatccacgtgtaaagagaagagaagggtagcagagaagtagggtgagtaggagtggcgagagaacatgtgaagcagaaacggataggaggggcgtatgaggccatctttggtcttcccacacagctgcagataacaaaatccccactccccactcctccctcctccagtcctccttcaccacccactcctacacccacctccctctctctctctcgctctctctaaattctagcctccttca

SEQ ID NO: 10445 - DNA, 9250 bp, Vitis vinifera
  Intron number 6 from transcript GSVIVT01031657001 (locus G SVIVG01031657001) derived from phytozome v7.0 (chr-ID chr5 ; pos 19683484 to 19692733)
caagattggttaagcctacaatccttcactttcaggtttgtggattttgcaagtgttgtgtagttttccggtgatagatttaaaattgattgtgttgacataatgttgcttatttaagtgttaaaagctctgtcattccattccattccataatgacacagtaaggagcatgagataacacaagcataatctaatttcattgaggtctaagttttttagaaggtaatgaaggagaacctcttgtaggatgctaatccaagaaaaccttggtctcttgaaagctgaatcaaattttacatataatctcttatttattatagtgctcttatagtgtccccttatcagaaggtagagctctcaaacctttcttacttttgattttagcttgaccttagattatagtcctatgcattcataacataaatagaaagaagcaaaaagactagaatacccatgagaagtagacaattggtgcgaattgtactgtgaacagtaagtatcattgtatcttattttcagcttacccttgtgatacagctagtactcttggattagaccttcagagggtgaaaataaacttgttcatgagtttagatcttatatttttgttgtccctttgatgctcaaatatggttttcttttaggggaaagtttgttttcatatgctcaattgaaaatatttgcaaaataggaacccacctatatcatgtaatcccaaaatatttgttgttttatgcacttttaggtcataggtagtaccccggcactatcttttaatgatataggtaatacctttgaatgagttgagttcactaaaacacacttttccatttcttttataaaatcaacatgctatattctagcccttttcacttatgatagtctgtcttcaattcactcatgataaatctatgacagtactacaatagtgtgaacgatattgctgaagtaactttggatggtaagttttgcagtgcatcaattctaacttagctctacattgaacaaatcacacctgcatcagactctttggtttgaaggaaactattccttgagttaaggactatgatacttgagaagccaaaaccaccttttagatccttttttcctttgaatcaatgcacttctcttttactcttaattcatcatgatcaatccgtcatactttaattgatttcgcaagaaaaatgtttttggacatataattggaaggaatagagcactaaatgattccaagccaaagaaacatcagtgtaattaagcctggcttatgttacatggggtatggtgtggctgttgagtgcaaatatgtttctagatgtcggatgtctcaaatttccaaattttagataagacaattggattgaagaggatctcaatagaaggtatgggcactagagcctggctcaaaaggttatagatatatattataccaaaattaaatatttgtaaaattagggcatggtagcttatttagaattagaggtatatctactttattctttattgcatttataatatcaactctttattagtgcatgtgttagtatacttgggcacatccaaataaaagttaggttatattcttgttgtgtttttattttaggaattttaattaggccatattactgtgcataaaattcatcaacaagtattgttggttgacatggattctagatcaggtttggtaacttgattaacatttcctttttaataaaaattaattaaataatatagctattaggaagttcataccctaatttcaaatggaaaatgccaatatcatctccactctatgcaaatccaatttttgtttcccatgctgcttttccttatctaacatccaagcatactgtctctcttatttttaatatcctcataaaacgcactttctagaaaacttctttcctttagcagttgtgatggcaaaaagaaattaatcagagataagatcatttttgaagcaaagagacacgccaaatgaggatttcatacccatagttgtgttgaaacaggttgttttggtgatattaaaaagtccagatgtcacaaatccttgccaagatatggttgatctctctttctctctctctctctctcacccacacagtggcctgcacatccatgcccaaaaatttattttttgatatgttgtggagaatcccatttggaaaataattcttctgaaatgctcacgttcaagaccatcccagtttacacaactgtcttgtccaaatcaatcatgttgtagactacttggatggtagaacccatgaaactttactaaccttggatggttgcctttgcttcacattttattttctatgttgtcatctcattaacagcaagaacaaagatacttaaatgtattaagtagttatggctatgtaatatgactcttaaatatgactgcagcagtaattattcattttaggaatttcatataataaaaacaaagatgagagagagtgaggggtttcgtgaggccgaaagcaaggaaggggagtctcgggcggagaatcgtgggaggaggaaaggaaatagatttgtggtggaatcgaagatgttcgaagtagaaactgaggatagaaatggaaagcgtcatgttgtgatatcggaaagcaagggtgagttagtgtcttgggtccgactggggtcggcgagtgtgggattgttcttagaagggttgtctcagtgtctgaggaatggggaagaaggaagatgggagaagggctggaaggaaaaagggagattttactgcatggtgagagaggcgaatagggccgggtgctttatccgcctgggggtgacggacatggagaagaggaggtttggaatttgtataccaagagggggaaaggaaaagggaggatgggttgctgtgataaaggctctacggagggaaggatactggctcgatgaaaaggaaagtgaccaaggagtaagggagtcgtgcaagctgtatgcggaagtggtaaagggctcagagcttagggatacaacaaggttcagagtggagacaaaggaggaggaaacaaagaataatatgaatagattgaggcattgcttgataggcaaatggagccctagttcagcgcgagaagaagaccttgcgagtttggggtgggcagcggcaagagcgtggggtttgaaaggtaagatgggtttggctagattggggaagggctgtgcccttttggagtttgaaaaagtggaagaagccaagagggtgttagcctcgggggagagactagtgggagggatccaaatgggattggaggtgtggagtccgaagtttggatgcgtttcagagggggaaaacaggaaggaagcttgggttagaatgttgggtctaccaatctcattgtgggtgccggcgattctgaagagaatgggggacgcgtgcggcggttttttggacgtcgatcctctgacggagaggaaggaggacctggaatgggcaaggatcaaagtaaagctgcttgaaggggttttgccgagttcgatggagataggggtggagggggaggtgttcgttgtgacgctgtggtgggagatttcgccggagataaggaagaaaaagggggatggctgagatggctgtgggagacagagaggggaggtcaggggtgaggaagaaccacgcgcgggatggcgtgtgggggaaaatctgggcgttgcccccaaggaacagtgccggtcagaagatgggacgggagagcaggtgagacagtttgaaaattgggctctagttgggcgggcgacccggcaaagatccggatttgcaggcgatgggtcaagctcatctggaatgggctgtgaccccgtgggccaaaagtgggactatggcccaactatgcaaggtaggccttttaataagaaggatgaatgggctgcaattgggaaagaatgtgggccggctgagggaagggcctccgaagggttggagttcttgtcccatgggcctgctataaaggttgggggtggtctgggccaaacgcaggtccaaaagactggcacggactatgaagatggcttgggcctaaagctggaagaggaattcattaagtgccgagagaagcaggtaaatgggttgcagcagcaggctctccagtggtcagtggctgagagggcgatcgtggatgaagccttaaggtatgggtccgtctctaacctaagggctgtggtttccttttctcattcttcttttttttttggtcggactccggagagggagtcttgcgaccactctgaggaaacaagggcgggcctccagaaggaaagcaagatggagcccgcatccttagggggaccttcagcgagtagagagggctgctgggacctgattgagatcaactgtgatgctctagaagtccaaaacccagaaggcactccagttatgatggagtcccaggctcaaaggagcgagaaggagtctaaatgggaggatagcagcttggctaaatttagcaagcttctgggattttcagtagaaggcctggagagagaaatattggacttcttgtccaaaatcagaaaaagacgggaaaggatccatagtaaaggattactggaaaaatcaaaatttgagagggagctcaaaaggttggaatgctcagtcaaatacaaggggaatgacaagaaaaatagtcatctgaaaagtagagggggacaactctgtttgtttaatgaatcttaaaatgttgagctggaatgtgagggggggcaaatgatgttaataaaagaagaattattaagtctgtggttagaaaacagaaggtggacttattctgtatccaagagacaaaaatacagttaatgacggatgggatggtgaaaagcttaggggtggggagatttttagactggagaactattgaagcagctggggcagcgggaggtgtgctaatttgctgggacaagaggtctttggaattgttggagtgggaggagggccaattctcaatgtcctgtaaattcagaactgtggaaaatggggcaatatgggtgttcacgggtgtctatggcccctttaccaaagaggatagggagtgcctttgggaggaatttggagcgataagagggctttggggggaaccttggtgtgtagggggagattttaatgtgattctctctcaaggggaaagaagcaggcaggggaggattacaccagctatgaggagatttgctcaggttatggatgaccttgagcttgttgatcttcctcttcaaggtggatcttttacgtggagtggggggtttcaaaatcaagcctgggccaggctggacaggtttatggtttcacccagctggcttgatcagtttaggaatgtgacccagaagagactttctcggcctatatcggatcactttccaatcataattgaggggggtggtataaaaagaggtccatcaccattcaggttcgagaatatgtggctgaaagtggaagggttcaaagacctgttgcggagttggtggcaggggatgtcagtgagtggaaaggctagctataggctggctacaaaactaaaggtgattaagcagaaactaaaggtctggaacagagaggtgtttgggaatctggagagtaataagatggctgcgctgcagcaagtggattattgggaccaagtggaaggtgaaaggggcctgacagaggaggagctgtcaaggaaaaaagaagtaaaagatgattacgcgaaatgggttaagctggaggagatacactggagacagctctcaagggagctgtggctaagagaaggggatagaaatacggggtactttcatcgaatggcaaacgcacaccgaagaaggcagaccatggaaaaaataaaaataaatggggtatggctttcaggggagcaagatgtgaggaatggaatagtagatgcttttcaacggttgttaacggaagactcggagtggaaggcagatataggggggttggacttgaatcagattagccaacaagaggcggacatcttggagcttcccttcacggaagaggaggtccattcagcccttatgggcatgaatggggataaggctcctgggccggatggtttcacgggggccttttggcaattctactgggagtttgtaaaggaggaggttttggagatgttcaaggatttccatgagcaaaaggcttttctcaagagccttaataccacgtttctagtccttatcccaaaaaaaggaggagcggaggagctgggggatttcaggccgatcagcccagtgggcgggctgtataaactcttggctaaggtgctggccaataggattaaaaacgtggttggtaaagtggtctcttcagaccagaacgcttttgtcatggataggcagattttggacgcgtctctaatagcgaacgaggtgattgactcatggaagaaaagaggtgaaaaaggcctgatctgcaagttagatattgaaaaggcgtatgacagtgtgaattggcagtttttgatgagggttatgcaaaaaatgggttttggggttaagtggagagagtggatatggagctgcatttccactgttaagttctcagtattaattaatggggaaccagctggctttttctccagctctaaagggctgtggcaaggcgatcccatatccccatacttgttcattatgggaatggaggtgttgagcgcctttattcggagggctgtggaaaggggctgcatttcccgggtgcagatccagaggggcaggggcagctgtgaatatctcccaccttctttttgccgacgatgccatagtcttctgtgagctaggaaagatgatatgacatttttgagctggattttatgttggtttgaagccgcttcagcttcagggctgaggataaatttggctaaaagtgagatcattccggtaggggaggtggaggaaatccttgagatggctgtggagttgggttgcaaggtaggtcagttgccttcaacttatctaggactgcccctaggtgcgcccaataaggctgtgagcgtgtgggatggggtggaggaaaggatgaggtggaagctggccctctggaagcggcaatacatatcaaagggcggaagaattgcactcataaagagtactctggctagcatgccgctatatcagatgtctctcttccgtatgcctagggtagtggcaagaagactagaaaagttgcaaagagactttttgtggggagggggaagcacggaaagaaaagcccaccttgtcaattgggagagggtgtgcgtgggtaaggagaaggggggactggggttgaggaagttagtccctttgaacaaagcccttcttggaaaatgggtgtggagatttgctaatgctaaggaggagatgtggaaacgtgtccttgtggcaaaatatgggcaagaggaacttgggtggaggactaagaaggtaaatggagcttttggggttggagtttggaaggagatcatgaaagaagctgattggtgttgggacaaaatgaattttaaggtcggaaaaggcaccaaaatcaggttttggaaggacccttggtgtggggaggtggagttggctcataggttccctcaactcttcaatgtggctgcccaaaggagtgccactgtgggggagttatgggactacaattctgatctaggaagttggtacttaaggttttctaggggcttcaatgattgggagctgaacatggttgatgaattgctacaaatcataaggagtcaaagaatcaccttggaggaggacttggcactgtggaagggggggaaaaatgggaagtttgaagtgaaggaagcgtatgagctgctgatcagccatagtaccctgctctttcccaaaaagggcatttgggtggagaatgttccttccaagctagcgttttttgcgtgggaagctacttgggggagggttctcacgcttgataggctacaaaagagagggtggcagcttcctaatcgctgctatttatgtggtatggatgaggaaaacgtcaaccatcttcttatacattgtacagtggctagagtgttatgggggatagttcttggcttagttggagcccaatgggtcttcccagaaactgtaaaggaggtgattgtcagctggaagggttcttttgtgggaaaaaagagggagaaaatttggatatccataccgttatttattttttggacggtttggaaggagaggaatagattagcattcggggggggggggagttagctatacagaaagttaagaattcttttgtttgtaatctgtgggggtgggcaaaattgtatagtggtgcggagtctcgctcccttataggtttcctggagtggatagcctccagttaagggttggttggttttttgttgtttctttggtaagcttgtgaggcccccgtcgcctcgtatacttcctgtatgctttgcggcgttttgccttttgctaatatatgtgtttgcttatcaaaaaaaaaaaaaatatgactgcagcagtacttaactgtggtgctacctaactgccacagtaatcctacaaaataattgctcctgcattataaagttcaatctcttaattacttgtccattagactgtagtctcttcctcctgttgtatttgcacttgtatgtctgtatatataatctcaacataattctgaagttaacgtgcttgaagtaaccaagttttaaagtttcaacttgttgaagtggaactgaccggaaatctgattgaattttaagatcaatgtatcttgatttgcagagtgtgagctttgcgtcaacctatggttacaggggaaattaatttaagttataaaagttttccaaactttaaaatcacggaggaactcttccattggatattaatgccattcctttgacttttgcataccacagtacaagaaaattgaagggaaaaaaaagaagagaggagattattctactccttaatgcctgtctgtgttggttcaaagaaaagatttggggggaggggcggtgcagggggcgcagttgttgttcttgggctagtgtttgttggatttgtaatgggactgattttgattcagttttattagcctgcactgatattatttaaaacgttgttttggatgcttgcatttgttattttaatttaccattttatttctttcagaaatttggatttgtctacttgattgcatttaggattaaatttccttctgaataccccttgtgcgattgtctgcagctcaggaacttggtttgggctacttcaaaac

SEQ ID NO: 10446 - DNA, 31529 bp, Vitis vinifera
  Intron number 2 from transcript GSVIVT01013974001 (locus G SVIVG01013974001) derived from phytozome v7.0 (chr-ID chr1 6; pos 8197262 to 8228790)
agaaaccaaattggaaggatcttatcttgacagaggtatgttcaattcaattttcataaaagatgcattatgaatattagctagtgaggcatatatctttccttggttttcattaaactaatctttattttctcttttcttggtatctttctctttaatatccacttcttaaattatcttccatgtcctacatttagttacataaaaagagcaaaagagaaaaatgtcaaagggtgtaatgttttcttttcttggtgtctccattttgttcttggaaatcatgtagttttgataaattaacttaatgacttagtaatttaatttaatttattaaatagattaaacatattaaatgaaataatttaatatcatatatagtttaaattttaaaataatttttaactattaagttaaaatgattaacttattctcaaccttaaatatcttttgtcttatttacccatatatcttttgtcttatttacccatatccagtgagagtttattttacaatcatgactttacatccttgacttgtagttattttatatatctacaatagttttaatacaaatatttaataaacaaattcattctttaagattaatattaattaaaattaatgatgataaatattgattaaaatcaataaaggtaaatataccaatttgataatatagaaaaaaaattaagttacttttattttaaaaaaaaggcttaaattaaaaatcaaacaataagttttaaatcaactaattaaacttaaagttaactttaggtattaagtagtaagtaataagttttattgaacactctcttaatatttggaatatatatatatatatatatatatatatatatatatatattaacaagggttgtttgattaaaaaagataaaacaatcacatattcgattgtttgtttttattgttttaagacttaagacatttttaaaggcttttattttttaactaatcacattttttaaagattttagacacaaattgatcttaaagaaaaatatgcagtccaatcaagattttattaatttcaagaatggggtaaaatctctagttattcttttgattcttttgataagaaattttacttgggccttgactcaatttagaccttggcatgtcttggtcgagacttgggctttggcgtatctttaacttaggtttggactttagcaggtcttaggtcaagcctaaacattggcttgccttcaatataggcttggactttgacgtatcttaagctaagcttgaactttgacttgtcatcaacatgggcttagactttggtgtgtcttagtttgggcatgaactttggcttatcttgactcaagcttgaaccttggtgtgtcttaggtcaaacttaagactttggtgctactcactttcactggtcggcataaatgcttgatcttagattaaagacacctcaaatttgttctttagatctttgaaggcttaatcttaagatttatgaagtcttgatcttcgaatcttcaaatcttaaaggctttgaagaattccttgaattcttgagggagtgtggaagtcttctcttctctatccatgtgattttgaaagctaaggatatagaggttaagagggacatgtttagatagttttccttatactttatagatatatattattccttaattaagtttgacatttgaagatattttaagatatatttagataaacttaacccttgaaaaattattctttaatttaaaattaattttaggaaacttggcaaagcatatttggaaattttataatttattttttaataagaatttatacttactttttcatttatcaaattcgctatttttatttattttgataagtatattttacttaccaaaatttttatttcgatctttatttaatttgaacacaacttgtcctcctttcatgtgggccatgtgacatgtgtcacaatttgatttgatagaattattgccaagtgatgatttttattttgttacacttattttttattgtatattagtttgtgacatgtgacaattaataagtgattaaatttttttaccaatctacaaatgctcccttcaaagttgttcatgggtataacttccatgtaaagagtgaacaaatttttaaaaaaactttattaatggagttcattaacataatttgagtggtattagaactcatctagtttgaaatattgacaaaatttgaaatattttccaaattgcttatgtacccaaaaaagatcaagtcataacatagttgaaataaatttttctcttttttttttcacttttttatgctttttactttaacttttatcaagccttttctctattcatcttgtgagcatgtcctaacttttgcctatgtttcctttcaagtttttaacttaacaaatattatttttcttttgtgacatacatagtctaagctcttgaaagtcaaaagatgatttatcctaagtattttaaagaacaaaagaaaatccgttgaatgtgttttgatattaagccttgaaggtggatgaatgataattttgtattgtatttgatattctttcataagattgatgaagaattatgtgtgtcaaacatagacttgatttctatgcaagggggggaaacacatgttcttagaacaaattttaattgagattcaatgatgacttggtggttggtatcccaagctctaataaggtgcatgcacctaagatcttacgcaaaagaattaacagttattaaaattttataaggtgtttacagtaatatacctagatttgaatgttcttaaaacatccaaatcaaagaagctttctcaaataccaagctaatcttccacccaatagctcttttatatcatgacatgagaagtgtggtctactcttgctagaaggtatggtagtggctaaggtttctctccaatgaatggaagaacaaagattatataaccataaacctaaaagggtttatatagacagataactaggcttaagtgattagaacccgtttaatgggcttatgccacttaatttatagccctaatggatcctatttaattaattaaatagcctaagtagagaccataaatcacttaactatagacacttatacaactttatgcttatgcaaaatcacttacgtggttatgcttatgcacactcataattaaatatatatatttcccttaatccatgtgctaatgtgagctcaaacggggacaattaggacccaaaggaaaacactgacttccttggattcaaaattttgaagttgacttgacactccattaaagagtgtccattgtgctctagtattctatgacattaaattaattattagttaattaatttcttgggtatgtgacctactatcaattgcatgtagattccccataaagtgatgtctataatctaacaaggtagtagttatcaacctcttaagattaactcttaatttttaagtcttagatccacctatatcatgatcaattgacatgttcttattcataaataaaatgtcaaaattctaccaaaggaattactaaggtcatagatttcagattttaaatccttagaatcacccaagaagatataatatctcaaatccatgagatatcatagtgtctttattaagaatatttgttctcacccgcctaaactatcaattgtctgatctatagggaatatatgattactcctagaccttgctcatagctcaaagtcattgatgacttcagcatttatgcaatattcttttaaggttgaaagtctatccaacattctagattggagcactcatgactacctgatagtcatttagtaacaacccttcataggtcctatccaatgtgtaatcatatacactaatacactcattataggaaactcatcttgataaccaacaaaaggtcatcccacccattatgaggcaatgcactatagcttctaatagataacctatgtccatgaactagttgtgaacaaactcatcaacttgtaaggaactcaagacttgaatattccgtataactccttatgcactcaactcgttaaatgagaactgatactcaccttttcacttatcaaattcaccatttttatttattttgattattatattttaattataacttagttttttatttaatttgaagacaacttatcttccttttgtgtggagtcatgtgacaagcgtcacaatttggttttaatagaattattatcaattgatttttattttgatacacttattgttttcttctacattttttatgatgcatgatgattaataagtagttaaaaaattttaccactctataaagacgatttttttcttaatggaaaaggttttttttttttttaccttttttatattaaggaaaaagtcacttttcatttaccttttgttaacctttggctttgttataacattcaaattcaatttctcatacaaaataaaattaaattcattttttaccattttaataattataattttaaaaacaaattaaactaccttaattttgtgccatttgaatgagaaatgcacttactacaaattagtaaagttttcatcaagaaaaaaagaaatcaaatatgactaaaatataatttgcttttgtcttttttttttctcaaaaaacattgaaacaatttttttgctaagttgtttctggaaaaaggaaattgataacatataaatcacttagcttggataagagattaatataggcaaaagctaaaccaaaattctatcacttgtagattttttttgtcttataatttatccaattctcaacaaaattaaatttttgtaattctataaattcttcattaaaaaaataaaaatagacaatactaaaaataaaataaaaattcaatttaaattataaaataatttaccatgcaattttaatatttcattatttttattttataaaaaaaataataacagcaattccattgattttttttaattcaaaattcaaaacataattcacactctactaaaatcaacaattgtagttaattttaaaaaataaaaaattaggatttgatactctttctcaaattaaaatccaaaaattaatgaattaattctaacaattaacatgtatttcaattacaaatccataaatctaaagacacaccatataaaacacaagtgttagcttgacaagtttctaacaattttttagcaatctggattattagaaatcctagttattctccaattaccaatattcttctaattatataattgatcatttttaaatttttattatagaataaattatgatattttgggatatttagaaatatgttaaattactatttttttcaaattaaaacaaaaatatatatgaatttattttacagatattttaatatgtaaagacaaatagatttaacacatgtagtatttaaacattaataaacaaacactttaacacttaacagtattcatatactaataaaaaataattatatttagttgaaattagctatatgtaaaaaataattatatttagttgaatatgacttaaatttaagtcaaattcaagtcttttcagattttgttgaaaaaaaaaaccttaagttcatattttaatcaagcaaatacctttttttttcttggtatgttagcgtaactttctaaaaaatactatgaacatttcctaacaatggcttttaagacccatcttggccaaaagaggatgaagaaagcatatatgacccatcacttcttttagatcttttcttaactataaaattgatgatcagtcctaaacaaaagagtagaaaaagcatgcatgatctctttcttttactaatatcttttttttttaactatataattgattatctataattaaatcaatttctttttattaacattatatttatcatgttttctagtttatgaaaatttcaaccattatgcctctaacatgaaactaagtagttatgttatttaagatacattctcagtaggactcactgatatattgtggcactgcttatatctcttttgttgagttcttctcctaaagttttgtattttttattttttattttttattttttattttttattttttattttttattgttttatttttgtctttgttgcagatttagctaatttaactaacttggaagtgttagatcttggccaatcaggatctatgaaaatgaaaggtatgttataaaaatttgattatgagcctcttactagttgtgatccatttcatttgttgattctaggctttgccactttgaagttatttcttgagccatcattttgtgatgttcttgtagcccatgccaattttgtgattcggatccattattggcttcaacattacttactatcctaagatttagaaaaccaagtggttgctaatgaagggaggctaaagtactttttctttttgtagcatttgatatgacatcatcattcctaggctaatcatccccatagtttacaacaccccatccttatgcttattggacccaagattttacccatctcatgaaaacaccaattagataatgaaggttaaacctatttttatggtgtttaacatcatatcattataaggcttggcacacctatcatggagcttacaaaaaacataccatataagggcttgcaacacatctatcctcaaattttacctcactagggtttacaacaagatttaaccaccttagggcttacacacccatcctatggatgtttctcaacctatcatttccaagagggtgacatcaaatacctaacacttgtgaaccttttctacacaaaatgaaaatcaatttcaatatacttagtttgtgcataaaaaaaaatgaattaaattgataggttacattcaaattgtcacacctcaaaaccaaatcatattgttgtgagatgtagagttcacttagcgacaaacacagattaaggctctttgaaacatatttaaattacacaacttcctttatctttttagaggttccttatgaaatgaaattaggtcatgtaaaaagacaacgcacaccattggaatgtattagaaaagtctatacataaatgattgctttccaaatggatttagaaagtggcatatattgataccactactaagccttataagcttgtggagggataagtcaaagcccacatgtgcacattaagcccaagattacaaaatgagtatttttttttagtttctttttttttttctttgaccctttcaacaaagttaaaaggattttattttagatcctctatttattgccatatttagtgtctgaatcaagccttgattttttagattttgattgcaaaattatggcattaaagcagcataagcttcatattatcagtctaaaagtatgtagagataaagtttatatatatatatatatatatatagatatatatatatatatatatatatatatatatatatatatatatatattatttttagatccataaagattaaagcttcaatctctttcacctagatcttattagattagtacatcttgattgtgtgggtaatcaaatcttgagcaaggtgggagaggaaaagaatgggtttgtagctactagggtttcaagtcttttccaatatagcataataatgctttatatagaccttaggggttattgtgaaataaccatgttacccttaatgagcctagtcttagctttagtccatatgatgctcccaagaccacttggtcaaacttagtcttccaatgaacacacatgaataatagctagcttgagtagagaccactatgacccataaaatgattcaatcccatggacttagtaagacattatttaataattaatctccactcgctatagaaggttaattgcattccaacattttatgtaaattacatgaagaaattaattaattaataatatgttggatccatgacctactatttcattccatatgctatctatgaattgatatccataatttagtgaggatttcctatcaaccgattaaattgcatgtatcttgattccattgaattacaaattcatcttttctatgatcatttgatatttccttatttgttaggataaaatatcaagtttccaacttaatggaattaccatggtcatggattcaacttgatatttcacattaggattactcaaagggatatgattatttgtaataagatattaattatggtatctgtattgagcattcatcttactatatgttgaataaatgatcatctaagatcacaagaatatactaccactagaaggtctcactcttttgcaactcaaattggtgattaacccatacatgagctttatgatctctcatattagagcatttccaatatagcagtagctaggatatatgcatttctaatcaatgcaaacctgacacgcatcaccataagtcttgttcagtgtgcaacacatgcatattagcaaatttaccttacagactcaatttaatgaccaagacaagtcattttactaattagggaggtaatataacatagccactactaagttgcgcaaactcatgaactactacaaacatacttatcaagccataagagtcctatgtttatgctctttatgtatccacgtatacccaaactatgataattgaaatgaatactcgtaatgaatgaaagaagatgaataaaaaggtaatttattaccattaaagatttatctaatagtcttaagggtgaaaaagttaggcccaatgctatttttgacatagaatgaaagaatatgaacaaattaaaaaagcaattgcttgcattaagcaatggattgttatagccttaggtcatcaagtagaaaatgaaacaaatgcctataatctttggaaaaagttggagtcagtgtttgaaaaaaaaaattgttgagaataaaatgttcttgtagaagaagttagtgaacatgaagttaaaggaaggaactctaaaatagatcgcttagatgctttttcgagtattgtaaatcaattggttgatatgaaaatagtgatagatgatgagatgcaagcctctttatttcaatgttcactgctaaataattagctaacttttgttgtacatgactatcagtaactttattttgaatagtgcattgtttatggaacttctaaagggaaatttatataaagaaaatacaagaaggaagacttttgacagaaaatacaaaaggtatcatcatagaaagaagaggaaaaagtaataatagaataaagaaaggtcatgacaagtctaagggaaggtcttaatccaaagataaaattaaatcttttcattatgataaacaatggcataaaaaaaatccatatttagaaaaggaaattgaataagctgaataagaaaaatgaatatgataagagtaccacaaccgttgtatgtaagtgtgatgaagttttagtactcttagatgagtatttgcatatagatgatcaaggagttgagtgacttgtagacaatgtagcctcctaccatgctattcacttagagtttttttctttatttactacaaagttggagactttaacataattaagatgaaaaattctattcactctaagattatagaaatatgtgatgtttactttaaaaccaatgtgggatgtaagttgactttgaaagatataaggcatgttccatatttataccttaatatgatgtttgatatttgctttggaaaagtaggattaagaaagacactttggcaaaggcaatggaagctcactaaggcctcattggttgttaaaaaataataatcatgtttcactttgtacaagacccaaagaaaagtatacaataatgagttatatgctgcaaaaggtgcttccttggagttatgccataaaagtttgaggcatatgagtgagaaaggatttcaagttttagtaaggaagtccttagtcccttaactaaaaaggaatcattttcttcttatggtcattatttaactagaaaacaatatagagtttctttcggcaatagctctaagaagaagttagagaagttaaacttcatatgctctgatatttgtggctcatagatatggaaactcttaaaggtaaaggtatagatttgtctactcaggtcaaatgatcaagttttcaatattttctacaatttcatgtcatggttgagagacatactgagaagaaattgaagtactcaagtttgataatgaagttggttacaccttaagggaatttaaagcttactgctctaagaacagtattaggcatgaaaaaacagtcattggtactccaaaacataatgggttagctaaaaggatgaatcacaccatcattaagaaggtcaagtgtattataaagactacaaagttacctgagttgttttgaggtgaagctactaaaactacataccacctattaaacatatccccattagtagcattgagctttgaggttcgagaaggcatggataggaaaatatgtttcctattctcacttgagagtcttcatgtgtacaagttttatgcatgttcccaaataatagagatctaaacttgatgataaggtagtcccacatctcttttttggttatggtgataaagaatttggattcagattatgggatccaatcaaaaaaaattggtgagaagcaaggatgtggtcttccaattgaatcaaaccttaaaagattttaacaaagctaaaaagtctaaaattacaagtgatgctttcattaaatttgttacttgttcctacctcatcataaaagcctaaaaataaggaacatgaagttgatgagttagtaagagatgatggtataagagacacatctgcataagagctagttgagcaggtaaagcaaaccgagcaatcacctcttcaaaagaatttgctaccttaggctatgaggtttattagagatcactgtccttctatcaaatatcactcctttgagtacatgttagttattgttgaggcagagccacaaagttctccaaaagtcgggtctcatgaggatagtggtaacttgttgagagctatgcatgataagatggattccttctagaaaaatgaaacctatgagttggtagaacttcttaaaggaataaaagaattaaaaaataaatttgtcttcaagttgaaaagggaaaacattggaaagctagtaaaatataaagttggttggtttttaaggccttaagcaaaagaatgtgtggtttttttatggaattttctcctcaatattgaagatgacttccataataattgttttaaggttagtatctagtttggatcttaagcttgaagaaatgaatttaaggaaaacttttcttcatagtgatttagagaaagaaatctacatggaacaaccgtagggttttgcaataaaaaacaaaaagcactcggtttgaaaattgaagaagatttgttatgggttgaagcaagctctaagacagtggtgtaagaagtttgactcattcatgataagccatgactctctaagaacaaaaacatatccttgtatctaatttaagaaaattctgggtgatagtttcatgatgttattattatatgttgataacattcttattagtaggcaagatcctaaattgattcgcaagttgaaggagttatcaagtgttttgtacataaagatttgggggacactagatagatcttgggggtgcaaatgacatgtgacctgaattccaagaagttatggttgtctttgtaaaaatatattgagaagttatttgaaaggtttaaaatgaaataagctaagaaagttagctctcttcttagtggtcatttcaagcttagcaagaaatgttatcctacttctaatgaaaataaaaagaagatggaaagtatttcttacaactgggagtttaatgtatgtcatggtatgcataaggtcaaatatagctcaaacagttggagttgtgagtaggttcttgtttagcccataaatgtgcattggaaaatagtaaagtgcatcttgaagtacttaagaggtggcataagtatgtggttatgttttagggaatctcagacggtcttcgaagggtttaaaaaggcatatatagctggtgaaatcaataccatgagatctacatttgggtgtgtttaatcacttttacatggggagttgtgttgtggtagtccaaattgaaaaactatgttgctttatgcacaataaaattcaaatatatagtttccaaaaaaacaaagaaggaaatattatagttaaagcgttttctttaagaactaaatttaaagtaagatgagtatgtggtttattatgatagccaaagtaccatggatataaaaaagagtaccatgcatcattctcaaaccaagcatattgatgtgagacatctccattaagtacctataaccgctatggtttatagtcaatagttcttaactaaccctttctcgtcgagctttataaagctttaatagagaataagagtaagaaagatccttgcttcattataaattgaccctaaacctatcattggttaagggatatagttgaagaaaatgtagctaagttgaaaaagattcacactaacaagaatgcctcatgcatattaacaaaggttgttctcaagcaaaagcttcaattctgcaacttgtatggtgacttaaattccatatgatggagttataaatcgggatacctacctcatgtgttagaggagaagattatttgggtgggtttatctaacccatgaagagtttcttaagcctatatattgagcaattgttttttgttctttctaggtccaaatataagtagcatatgggttttcttttggggatgccaaaaatctaaaaatggtatattgtgaaagagaaaaaatgaaacgaaaataatgattttttttctagacacttgtttaaggctcaagaatgaatgtgaagtcctttcatcaaccttttggaaaagatcatttggtatagtcttttactctcttcccattctttgtgtttctaagatgatggattcccacatcaagcactaatatgtgttttaactagttatctaggtaaaaaagtacttagtaagtatttgtattctttttttattgaagtagaagaaattttccccatgcctttttatctcctttaggagggttttccacatcatatttggtgtctttttacttagatatttagttttactattttctggcatatgatttaattagaaaataaatgacaactaattattaaattgtacaagtacagctaatttttgtcatcagaacctccaactttcaaaccaaaacaatttcatcctttgaaattcaaaacaaacacaaaggccaacatagcatctaggtcatcttcacaaagatttattaaccgattattgataataatcaaatgaatttacaaagagaatatcctatacaaaataatcaaagaatgtaagaatcatattttgaggtgatcaattgtgaaactgattatgaaaaaaagatattatacactgatctaccctacctaaccattagaattcaaagaaatcttgtcacaatacaattacatcattttccaacacttagataggatttcctatttactagctttatatttgagattatcttttagaaaattgattactctaacattacaatgatcagattcattcctgtcttgatttattaaacctctccttttatagaaaacattagatgaatacactctatatatcaaatgaattctttaatcaggaggagatctagttttacaaccaaacatcggaaaaactcaaaataaaagaaaccagaattctaaaatattacaattcaaaatattatagagaaatgcaccttctcaatctttaatattgtattgcaaaagtttatctggatattaacaaattcctgcactccaagacaagatttgcaaaatagatctcattcgttagccaagaaaatctaagaactgtcctagaaaaatctaattttctatccaaaaactctaattaatgaaaagaaaagtacaaatctcttagaactaattttcttcctcaacaaaatgacaagtttttttgggcacttgattagtttcttgcctaatcatagcttgacacatgtataacatagatcttatgaaaatctcacactaaatctcaattttgatctctgttattgttagcacaaacaaattcgttaaaaagtgtaaaaatcaatacccaaatggataccccgtcttcatcttgttccaaaagtaaatttgaaacaacaaaatcaatactcctcgataagtaaagatattacttccttgtatcgaaacttattttgtatttcgaaatgaatttccaaatctttcctcttaaaatcaataccaagagatagcaagccatacattaatctgcatattgatatgaatgtctcatagctacttccttaatctcctacttccagtgagtttgtaggtttgttgaatttgaattcgatcactaacgacaatacctgatgatagctttctttattgtcaattatctaatgtcaaactaatcatattgaggtatcaaaatctatttcaattccttcattttatatagtctagtgtgtcaaaatgcacatcaatagtttcctcctacattatcgccatgtattgaaatggtgatccttctctacatatcttctatttaagtgcttacaattgttccaatcttactatagaaaagattcaattatgcaaaaattcttattaactttcggtattagttccaaaatagagactaaacacaattataggttaaaattgttgaactatgtgcaaacaccctcaatatatcatcaattatgcctctaaaactattcattttacactcatatcaatatcttccattattatcctttcttgttagattgttattattgtgaaggaattttgaactagtacaagagaaatacttattatgctctgtgtattagttattctcattaattcccacaaaccctcaacaaaacttatatctttaatatttttctcttgcagattcaagttctggaaattttccaaaattggaaaagctacaaacgttaatgcttgattccaatgaactcgagaatcacagccttcaatctctaggagcactcacttcccttaagaatttaagtcttgcaagtaaccaactttcataatggtttcctttgaatggtaaagtagttcctaaaagctaatttctttccattgtgtattttctcccttactaatcatatcctttgacagaattggatactttgcaaaacttgcaaatattggatctaagtgggaatgagttcaatacagcggaaatgttgaaaggtaaaatctactcctatgtttgcactcttactttgtttttttcaatagttcaatgagcaaatttaaggttttttttcttttttttttggttatgttacaaggaaaactaatttatgacaaaaggaaatttcattattagaattgataattaaattgcttgtcctaatccttatacttgtacttaaggtcgaagaattctaggaaaaagtagtcaactccttaaaatgattttgatatcctagcataaactctaacgaacataaaaaacaactatgtctagctataagaaatcctaatgtaaaacaaaatctaagggtctgtttggtaattgtttttgaaaataattatgaaaaatagtttttgaaaattattctttgatttttgtagaacaaaagtctgtttggaaacctaaaatatttttaatctatctttaatattttatgttttaaaaataatttttatatctagtgctctatttttaatcattctacatgtttgcataaatttttttttttaaacaatctttaaaaaataagtgaaaacaacataaaacaactaaaatatgttctcttaaaatacctcattttatattcttaagaacataaaacaaaaaacaatttttaattatcaaacgtgttttctgtattttttgttctagaaaatagaaaattattctaaaaaacaattcccaaacagacccaaaattactaattctaagaacaaaaattttcaaaatttcatcttcgggatttactccttaattttgaaatatgccccattcatttctaggaacattcataacttctctcacttattcaatttatttttctcatgtaacaatttggtaattagtctaactcttgtttgtttatattgataaaaagttctttgttttgtgcaatgatcgattttcaagataatcatgaaaaaaagaaaaatgaattaaaaaaaaaaatcaggttgtttgagtaagcattaactttgaaactagaaagatgtaggctatgtgcaagtaaattactaatagctagttatttcaatctagtagtatgtagaaaattttctatctcataattatttttttattttaattctattatttaaaatgtaaagatttaattagaacataataattataattaaagtcctaaaaagtcttgatttaattataattattaaagattattaaagagttaattagaacataataaatataaacttttttttctcttcttttttctttggcattttttcttctgatggtgagattttttgtgttatttttatttttttgtctaaaatttaaatagatgtaaatagagttaaatatcatttcatctatttattttttattggtatttgaatacttttaaatattaattttttattaatgtttggatactgtttaatttaaatctaatatattatggtagtgggattaattattatgcttttaactattttatataattaaagataacaatgcttgaaaaccaaccactcatacttgtaattttttgggtgatcaacctggccaacctttttgcaaagtttcaattcttttaaccatttcactttgagaatatcctcaaacattttaaggacattagagtcaagaaatggatacttcacattttctctaaaataaagatctttattttcctttaccctctaggttggtaaatggaaatgattatttatgatgaaacaaaaataattgaatctgaccataaaaaattttagaaaatgaacaactattcctattcattggccaggtccaatccccattcagtgttctttgttttattctattttatgtttggaaatttatcatgtctaaacaaaaaaaaaatatatatatctatttttttgaagagatttgcctagaaaaaaaatctattttgttaaaaataaaatctatcatgcataaaaaaaaccttgattaaagttaattttattctctagatagattattttgtttttctttttaattaattttttaatttttaaaatttttagtttattttcctctcatttattttaggaaactattaaagaacaatacttttttcctttttggataaggtgctctctagatttttattgtttcaaattttcttacaccctaatcttaaattggaataataaatgactttgaaagtttttaagatggatattgttaaagagattactaaggtttaaggaaacttaataatattatgaagattaatttctttgaaaatattaataccaagataaaatatttattaaattggaataattaatgtatgaaaaaggagaaaaaaatatcaattttagagcttcttttgaaaatcaatttttgaataaaacactcataattttttaacatttttcaagatgaccttcttcttttacattaggattcaaatttagggaataaatattttttttgaaaattttcataaaaacatagttatccatcaagatattactaaattttaaactcttaattagcttaaatgattaagtgagaaagggcctttgtaaattccacaacatctattatcaagcttatcttgatttatgtcctaagaaattttagaagaaagattacatgaagataataccctatgtccctacaatggataaccttatatatgtgatataatgtactagaacgaatattttcttggttgtagggatgataagtaggtatcagttcaatctggaactagagcattggacgacaatcaagtatatacattcaagtatcttaagagaatgataaattatgtgcttgtgtgtcactttgatgagttggtaccccttggttacacaaattcaaactttcagtataataaagagcctcgtaagtctacctttaggtttctgttcactctaggtggtgggattgttagttgaagaaaagtgaagcaattgtgcattgttgactctactatgaaaactgagtatgttacacctttaaagtagtaaaggaatccatttgtcttaagaagttctttatgggacctagagtagttttgttggtaataatattttgtgataatagtgaggcagtggcttagtctaaataactaagaaaccaccgaaaaggtaaacatataaagaagaagtatcagagaagataccttttacagagaacctagtaaatcccttcaccaagactttacctagcaaagtctttgagagttataaagatatcatcataggtacacccagcatgctttgagggctagtgggagtttgttaggatagagcccttaaaagcatgacatgatgtaacaaaataaattttcattaataaatttatatattatgatttacgattccacttttctatccatgattgcattagttcttatctaagccttcacacctatatcacttgcattgtaaatgaattgggtgtattacgagttatataaaagatccaagtcatgagttacttgcaagaccataacgagttcattatcaattaatggaattaagcaatccatttgaaattgttgtgtactacctcctaattgaaggaatgatttgtcttgatcttcaaaattggtttcccatgatgagtgcactagtgtgtatagttgcacattggagagaacctatagtgaatcatgacattggctattgggtaatcatgacttcattaagctactatgttgcatgggctctcaaccttgagagaatattcaactagtgttaaagtctttagtagctttaacttatgggtgaaccctaagatggtcatagattccttacagattggttcactattgattaaggcataatgacaaagctattctcaagataggcaccttgatatctcactggattgaggtaatgtgtccccttgagtgatcttaaagactcgtgattaagtaatctataatcatagtgattgcttgagtggaatttgacatgtcctttatagactagaatatgtcaattgatcacaaaataagaggacctaagactcaaggattgtggaggtaattccaaaagtttgatagcatctacctaattagattatagagaccaatgcctagagagtacatgtagttaatagtaggtcacaaacccaagaaatttttaattaaagtggatttaatcaattttcatctcgatataatttcataggatactacaatgcaattgactcactttcatggagttttgagtcaacttcataattagattatgaggaagccaatatttttcaatgagtcttattggtccctactttggtagaaagcttaagatatatggagaataatcatttatatgtataaaggtgttttggtaaaagtgtaatattgcacaagattttatgattaattatttttttcttgattagattaattgattaattggagcctaaccagactaattaattaattaagacccaaagagttagattaagtgactcaagcccaaatttggtaaaaatcacttaaacaaacaatgaagtctacataatcttagtggtttatagttagatagacccttaaccaatgtcttctagaaagcctccatctctccctcataaggtgtgtagccaccctacataggtgtcaaagttcaaggaaaagtgatcaggtggaagatcatgaagtgtttaagatcttcttcatcaattggaaataaatcaaggaacattcagatcaaaaggtaaattttttaagcacctaggtctacttttttgcattttatgtttttcgttgagagtaaatctagtttccctaggttattagagagcattcgcctatgatctagtagttttcccagcaatttgatgcattccaaagctttcaaaaccaaagtaaaattaattgaggctttcatggaggaagttctttctacattttaatcaaggaagcaattatgtcctcaagaacctggcctaaaaataaaggttgagaagatataagtgctacagaggttgaggatggtatgaacatgagtggcgaggaaagaaatagagaaaaatatagcaattgagcgaataaggtagaatgacactcttattttgattatccatggtttttttgtaagggtatggttttagggtgactctttattatcaatgcagtcaatgatttttaagtatcgctctggttgtttacaatttaggtgacgcttagctgttagaatttgtctaaggtcttcaaatgcctttaaatatggtcattgaggttgtaaagagtgttgctctaagtgggttcttagtttgaatgactcataagaatactccatttaagccgttagaggtcgccctaaagggctgcttgaatatcccatacacaaacgtcctttaaccatttgggccactagggactattcaaaaatgggttatctcaaggtggtattacacctaagcaactaaagtctcttaagcaaattccctcaagggatttgggtcactaagagacactaaaaaaagggtcatcctaggtagtttactcaattaaggtcccttaagcaaattcccttgaggtttagaccactaaaggttgcttgaaaaatgatggtctaaggaaagtactcgtcttaggcgaccgaggtttcttaggcaaatgtccttaagagatttggactattaagggttgctcgaaaaacgtcatcctaagaaagtacctcacctgggtaattaaagtcccttaggaaaatgcccttaagctttgcaattgaattatatatcattgttggtaatcaatgctcgaggagtatcaaatctatagatgatgttctagagtacatattgtaaatatctttttactttcctgatgtgtatgtttagctttaaccaatctagtgtaatagtcagtagctagtagccaagagcatatactatttttaccttggtgttaatggcatgggtttgattatgttcaagccccattttgcaaatgactaggatgcatttttgcatagattttgtccatctttttagtgtctagtattacatcatcttgtaaatattagacataaggtttcatccattctatgtttcttttatgaatgatatagaccagtatggacccatctatattggggatgtctactcattctaataggaattctttatcaagtgctactcctttagaaactctaatagctaaaaattctaactcttagttccaaggctaagggacacgagttatagtgacttcctagaatcactacaccatttcccaaacctttttaaagatatttcactatggttggatctcatgcctcaaagattcatataacttgtccaaccatgagtttggaatcactaaagatttagagcatgattgtctttacactcaaagctaaccacaatcatgcaagctaggcctcatattttgctttattttttgtgattttggatcctaactggatagcatgctttatattaactccaattaaggatttaagcataccttaatccttgggggtgtgtgagttatgatatgtccacatataatgtctatatttccaattatatcattgtcctcactaaagtaaggcttaccattgaagtcaactacaaaatttgcaataacatgggctttgaaagtcagggatggtcatatcttatattgaatttgtttagttcaactaaccacttgatcattctccctaagaggttggctttggctagaatcatgcgcaacaaccattttgtcatgacttttatggtatgtacttgaaagtatggccttagtttcttagatactataaaaaggtcattaattctatgggtacatagtgattctctgcatgtatgagtgtttttctaatagagtatattgggcattatgttcctctttgttctcccttaatgagtgcataattgatagcacattgtgagatggttaggtacaacataggatttttttgttcctgatgtaaccaagattaagggaattgttagatattcttcaagtttcaaaaaggcatcctcataggtgttattccaactgcattctaattattttttcaataattctaagatgagttagtatttatctatggtcctaactatgaatcatactaatgcaactaatcaacccagaaatttttgtacctcctttgtggtgataataaatggcatctgaaaaacaacccagatttgttcaaagttggcctttattccttgttgcgtcactaagaatcccaacaactttctagaggaaacacctaagacatatttgatggtatttaactttatttagtgcctttgcaatatggtgaagacatggatgagatgcttgtagtggttcactttttacttgcttttgattgacatgtcatccatgtaaacctttatagtctaccctatttctttagtgaatttaatttatcatatgccaataggtgttccccataattttaagttcaaaaggtatcactttgtaacataacaatccttctttagtaatgaaagcatagggagttctatcatccataaaggttaataactcatgtctagtagtggcatcgactagctgatcaatatttaagagtggataactatcttttagacgtgttttatcaagatcaatatgatttatcaagattttccatgccccattcttcttagggaccacaactaggttggctagccaattgaggtaatagacttcgttgatgaatcctatggctaagagtcaagtgacttcatttgtaatggcttgttgtcatttcaatgtgtacaactaattttttattttattttttaataggtgtcatggtctggtgatatcctaacatgatttcgactttctaggtgaaaatatcttggttttcctttaacaccttttggagtcatgctttctcttgtatcatgagtagtcttccaatcattacattttttaaatagatttttagcattagttccaacttttttgctattagcaactaccatattggtttttgtcacccttcatttcctagtcacccgatgattgttatttaagggttagcaatggtttgagtttcttgctttgactaacttttaccaatctttttaatagtaatcattacatggcacctttaggtcattgcttagtccccttaaaggagataggttccctctttgctaggaaatttgatgttttggatgtgggaataggaagtagttggtagattgtgtatctcaagtcatcttatgatgatgttatatggagatggtttgtctaccatcacaaataatgtagggcatttgataggtcttactatcatgggtagaatcatgatttctcccaagaggttaactaatgtctaacttgatgagagcacatgagggtgcttgtagcatttctttggttagtcacataattcatacattagctaggaagagatatcaattgtgctaccaaggtcgattagaacctgtcaaactttaaagtttgcaacctttagcattttaagtaaaagatcctaattcgtcctaaatcttggctagagaaggtgagtacgctgtgatcgatccttcataagttactttcatgaccatatgggtggctaattcttcgagaccttatcgacgtagctcctaaagttctctcttttagtcacaaatagccaatggtcaaccatgaatagtggcaatcactatggtgggggttaattctcttggtggtgatgaaattcattcttctttattatgggtttctcctcttttagttcatttgttgtcaatgaactccttcaatttttcttacttgatcatctcatccacacaccttttcaaaccacaatactcatcgatctagtagttatgatcttcaaggaaggaagtaagtaaaaatatctattaaggtgcctctctactactcctgatgtagagattagggaggccaaaagtctcccaaggctttaatttcctagagaattttttggtataataccttaagtagtggtgtatatattaggtgaggttgttcataccttctaatatcatatttcttctagtcatttcttccctcttagtcaacctccactatttcaatgttgtcttcgttgggattaagcccctaaaagcaagacataaagtaacaaagttaggcttgattatccttttgctatctcttttatgcattgacattaatgtgaggatttagcccatatctcttacattatacatgacttgagtgcattgagagttgcacataggatacaagtcatgggttccttataagtcaataagttatctacaatcagttcatggatatgggcaattcaatagatattatagtgtgctaccttggagggatgacttgtctaagttatcgggatgggtttcccatggtgagcacactaatgtatgtgatacacctctatactatctcaaaattttggaacacaagcacataatccttcgttctccagagatacttgagtatatgcttaacataatacacttttcctattcttgtaatacttaaggactttaaacctaagaatacattacatcccttctagaactgagtaaaaaacttatcttgatttatgacaatatctctacatcattcccaagaagtagattatcatctatctacaagatcttaaagcaccaccacgcttcatttctccttcttgtacacacaagggtcattgctattaaaatatctcattacatcatgtagatgttattatcaagataataaattaagaacactatcttgacatcctattgcaatacctcataaatgagatacatcgcaatggatatgactactctaatagatttgagtatggctattagtgaaaaggtttcttgtagttgaaacaatgtttcaaactataacctttcgctataacctagccacataaatctccaccttttccatctactcctttgttcctcttatagactaacttacacttatggcattgatcccttcaaatatttctacaggaacccagattacgttagaatcacaaggattctaactattctttcataacttcttgtcaagtcatgagcaccaacacgctcattacttcattataatatctagggtataaacctcccattatgatgaggtactcatgtactggaagtaataggaatggtgtgtctctatacctttggatctatagtatcttgtgtatagtaggattatcttctagtgttgtccaatctatatcactatttgccttattacatattatatagtcttcaccagatatccagcatttgtagcaacaaatatcttctaataatcttgactataaagtaataatcctaaaatccacttgaatatcctataaactaatataccatttaccttgcctctatttagtctacctttatgttcaacacaagttctggacactcccatatgtgaatttattgtaaactaagtttacaacatgttcacatctctctaaaagttaaaggtaccaacctagtacaacttatgaaggttttgtgacagttgatgaggagagacggcaaagaggcatcacctgaattaggctagaattctcattaaatctagtaggaggaactgattgttggttatggatagagaagttgtctttgctaactaattttggtgagaagttgtctttgccatctaattttggtgagaagtttcaccatggttgacctctaaggggagttttagaaatctagaggttggagatgaaagggtgggtagtgcacgcacaataaggagagtgaagtagaacaataggaaacatgttaggggagatttgcaagtattgggaataaatccaagtctatcattgcacataataatggaggcaaattgttctgaagaagaaaacaacaaggtcattaggctttatgggtcttctggctggtcattaggccttgagtcttctaaagacttaatcgtgggtgttggaagccttttcaagtccttttagggtttgcccacagcagaagtcttaaactcaattggaaggaactatggtgtacttgctaaagatgggtcatgctcaaaggattaccccaaaggtcttttttacaacccctttaatagagttgtgggttttaaggcctaagagaatgttcaatgttttccttctatagaagaagctttggcattccccatggtgaccttcattgatcatcttttaaaggagacgtttcttggttcaatgaagtgattttcaaaagtaatgaggccattttaacaaaaagcaacaggttttgaagataggtcatttcttctccctgctctctgttcttcttctactaggtcgtatcctcggcaatggtccaacatttcaatcaaagttcaggcaagccttaaggcctatgggttctgggtgctaacccctaaggatgatactttaggacgtaaatttgttggatttcttagggaatgtagcaaaagatcctttaggtaagaagatggtgatcagggctaaggagttggagccctttaaggttgtggggcctagatgcgtttcaataggggaagagcatagccttgataaccttcccaatatgtttgttaattttaatacctttatgcgatgcctgctacagtttttaaaaaataaatcagctctctactaaggaaaatgaaggcaaaaaaaataggcatggggttaaagatctcaaggggaaagacaaaacctctcttatgatctcatttggagaggaaaatccgaaaactagaatatcttattaattacaatagttattcacttactatcaaggaaaggaaatgagcattgggaattcaacggttgtttcgtgaggtagctttttcatttccaatttggaagatgtaggttcataggggaatttgtgttctttctaggttgtgttagttgatgtaggttaagggcatcctatgatttttggagctcatgcttgtggcattccaacttgcttgggggttgtcattgttaaggagatgggtgtttgtttttctattccttttattactttccttttggccttaattatatactacgtctgtactttgatgtgcctttttactagcacctttaatatatcatcctttttacttataaaaaaaaatgttgaaccattgtatatacatttgtatccattcattagtggcttttcaaaactaaaacaggacttctaatcccttttttaactttatagactagatgtattgagctctgaatacaactcctaacccctcaaaattcaaataatgttagcaataagtggtaaaccacacaaaggttagtccctatatgctagataagaaagctttggaaagtaacaagttatttccttgcattacgatcaccatctatctaatatgcaataggtgttccaatgaggtcaccatccatctaatatgcaataggtgttctaatgaggtcacctatcctatcaaacatgttgaatttaggaattataaaccccttgggtgcttcctcctaaaggataacttcacgaaatggtatggaagtaattatatgcatcacttgcaaggtaaagggctccataatgtatgtaattaaaggggatctacccatcatggcttggtgggagcttacttgtttctcaatggcattaggctttgtcatgctcccttagagttggtgggatctacttattttgtgtttggtccctcatattcgacttctacaagattgttgtgggttaaggagactttgtcatcagttgacttcatgcattttcatgggtaagctccttgttacactagttcaacttatcaagctagtgcatcatctctttcttttaccttaaaagtcttttttccatttccttcatctgcattagattcctgataactgattatcatcacaagggtgcctactattcgttcaagtttagaccatggttaagatgattgagtgaaattgatggcttttatgtttgtttctcatatacggtgccaatctagtgtggccttttttagttttggacaaacatacctacacaaaggagtgttagggataagccagttagttcatcctatttcccacgatcaatttagttatggcttcaagcatgagctgaatagaaaaaaatgaactagtatgtgtacctaactttggttaggctttataaaatttgttttcttggaaaggccagcaataaatttgtctcatgttagctttccaagtaaaaagtatcctaaaccattaaacacttgtagtacaacattcaatcgtctccataaggattgaatgtatgatcttaatattttaaatttggttgtgaaaatataaatttattatgttttctaatgaagaacaaatcaaaatcaaacaattgtataaggattaaaatgaaatttttgaatcaatttcaatgtagtaacaacaacaaaaaataggaatctaacaattaatgaagatcatctagaaagaatcatgtgaagacttagattaacacatagataggatcaaaactaaataaatttctcctccacttatagaattcaaaatatcttctacaattaagccctatattatctctaacctaatcatagaaccacacataattgatctaaaatgattcacaatgaatctaatcaaaagaaaccagtatcttgatattccccttgcttatcctttttaatagctaatcaagagtttctacccttgtgtctacatcaattctcaacatattccacaattatttccaaagagggtaatagctcaattatagttttaagttggttgacttgtatgcttttgcttcataaaatactcttttgaatatctaaaaataccatgatttaaaaacaaaccagtatgttatcttggagattaggtttcttcttatagttatcttctagtggatcatttatgggaagataatagtagatggtattggttatatattgctttgaatgatattgattacatccatctttgaggttttggtcgctatgtaactaatggcggttcatcccttagatgaggttaagcctatttgtagtggtcgtctttgtggaataataatggtaatggattaatcatatttattgtgttgtagtagggtaggtcccctaatgatgtcatgccaagctagcatatggagatagtgtgacatttttaagatcttaccacatggaaagggatatccacacccttacaattatgttttatcttttttattagtcttcaagtaaggttgaccactagataaactatgcatgacctaatatttgtaggataagttatgaaaccatcaagcatttgtaatcttttgcataaggttgaggtgaccaatcatccaatccttgattttccattcataagcttttggtgcccatcatccatctatagcttttattcattcaaggcaatatatatgaggtcactcactttccattgagcacaagaaattttctccataatcttcagcatacttttcttatgagaaaaaaaaaaaaaaaaaaaatcccccatttgattgccaaacttgaatctaatcccaaattggatcctttctcatgagattttttatatcttctatcattttaaagtcgcatgagtactatagatcaaattataaacatataggcatgcaataagagagtcttcctttgactcatatacaactattgttcacttttgcctatttgaaactcattttgatgagagtatttgtaagtcttgccattccatgaccatgaagcttgctttaggaccatagatttatttagttggtaaactttgtcttcttacctttttttaatataaccttgaagttagtcaacatgtatcaccattcttccaacccacaattagagaaaagctaatttcacatcaagttgaaaattcaactttagtggacaataagatgactgggaagcattaatttgataaataattcaaaaagcatataggttttagattttcaattttttttatcaaaaaacattacttttaccacaatctccaacaaaaatctagtaggatgaggcctattgatcataggacctagaatacgagtagttgcctacatgcacgtgcatgctgacgcaataagtatataaccttagctatttttcttgatcatatataaagaagtattaggaaactattaagctataccataatgaaatctactgaataaaatatcaaaaccattaaatgtctatggtgagatatcattaaataaaggtacaaacaaataggagtaaagtaaagggtataaacaaatatttgaactatggtacaaacattagaatctaaaaatgtataggtagcatcatctgattggtggtattttttctgtaagtaccgaaaaatatatttttgtactagacccaaagtatttacataatttctacaaccaatttccttcttgcaggttctaaaagcatctcaaattggaaaaagcttgtgaccttggttcttagtggaaaccaattggacgacagcatcttccagtcattaagtactgcgctcccgtcccttcagaatctgataattggacagaattataacttcaaaggatcattttccgctaaaggcatgtctatatttgatatcagttcaaagaaacatataagcttcatgtgttatttgcatcttcatgtttcttttttatgcagaactatcaaattttaaagacttggagacgttggatctaaggaccaataatctcaatggctccataaagatacaaggtaaaggaggggaaatgcaagcatataagaattacgtgaacttgctaaattatgtgttatacaacaaaaattagtgaattatatcggttttttgttaatattaaccccaattagcaaaatgttttgccaattttccgaaacaagaagcctaacaatgtttccttaatcctaaatggtctatctctttcattcttttaacctacttcatttgcttggttgcagagctagctaacatgagcaacttgaagaccctaattttgagagacaatcaactcagcggcatccaaacaactcaaggcaagggaaagactttattccttttgttttgtttttcagtgatatccccattcacacatttaattttcagaaccaaaacttgtccaattatggcgtaatttccggttgccaaagttctataaatatttgattatacaataaaattccactgaatttttatcaaccatattaaaatgatcaatttctaatgaatttttggtaggtttagtgcccttcaacaatttggaggtcctggatctgtct

SEQ ID NO: 10447 - DNA, 3133 bp, Vitis vinifera
  Intron number 1 from transcript GSVIVT01004945001 (locus G SVIVG01004945001) derived from phytozome v7.0 (chr-ID chrU n; pos 16878584 to 16881716)
cgcatcctgcagcagctttctggttttcataggtattcttttatcccatccttgtcttatggttactctatcttatatcatgtaaacacgcattattcacaaaatataaatgaaaagaaaataataaaaaaaattcatgggtatgattttagaaaaaataattataattctcattttatgcacgaaaaataccttatatgtgtatatgagttgccacccatactaactcaaatcatatccaattaataaagatactttaagcccaaaagtagtgttattttaaaatcaaaacacatatatgagatagacattattcccatgaaatgataattattttttctaaaatggacttttcattaaaatgacttttttgaattctttttttatccatattttataaatatgacacgtctacatattactccttatcttatttgcatgatcataatgtttatgaagagtttgtccttgtattatatatatatatatatatatatatatatatgaatgagagattgaaacttgatttatgcaccttcttttctttcacagatattcaaattaattaattaatataggattatgtttggttcttaaaatttttttaaaaaatatataagagaaataaaataaagataaaaattagaaaaaaaaattaaattaataaattattttttatatgtcaactttaaataatttaaaaatatataaaattttaattaattttagttatatatttgattttttttatataataccttttaggaatcaaacataactccgggtaggtatgttaacgtgcactttatgatattcccacagtactagggagttgacttgtctttctttgttacggtcacgtttagaagtgtttttaatgatagtgttttttaagaagtgtttttaggagatcatatattaaatgcttattcaaatgtgatttttaaatattataaataatttttaaaaaatttaaaagtattttctaaattttacgaaatacataatattttttcaaaaaaattttaggctaaaaacgttttttaaaattagtgtcaaacagactctaaaagtatgtttgtcagtaattttgagaaatgtttctagtcattataacacataaaaaaaatttatacttcaaacattagaaagattaaaaacattttctaaaatcactgggaaatattatttaaaagtgtatttgacaatgtttttactcataatatttttaatgaaagtgtttttttaaaatgtttttacgagaatcacctatcagatttttttttctagaaaatattataaatgattttttaatactacaagtgaattttaaaattttaaaaaatattttttaaattttatcaaatacatattttttttttcaaaaacattttttaaactaaaattacttcctaaaatcaagttgtccaaaacaagtcaaagggtctaggatgaaatgggttggatggtaatacactcttaaggttgattgaccccatagagcaagcaggagaaatgcaaaggagcaagatttgaggtgttggataaaacaactaatcattcaaagaagaaaagatagtcgattttacttccatttgataacaaaaattttaaatcatttaaaatttaaaattacttacattgaatctatttagtaataaagatttgactaaccattaatagcaaaacatgatcaataatttacaaatttttagaagtttttgacaaaccatttttatcatttttaataaaataaagatttttattgttgaatatttttcaataatcaaatttaatttcttttaaattaaacctttttattattatttccttaataaaataaaatgaaaactataaaatttacattataatttattttcatggattttcttattatatattagttaatactatatttggatgttagaaaatttgaagtgaagaaattagaaagaaaaacatagaagaaaagaaaatattgaataaaaattttaatttattatccatgaaaattaacttgttaacaaatatatttttaatttttttaatttctttttgaggaaaatattaaagaaaatatttttaaatttttgaaaatacctttttttttctttttctattattcttattttttattttattttctatatcttccaattagaagattacctatcttaggtgatgtttgtttttttacttaattctaaatagaaccttaatgcttaatagtgttaaatattaggttatttgtttttgtagtattttatttctattaagtatttaaaagtaaaaaaaaatcaatatgttattttttctatttagaaaaagctacatattttggttttttctatttattaaaaagtttataataagtcatgaaaaagtagaaaaacaaacaacctaaattctaaaactaaattactttaagcaaaaagccaaaaaaacaaacatcaccttactattttccaccttttctactatgttccaagtacccaaatattttaaataattttggttaaaagaaaaaaaaaagataatggcaaagaaatttgaataattcaccatttactattgtaaatttatgagataattttggtatagagttaaattattaacataaatatacatataattcatttattatttataattaaattaatttaattacgatgcaaaatatagtaataaaaattatgaatttatgagaacaatatgaattctttttaaaattaaaaattgaatttattttaaaatagaatctttactatataaaacaaaattgtaattataaataaaaaaatatatttaattaatattattcttataattacaaaaaaaaaaaagagtattggatgatataaaataaaattataattattaataaaaatctaattaattttattcttagaactaaaactttaaaattaggaaatagtattggatgaaggattgatatccactcttttcatgatagaaggtaaccatatgaccttgtatatggcttgcatgcatgcatgagaattggaatttccaagtccttcatttatttgattaattattataattaggactcttcttatgggcactaagtctaactcttttcctcaattcaacaggggataaactcaccgct

SEQ ID NO: 10448 - DNA, 8720 bp, Vitis vinifera
  Intron number 3 from transcript GSVIVT01007764001 (locus G SVIVG01007764001) derived from phytozome v7.0 (chr-ID chr1 7; pos 9283158 to 9291877)
cttcaaagttgtgtagacatacagctagtggactggtaactttcttagctacaattggccagttatctttgaatctttgattaccatggataaaaagggcaataagctcttctcttttttttttttttgataagtaaaagatatgcattaaaaaaggcaaaacgccgcacagcatacaggaagtatacaaaacagcataggcctcaaaaaacaaaacaaaggatcacctcccattaagtggaggctatccactctaaaaagcctataagggagaacgcctcctcacctacatacaatttggcccaactccacaagttacaaacaaaagaattctttaacttttgaacattcaaaaccccccccccccctaaaagctaatctattcctctccttccataccgtctaaaaaatgcacaacggaatggcttcccatatctttttccttttctttcccacaaacgagcccctccaactagctaagacctcctttacagttcccggaaaaacccattttacatcaactaaaccaaagacaatatcccataaagctctaaccactgtacaatatataaggatatgatttacactttcttcttcacattcacacaagaaacaccgatttggaagttgaaatcctcttctttgaagactatccaaagttagcaccttcccccatgacgcctcccacgcaaaaaaagcaactttagttggcactcttgccacccaaatgcttttatggggaaatcccataacctcagaattcgtcaacaaactgtaagcttccttaaccctaaactgaccacttcttccttttctccatataactgaatcttcctccaaagaaggtttaaaacccctcaaaatgtggaggaactccccaaccaactcaatctcccaatcattgaagtccctcaagaagtgtaggttccagtttccttgacccgaattttgatcccacatttcctcaaccgtcaaactctgatgcgcagccataccaaagagatgagggaaacattgagccaatgaagaatatgagcaccacacatctgtccaaaagcaaatcaagttgccctttcctacacggaatgttatgttatcccaacaccaatctgattctttccaaatctccttccaaacccctacaccaaccgccccatttccttttttgggcctccaatcaagaccctcctgcccatacttcaccttaatcacttgtctccacaaaatatttttttcacatgcatacctccatatccacttgccaagtaaagctttgttcaacaaagctagctttctaaggcctagcccacctttctctttgtctgtacaaaccacctcccatttaaccaaatgcacttttctctccatgtttccccctccccacagaaaatccctttgcactttctcaatccttctaacaaccacctttggcattctgaaaatggacatttggtagattggcatgctagccaatgtactttttattaaggtgactcttcctcctttagaaatgtattgccgtttccaaaaagctagtctcctcctcactctttcctccaccccatcccatatatgcgctctatttggggcccctaaaggaagacccaaatactgagaaggtagagtccccaccctacagccaagctcaacagccaactcctccacctccaccacctcaccaactggaatgatttcactcttggctaagttaatctttaagcctgaagccgcttcaaaccagaataaaatccaccccaagtaagttaggtgatcctttctggcctcacagaagataattgtgtcatcagcaaaaaataagtgagagatgttcaaagaaggaccacttccaccccttatgttgcatcctgataagaaccccccctccaccgctctcctgataagcacatcaagcacttccatccccatgatgaagaggtaaggagacagcggatccccttgtctaaggcctttagtgctagggaagaaacctgcaggcactccattcaccaacactgaaaatttagctgacgataggcaactccacatccaccccaccccacccatttagacccgaatcccatcttttgtaacaccttcaccaagaacttccaattgatgcagtcataggctttctctatatccaacttgcatataatgcccttttccttttgtctctgccacgtgtctattacttcatttgcaactaaagacgcatcaaggatttgtcttcccttcacaaaggcattctgagaaatggataccaccttaccaactactttcttcagtctgttagctagcactttagccaataacttgtaaagcccccccaagagactaatcggtctaaaatctctaaggtcctcagccccactcttcttggggatcagcaccaagaaggtattattaagactcttgaggaaagaactgtggtcatagaagtctttgaacatttccaaaatttcctctttaatgaactcccagcaactttgccaaaatgccattgtaaagccgtccggaccaggggctttatccccattcatctccatcagagctacatagatttcctcctctgtaaagggcctctccaaggtctcagcctcttgttggctgatctggtctaaccgaaggccccctatgtccgccttccaccccatatcttctgagagcaaactttggaacgtgctagcaattccttccctgatttcctgctcctctaacagccactccccattgatctttattctctccaaatgattatttctacggtgagcgcttgccatacgatgaaaaaagcccgtgtttctatccccctccttcagccatatttccctagaaagctgtctccaatgagtctcttccataatcacccatttcctataattatcctttgcttctttcttaagctctgtttcctccacagtcagaattctcccactttcctccctatcccaaaactccacctgctgcagggctaaggatttattggtctctagcttcccaaaaacttctctatttcaaactttcaatttctgtttgacttccttcatcttaatagccaacttgtaactaccactgcctctaacctcaattccttgccaccagctgcgcactaaatctttgaagccctcaaccttaagccacatattttcaaatctgaatagagttgggcctcgtcttatcccccctcccactagcataattgggaaatgattggagaccggacgggacagcctacattgactaatcccattgtattggtcagtccaactaggggaaacaaggaacctgtccaatcttgcccagacctgattgttttgtcccccattccaagtaaattctcccccttgaagtgggagatccatcagccccaggtcatccactatttccgcaaatttcctcattgctgaattcattctcctctggctgctcctttccctcggaaacaaggttatgttaaagtccccccctatacaccacgggtcttcccacagccctctaatcgcccccaactcatcccataaagcctccctttccatcttggagaacaggccgtacactcccgtaaaaatccaaatcgccccattttctacattccggaatctacaagataaggtaaactggccctcttcccaatctagaacctccagggtccttttatcccagcacatcagaattcctcccgaagctccttccgcattcacaaccttccactcaaggaatctgccagagcctatgcttctcgcaatgttatccgacatcgcttgaattttagtctcctgaatacagattacgtccaccctctgattccttataaacgtcttaattacttttcttttagagctatcatttgctcccctcacattccaactcagaattttcatcttcattggacaatcataatctggcgccctttgccctgtaccgagcctttctgtttaatccccccctcataattaatggagcattccagtctttttaactccctttcaaacttagatttttccaatagctctttactatggattttctcccttctctttctgatttgagacagaaacttcagtatttccttctccaatccctccgtggggaatcccaggaattgactgaattttgccagatcactctcctcccatttatcctcctgcattcctctatctgtttgagtatcacatatggcaccgacctcaagaatccccctttccatagcactgctgctttcctttgctcccacctccctgcatccattgctcctctcaacacagccctcatataccgttagccacattgtattgtcaacccgaaccccctcattccaatccccagaatgaccgaaagactccactcccggagtccgatcaaaattaagagagttgagatgagaaatccccagaacccttttcccccaagaccccagcccctttccatacctcgttgattcctcttccagtgccttatccgtctctgatatcctaaccacgccatttaacttcctcaagtcctcagtctcccacgcaacaaaaggctctagcgcatgagtcatacctggatcaggccccgtcaacagtaggtccttcttctgagagatattctggtcttggcctgctgatgaagaagatgggccctcccttgtatctacacttctaacagactgtgtaccatatccctttgaacttgggcctttgtttgatgtcgagactgggcctgtattggaacagcccacctcatcgggcctacacgacgggcctgcatctggacttaaagccaccccttttaactttaatcccattactccactcttccagcccaggcccaccgtccccttttaacaccttttggctggcatttgaacttaaagggtggactgcaccagattgggtccaagacgggactattgggcctcggccttcattggatccaacccaacccccaacagccctctgcccacccgtcccatctcctgacggatgcaggtcctcgagcctcacgctcacccacccctttgtcactcgcttttccgcgcgtgaggactcctcacccccaacctcactgctacaccggccgtctgcttgtctggaagacctccttatcaccggacggcattcccaccataatgctatctcatagacctcctcttccactacgacttccaaaacactcggacgagcaccacctcttcccctcactaagattctggcccactgtagctcacccaacgtcttcgtttgttcatcggctgtgataaagccaccgcattcgtcccccaccttcttcaaaatctctgggctccaaaacgaaactggaagtccaaataatctcacccaaatctcctttgccttctcctcctctgtccagcacccactcctcggactccaaaaatccaaccctacctggactccttctatcgtgcgatttccagaagaaacaacacgacgcgcctcttccaagtcttcaaagtccagtagaacccttcccttttccattttaaccaaccctaggctacctttaagctcccacgattttgcccaacgctgtcccaacttctcaagatcatcctcttcccctacgttactcctcctgctcgccacaacacagtgttccaacttcttcaacaatcccatcgaatcctctcttttgaccttcactgcgatcgcgtttggattgcccaacaaagcgcgttttgctattgttgcgtatgaattccccccagcaattttccccatagcctttccttcctgggtttttgatctactaacaaaagcacctatcacctctttaatcttgtccgccatggtcatccaccctcgcttttcctttctgcctctcgggacgaagatgcagaagtgtttcctctcaagatcggagacccctagccggatatactcccccgcgttgtttatccctcgtgacatagagaatgttcggccctgttccttccactcccttccccatcctgtttctttctcatccataatacagagtttcagaccttccataaacaaccctagactgtccgcacccaaccgaacccatgactcaacccctccctttttgtacttatgcttggagataggcaaatattttgacatcatctttctttttttcttttttcctttttttttgcatttttatgcctaatttacgatgaacctattttcgaggctatttgtaagacttgaagacatttcatattcacaaaaatcataaagttaagcaagcagaagatttcagactagtgttatcaaaggcgatctcctgggttgcttaggccactaggccaggtggggcagataaaagccacctcttaaaggcctaggcaaggcggcttaaaagaggcaatgcttaggcgattgccttgggataaggtgcaaggcatagaggtggttgctatcaaccatgagttaagattaaacatacttagattgtaatttaattcgatctaatattagatttaataaagtataagatgaaatattatgttattaatcatagtgataatgaaatagagggctatcaatttagtcttgattaaagtgataataattttaatgtagtgatgactatgatgatgatgcccaaaacttttctaggatatttattcttttattttgttttttagatgtctgtaaaattagaatatgcattttggataggatgaatttctctaaacaatatgatgtttcttatgatgtgggatataacatttaacactttattactatttttttaattttataagacactatgaggagtgtaaaattaatagtattgattgttgaagacaacgcttgtattgattaagtatcgaataggcaaaaatatgtgtatattttttattgccttactgtactcatgttatcgccttttgccttaggctaaaaagagtcctatcgccttgacatcacctttttcttttgacaacattgttctagacctttgttaactaggaatgacccatggatactttcttggatcagcatggaaaaaaccatggcttgccttaaagtttcatattaactgaaaggtaagaaggaagtagaagaagatacttcattgtttgaaatatcatcagatgctaggaaaaagttcaggagtcaagacaaaacatgctatcaatcaaatgcagaaacaaatttatcttctgatgatggatagaattgtgaaaatatggatagaagagttcattacttacaaggtatattgcaagctaagtcttggtaggttgtctaaatattgcaggatcatatgccagtagtctttggaatttttcactccatgtcatggcaaagttacagttctttgcagacacagatgaaaactgagatatgtttttaattaagagagagagaggatacaatgaaagacgggaaattcttcgaaacagaatgaaactaacaaagcaacctaattcccattttatttacaccctgtctaaaggtctaatatttttttttataagaaaaaaaatatgtattcaatgtgataataagcacatgagaaggatgaagagtcctccccaaaaatacaaagacaaataaaaaaatatatgactgaactcctcttctatactaaggagacctctgcattggaatactacatgtgaatatacaaataaagcatctcatcacttcatagggtttatctcatctccatccaatagagacctaatcaatgctcctctcgttgctatccatacctttttgttctacacaatgagttccaattgagctaaacaacatcgacaagagtgccttcgaaagtaatggtacaggttgcataaaaagatgaatagaaatgaattaggtctaagtgagtttctgaagtccttcacttgtcctaaaaaatcctacctttcgttttcaccacacatttcaaatcaaggtgaagcaagctgtttgccaaaggactttgcctctttggtactccctaaacccctataagagatagtcaataggtcacatatactacttagggaaacctaatccaaatcagcaagattgaataatctgtgtcatagccccaaaatcagcagataatgtagaaaaagatgatcaaccatctttgcattctctatgcaaaaaatgcaatagtcagtactaaaggttttgtaagatctttcaactataacatgtcattggtgtttactttcttatgcgtcactagccatgcaaagaccttaaactaatatggagctttagatttctgaagaaatttagctgaagagacaggaactggatttggtagatcagataaggctaaggggaaaaaagactttaccgaagataagcctgaaaaggataaaggctacttgttgctatagaatactcctccaatcaaagacgagcaggctgctttaaggggggtgctactgggcctgtaaatttggatccagtttaatgatattgttctcatttacaaattttgaaacctcagtttcacgaagctttgtttgtgaaatggattgtttgaaagatggtagcaattactcttgacgtgaaactgttttcctagttctctgccttgtcagctgtttttttgcatctctgagttcctaaataagtggatcatgtttcacattcatgcatgttacttaagatgaacttaatgtgacttattattagctcagtttgattattatactcatggcatcctcatggaaagcctttttaacccattgatttgcaggttgggtggtgggtaggctgctctgctgattctga

SEQ ID NO: 10449 - DNA, 9511 bp, Vitis vinifera
  Intron number 10 from transcript GSVIVT01036033001 (locus GSVIVG01036033001) derived from phytozome v7.0 (chr-ID chr 4; pos 7626898 to 7636408)
ttcctcgccattatcgtgtaggacttatacaagtggtaagacatttatgaaggaaacaactccaaatattattatgatttaggtattttcttctagtctagatgaaacttttcaacatcgtttgacatcctgctagtgttagaactaccctttaattcatgtgaatgctttgtctatgtaaacaaaataggaaaggaatatattttttgtatttttattctacattcaaaactgtatacacgtcttcctctttatagaggattttctcaacactaaaatagggaacaacttaacaacctaacaatatacaactgtctaacagattacaaaagaacaaatctcctaatatcttgtatatttaaatctcctaatatcttgctaattatctcagccaatcctatctttttcaacactccccctcaagttggcttacagatatcttccatagctagcttgccaattaatctgtcaaactgctttgtaggaattctttttgtaagcatatcagccacttgctcaatagtaggaatatatggcatacatatcagtccattctcgagttttttcttaataaagtgcttgcctacctccacatgctttgtttgatcatgaagtactggattatgagctattgaaatagctgctttgttgtcacaatacagtttcattggtagggtgggtacttgagatcttcaattcttccaatagtcgtctaatccacaacacctcacaaattccaagagcaactgatttgaactcggcctctgcactactcctagccaccacattccctttttttgcttcgccaagtgacaaggttacctccaacaaaggtgtagtaaccagaggttgaacgcctatctagtacactcccaacctaatctgcatttgtaaatgcttcaacctgcaggtgcccatgacctttaaacagtaaaccccttctaggtgacccttttagatatctaaggattctataaatagcatcaaagtgttgttgtctaggtgcatgcatgaattggctcaccatgcttaccgcaaaagcaatatctggatgcgtatgtgacaagtaaatcagcctcctaactagcctttgatattgttctttatccttcacttcatctttggagggcagtaattttatgttgggttcaataggtatctcgactagtttacaacctagttgtcctgtttcaccaagtaaatcaaggacatattaatgttggtttaaaaatataccttctttggatgtagcaaactccattccaaggaagtactttaaggctcccaaatccttgatttcaaattcctctgcaagtcttcttttcaatctctccaactcttctttgtcactgccagtcaaaactatatcatccacataaacaattagaataacaatcttaccatctttattgtgtttgtagaacatagtatggtcagcttggctctgacaatagccacaactctttacagcttttccaaatctctcaaaccaagctctaggagattgtttgagaccatatagggatttttttaatttgcaaactttgtttgatccaagcttctcctcggatccaggtggtaggttcatatatacttcctcctccagatatccatttaggaaggcattttttatgtctaactggtgtaaaggccagttgaaatttatagccaaagataacaaaattctgattgagtttatcttggctacaagagcaaaagtttctttgtaatcaataccataggtttgagtaaatccttttgctattagtcttgccttgtatcgttctatactcccatcaactttacatttcacagtaaagacccacttacaacctacagttcttttcttcttaggtaaatccactaactcccaagtaccacttcttttaagagcattcatctcctccatcattgttactttccaatttggatcatcaagggcttcctgaatgtttcttagaacaaacatgtgtgagatttttgaggtaaaggctttatgagttttagagagttttttataggatagatattgggcaatgggatatttagtgcatgtttgtgtactcaaggtctaaagaagaaatgataggaactgaaggtatgttaggagtaggactacctgtgatatcgggagcttcagttcccgaaggtcaagattggtcattaccaagaggaataggttgactttggctcttttgatgagtctttctccgagtataaaccatacactcagtatttggttgtactgattctccccttgttttagatacaataatgtttggcactatatgactagaatttttgtcagtcttatcacattgttccttaagattataaataagaggtggagtagtagttaaaattgtatttggtaatggattgggagatgagtcccaaaaattttcttccattacatcattctccccctgaagagaatttttgtcaaaaaaagatttatcttcaatgaaagagacatccatactcacatacatttttctggtttggggattatagcatttatacccttttttattagaggcatgctcaatgaaaacacatttttttgcccttggatcaagtttagactgattatgattaggtaggtgaataaaaacaatgcagtcaaaaacttttaggggtaagttagagtacattctagataaaggaaagattttttgaaaacattctagtggtgtgctatacttaagaattttggtagacattcagttaatgagataggaggctatcaaaatagcttttcccaaaagtatcttggaacattcatggaaaacataatatcacgagccacttcaagtaaatgtttattttttcttttaacaattccattttgttgaggggtattcacacaaatagattgatggtggatacctttttctttcaaaaaaactacccaaaaattcattaaaatacttagttccgttatcaatgtgaaaaatgctaatttttacttggaatttagtttcaatcatgttataaaaatttggaaatgttttccaacttttgatttttccttcatcaaataaacccaacataaatgtgtatgatcatttatgaaggtaacaaaccatttttttctagaaatagttgtaatttttaaaggcccccacacattacttttccagaaatagttgtaatttttgaaggtccccacacattactatgtattaaataaaatggttttgagggaacgtaaggttttggataataagtagtacgatgactcttagataaatagcaactttcacaataaaaagatgaacaatcatctttgactggcctatagggcgcctgttgattggcctaattctttatttaacttttttgtgtgggtgggctgtagatgagggtggataaatattttgtatccctctcctttttgtttttagcttataaggcgcatgttgtatacttcctgtatgctttgagtttgcctttagacaccctgtttcttttgatatactattttctatgtttttgcctatcaaaacaataaaaagattaacaatccaatcctttaaacaaagtacgaaacaaatgtttaagatatataaaactagggggtcctagtcttaagtgccaaaacattatttgttcataaacagaaaaagaactaacactactaagaccctgagcccgtttattggagaaaacaccatcaaagtagtaaaggccatctatcaacttagcactgccaatcttctttcttgagttttggtcttgaagctcatagtgagaatcatagaaaaaaacacgacaattagagtttttggtaagtttactcacaaacaaaagattacatgctagttttggaacacggagaacaaatttaagatctatgttctcagataattttaccaagcctttttcggctataggtgagaaactaccatctgcaatcctaattttttcactgccagaacatggtaagtgttgaacaaatttgaaaaactagtcatatggttagaagctccagaatcaattatccatggagtagaattgaaacaacatgaaaaacattaggtgcactacttgtttgtgctagagaaacactaggaatacccaacagagaattggattttaacagtttcagaaggtgattcatctactccttgctgaagggacttgactctgattcattgacagcagcattgaccttgggatttgaacgattgcttctctctccgggcttgctgctctgccaatttgctggtgttccatggattttccagcaagtttctcaagtgtggcgcagtttgttacaataatcgcatcagacccgtggcctttctccaagcccttgctgaaaactggctgctttattggcaaaaccttcaacaacattgagagcagaactttcaacagttccactattagatttctttcccaacattacgtgtcaacgactttttgccctttgaacttcagcaaagacttcgctgattttaggaagaggaactctgccaataatccatcctctaacctcatcaaactctacactgagtccaacacgaaacttataaatcctatgagcctccatagtttgtttgtaatgattagcatcattagtggactttcattcgtagttgttgaacagatccaaatcctgccaaagaagtttcaacgaattgaagtactaggtgacagatttttctccctgccgaatctcaccaagtttaagggtcagttcatacacttgggattgattacccaaatcagagtacatttgattcacgttgtcccacaattctttggttgtggagtagcacatataattggagccaatctcctcattcatggagttcacaagccatgtcatcaccattgaattttctgcatcccaggtagtgtacaaaggatcctctgatgccggtgccaccttgtctccagtcaagtacccgatcttccctctccctctaagatacatgcgaactgattgagaccaccttaaaaaattgtcaccattgaggcgaatggtggtaatctgaacaggatgggatttgatattatgggtttgggttgcaggtttagttgctgggctggaaaaggaaacaagtgggtttgacttagacgttagacatggctattggttaggaaaagaaatacacaaaaagaaaaaaaaaatctcaagggttttttttgggtgaattagggcagctatgataccatgtaaacagaataggaaaggaatatattttttgtatttttattctatattcaaaactgtatacacggctgcctctttatagaggattttctcaacactaaaataggaaacaacttaacaacctaacaatatacagctgtctaacagattacaaaggaataaatctcctaatatcttgtacatttaaatctcctaatatcttgctaattatctcagctgatcctatctttttcaacagtctatgtacatttcaaaatgtttgtgttataggatgagagatttgtttttgaaaattgcagccatattttaagtcagtatcacctagcatgcaccatgtgggtactactatcaaatctatcagttattggctgaaaaaaggttctagagtcactttttctttctcaaataagtgattactcccatatgctccatacttccaataagaaagaaagttttagatagtttgatttatgttctgtgagtaaaaatcatgttgagattttacttcttgcctttgcctttggtatgggatatggacatgtacgttgtatgtccaggtgaaaacaaattgttgattttctgcccttcatatggtagctgatgttgagaaaacaatgtcttctttttgtgtatatgtttttttataaataacaactatacaatcaatctaatcactgtgattgcctcatgaagaaatggcaagcatcttgtagcaggttccaattatcatgattattgggcataacaaaacacaaaagttcaagcatgcagaaacacaggatcaataaaatatagtgcttttaacgaaacctaaaagctactggtaaaaaataatcactaaatatttggaagaaagtgagacataaagctgttaggagatggatctttttatcagcatatcacagttagaaatagatagaggatgctaaaagaaaagcacaaaaaaggttcacaagtgacactaagaacaagaagaaaaagatgaagaaatggcaaacatcttgtagcaggttccaattatcatgattgttgggaatatcaaaacacaaaagttcaagcatgaagaaacacgggatcaataaaatatagtgcttttaactggtaaaaaataatcactaaatatttagaagatagtgagccataaagctgttaggagatgcatctttttatcagcacatcacagttagaaatagatagaggatgctaaaagaaaagcataaaaaaggttcacaagtgacactaagaagaagaaaaaatgaagaaatggcaagcatcttgtagcaggttccaattatcatgattgttgggaataaccaaacacaaaagttcaagcatgcagaaacatgggatcaataaaatatagtgcttttaacaggtaaaaaataatcaccaagtatttagaagatagtgagccataaagctgttaggagatgcagctttttatcagcatatcacagttagaaatagatagaggatgctaaaagaaaagcacaaaaaaggtacacaagttgcactaagaagaagaagaagaagaagaagaagaagaagaagaagaaaatgaggaaatgctagcattaagtttggggcaaaattattattttgagaagtaattatacaatgaactaatcaacttgagaagaaagttatgtgtttaagcagttcccaaataacatgttctattactgggtggaaaaacagtctattttgtttgaccaaaaactgcagcaagaatgcctattgatggatttgaaggttttgttaatttggtttagaatccattaggtttttatttttaaatttattttttatttttaagaagaagaagtgctagcataagtttggggcaaaattatgctagcatcaatttgtgctctgttagtcttatctttcaaatgtcggagtggggggcctaaagaaagttgaggatttgcattatatatataacaggtgttaaaagtttcaaactgtagcatccccttttctttcaatgatcattccatttctttgtatcatgtaagacatctctaacatgtgaccaaacaatacatattatagcttagtacaacattcctatttggaaaccacattttgtagcaacagtcctcagtcaaccttaggctgtttaacttgttgaaaagaatctttatatatcataagtaataatctgcaaaatagtaatattatcaactttgaatgccacttttcaatgtctgaactgcattttagttattgatttgtttgtctactttttaggctgagattagcagtatgagctctctttgccaaccaaaactaaaacttaaatctctgttttgctataaaagaagcatgtaaagaagtggttaaagatcaatgatgtcataggattatgcctcttaatattttcatcaaattggagtcatttgatttgtaacatttttcttaatggggtctcaggtcattgatgtaatagaattttaccaattatttaactgagattttgtttcatgccttgcatgggaaacatatcatcttttcaacatatgtttcccatatgctgcaatgaatgtgcatataatcccaaaggcctctgtctatatagtattctctgtatatatggtattttctttttctttactaacatttttaaagatgtccatgcattaaatggataatgtgcactattttttttttttttttgactctagaacattatattgaagatctttgtactaaagcctgaaactgttgctctaactgtgggttagatggaagttggattctcatggtaccctcaaattttttttgataagcgaacagaaaaatgatagaagccacctaacaaaaaaaggggtgcaccctatgtacaaaaggtatatacaggaggcaccaaaggaaaagaaaaccaaatcacccactaaaaactgcaaagctatatccagtcatgcataatttagtctgtcaatgaaattcagcaatatacatttttcgaatcccaatggggccctagctcactcgacagggatttgatgacatgtctactttaaactttgattgaaagcccttcctctttgaagtccagtcctttctttaaaaaaataaaaaaaaaataaaaacaaaaaaatcgcaaacaaaacatattcaaattaaaaggtatagaagtataagtgaaggatgagaagtccttcctagatttacaaaatctgataaaaaaacagcagtggagaaaactactccctttagctttgttcctgtacttgctattttaacctttttgatctacattgtgaaatccaatcgagttgtataaagatgagatgaaggcccttgaagctatagtagctgaggcccaaaaagaggaaaagaaatagattagatctcatatcatctctgaagtcctgcacttgttctcaaagattcttacatttctttcctgccatattaaattagagttagacaagcaatttgagataggactttttctctgctgcttattcgaacttcaaacaaaaagagctttctaattgattgtggaaaaaacctgtcagagtctagatattgccagtaacatatcccacaactatttggtcctataacagttaaaaacttaaaatctgatttgctcattcttcactagctttacaaagatttcatttgtcgaccatctcctcataagatgatcatgataccccttaaattagttttattgttcccaaaattatgattgatgtgattcaaaatgtaactgattcctgcccggtcaatccgaatgaccttgacaccaagagatgagcaccactggatggagaatatatatatatttgattcttaagtaaaatagacaaatgatacagcttatgatttatggaaatttctagcatgcattggtaattcaatgttctaggtcatggctacttgctcctttcttcctatccatgccgactagtttttcaatcaaccgcacttacctttagagctggaacggaaggacatattgattctctgacctaaaccaactatccgaaaagtgcctacgcccttcccgaaagaaagagggaattcctgatcttctcaagaatcattagtggacccaattagtgggtgtatggtctgatatctttcagtactgttaacttgaaactgtgtaattataccttctttttcattttttatatcatgctaaaactctagatgttgcctcatattgtactttcttgttatgctgccaccttttggtttagttttatgccgactattgcattgcaatttgcatgtggttgtgtatttgttgatgagttattgtttctttcagcttgtgcactttgttaatcgtgactctctgggttt

SEQ ID NO: 10450 - DNA, 4479 bp, Vitis vinifera
  Intron number 3 from transcript GSVIVT01034134001 (locus G SVIVG01034134001) derived from phytozome v7.0 (chr-ID chr8 ; pos 14916691 to 14921169 reverse strand)
acagtgttcgagagatcctcaagaaggcacaaccagtcttgagcttccgatgataacaatggaattatatgatggtgattgctcttttgcatgtggtgaaattcttgttgttttaaatgtctatgttccctacctgaatcttattgttgtaatcattctaaaggaggaacacatgtgaaaatgtatgatttactctctgtagataatgacacttaaaaagaaaggatgatttcgaatttaatatatatcaatcagaatggaaatttcaactgttatcagatttgtttttgcatgcatggagaacactatgctgttagctgtgcatttcaaggttatgaaggcattaaaaaatttgatggtttttcagaaggaaaatttccaatttaaaatgtcaaggagaatacaaagttcaaccgttatcagatttatttttgcataatgcagaacactctatgctgttggcggtgcatttagagttggtcatcaaagtttatgaaaatagaaaaattgatgttgtccatttcccctatatgtaacttgttggtagcagttgggcacttatattttcagttactctggaaagtttctaagttgtttgggtttgttttttatacatggaggaagaagattttgcagtttgctatgcagttagaggtgactaccaaaagttatgaaggtataattgcttgcttaccacagcacatgaattagtctctaaagcattgtagtaaatatttctttttgttcactaatgaatgcttatcattttctcatttacataatttgtttgcaccagttgggtgtgtttattttcagtttctatggaaaagttttaagttgttccattccatcattccatgtaacatggttgctttctctttgtttcagcagtcttccatttcttttggatgttcaactcaaaagtactagtctctgaattactgtgggtctaccagataggtcgtgtatccctattaaattccttgcacctgtgattagttccttataattgaaaatttctatccaaccattcatccatggattaaaaactcataatagaaaatcgttcttaatgtatcacataaaggatgcaggaatcaccccaacaaatgtggagtttatatccgaccttttgtcccaaattaaaagattaacagatcaggcattaaatgaatttacactttcaacatgttacttgtttagatgtgctgaagtgcattcacgttatgaaaggttatgcaatcaccttaagtcatttactcatcagtgtgtgttattttgcttatttgtttttgtcttagcataaaggtctttaatgagtttgtgtgttcttaaagctttacaatatttgtttgaaatggtctactacacagtatagttcagtttcttgtagactctagttcaaatttcctaggtcaagtttccaaacctaatcctaccctaattctttctgataagaagtcctaccagaaatatgaagttaagtgtttcgggaatttctccatagcagaaaactgaaaataaagttgatcaaccatgagaaaagttagggcctgtgatatttttggagagtgttgcaataggtttggtttctttcaacccatccatgcagcaagaattcacaacataagatgatattgtgctttttttcactctgaaatatcaatattttctcagaatattccaggaaatgaagacatctttgttgtattcaggctaagatctgtttatgaatgtacaggtagattacaaactggtgaggtaagacactgatttgttattttgattactacatgctatagctgttttatgtctaactggtgtgcacaagttggcttgtttagtgtgtaatctttagtcttttggaatggtgcttggattatttgttgttgataccccatatctagcaataagacataaataaataatgtggaatatgttccttacaagagcttcccttttgacaaggggaaattgatgatgatcaatctccaagatttccttaagaaaggaatgaaaggaaataaagaaaacctaaatgactctatcaaaggtagttaggtaatattacggtctttcaggtttctagagtcataattagttagtagttagtatttaatttgcatttagaatttgggattattggatttttaaaaattttctttttatatttctaagctttctattttgtaatacattattattattattattgttgttgttgttgttgttgttgttgttattgttgttattattttaatttttaagggtttttttagtccttttgagaatgcagaagtcttctttattagaaacattagcaaaaaataaacttaaagaacacttggaagatcatgcttggtggttacattttgtaacaagtttacaagattatggtgggcgaactaaattctagtgggagaaaagggggagggagatttggttgaatgaaagaggcattccatttgtacagtggcagatttatgagtaaaagagggaagtggagatcattggaaggtgcaatttagaagattctttcaaaattaggaaatagaggtggggacttcatcaatggatcttatttgttctgtgagagtgcaagaagcaagagaggatgatttactatgggaggagaataggaggagaagattcagtgtaaagttgtactacattttcttatgtgctaagactaaagtggtgttcctagcaaaagaactttggggtcttgagttcctttgagaaaatgtttttttccttaggaagtagcatgtgaaagattttaactattgattttctaacgaagagagggtggaggatggttaatagatgtagtctttgtaaagatagtgaagaattagttgattacatcttgatacattatgataggaaaaaagggttatggatgtttctattagcagtctttgctttgaaataggcgtttccaacttcaatttgaaatttcctgcttagttgatagtttaaggggtttgataagagaaggaaggtttgatgcatgacaccctaattgtggaaagagcctaattgaacgattttcaataaagaacttttagatcaaatagtgaaggagaacttcattaaatccctattggaatgttcccacattttgctagaaacgaagaattgcataatgttggatttcttagatagcagtaattgcagatagattttgtttttcttttttctttttatgaatattgcttatgtatatgctttttggtgggctccttttgaaggttttgcataccatctatttgtagaagtgacaattcatattagtgggtcatgttcgtgttgtatcaaagcctagacattctactacatagttcaaacccaaactcaactcggataataattatattaaaaacataaacctaaatattacctaattattaaatcggcaatacatcatgtaacacatttaataattagatgctcctatttaataattagattattaggttgagttaggtcttgtataattctatataattgatgtttcaaccaaacatgtttatgactcaattgccctatttatttaaaaacaaatttacaatgagtcaaatatgagttaaatagtttaaagttataattaggttaatcaataggattattaaattagtcaatttgagtcaaattcgtgttatgcaagttcacccaaaaactacctatttattaaaacagtcatgtaggttgacacgaatttttcctgaactctgattatactcgacttaaacctgagaaaaacattttaggtttgagttgtattggtaaattgtatcaaactttgctaccccacctacctatataccccctccattcggtgctctttaatgaatgttttgtttatctttcaaaagaaaaagaaaaaaaaagtttgcaagattctaatgaaaagctctatgttttgcattatcaattcgcttgtgtaggtcaataatgaaagaaagggtggaagacatcactcatgatttcaattgattacggaaagtcactaaaacttggggttgagtttttttccaagttaaggggagttgatgtgatgaatctccaagatctacttaaaaaagaaataaaagaaagtaaagaaaacctaaattactctatcaaggatatttaagtgattatgttgtttttttgggttctatagagtgataattagttaataattttttttgagttgcatttagaatttgggaaattttttattagaaaatcctccttaaaaaaagtttttatatttccaaagttttctattctttaaaatatatatttttctaaagttcttatttgagcctttttttagaattcagaagtctttatcacaaactttaatgacaagaagtttctataaagttaaaagttctaattttaaaaagaaagtttttattttcttttaattattatttttgaatgatttaatcttttgggaaagggataagagtcctaataagttattgt

SEQ ID NO: 10451 - DNA, 24615 bp, Vitis vinifera
  Intron number 2 from transcript GSVIVT01011300001 (locus G SVIVG01011300001) derived from phytozome v7.0 (chr-ID chr1 5; pos 8056706 to 8081320)
gcagcaggaaagctctttgagtattcaagctcaaggttagttttctcatctctcccattccttctttttatacatagatatatgaatctcagtgcattttgcaggcaatcctagtaccctttctttatttgttcgcaatttttttttttatcaagctcaaaccctagttggcctatgcatttggaaaagcatcatcaaatctaataaacaaatggataccctcccaaatgcacactaatgtctgaattgttttgtcagagtggagagtattctactattttacactgtgttatgttacgtataaaaaattaagttcaacatcattctctatgatgtagctgcttgttatggtgattgtgctatcctgattgtcttctgcttagcttaatttcccctcatgttttatatatcattttctcagctggtttcccaagatcacctgacagaaaagagaagaaaatgtaacctcagaagcatttttttcccactccattggagcaatcaaagctttacaaccaagaaataataatgtataattttctttcctagatatacacattggaaaataactatgcatggtacgttttctgtgaaatattatttagcttagggcagtgtttgatccattgttcttgggttcatttgaaggctcaaactttttcagatctttcagttttccttacacagtggttctatttcttgcctactgtaagcatgtgataatatatgatttgtgaatcacatgcatgtactgtagtactattagatatgatactctagtgaagtatgagctatgaattaatattccttaataattaatcataatcaataattgaggtttcttcttgcttttaattaaattaggcatatatctaattatcctagactgaagatatggttttttttttttctaactatcatctttgtgttttgtatattgtccttcattttgacaaggtgctggttttcttcctactgacaatcattaagatgattttgtaaggaataagagggattagggagacagatggagcttgaaagagcatcctttgttgggtagatgtcacagaataattagttggctaagcttaggtttgaattggtcccatgattagcttgggtttgacttgactttaagaaacctattatttttgtatgaacctaatccgagtttgagcactgtgagaggtaaaagcttgggaaatcaatgccatattagatactgtagggctttgaaaaaggagttttacatccaaggtgatctaccacatggagaagagatatatacatttatgaacatttacatacagttctctcagcttttgatctatgaacttttgtttttgtaaaggtagtcagtctccttacaaaacagaaagtactacaaatgctcaacagtgagattacaacatatcattgcattaaatctcattacttcattgtactaccttggattgctttgaaactaggatgtatgaaaaatactgaaaatagcttcaaaatttggccacacatgcatggaaaaatcattccaaaacaaaatcagacagtaagtactgcatatatccaattacatgcatttttgttgtgtgtatatatagattggagtgtgctaaaagcctaggtgccatttgtgaagtttaatttcttgtcttttctcatttggttgatttagcagagaagatcggtgaaggtaacaggaagtttgaagctttcctgttgtttagttgatgagtgaagagattcagaaaagaagttcaactcaaatttgaagggaaaattttccctagacaatttaagcaccatagttaattagcataaggtatatatgcagaaatgcctgcttacacaaacaaagaaaaataaaggaataatctcctctttctttgtttttgttcctctttcattttccttttctttcccttatttagttatgaaccaaaattttcaaacaatgacaaatattttcatttagattataagaaatttatacaaaaggacaacatagagtactaccattctgtaaactgtattgagaaactatatagaccatcaaaatcatgtgtgtacagccctctaacaactgatgattaacgagcttgcaaacagtctctaataaataatcataaagttcttgagaaaataacttggtaatagttttatgattttaatcattaagcttctagcaatcactttgtattgaagcatacagctattgcaggaaacctcaaatccagaaaatcatgccaagcttggctgattctgttacctgaccagtcacaaagtcattctcaaaatccataaaatcatgccaaacttggctgcttctgttatctgatcagtcattaagtcattacagcctctgacttccatttcaatatttatcccaaagggcttcatcacttgtatgtcattgtagccaaaactatgcataccctaccttcattttctgttcttgtagtttactcatcttaatttcttctcctaaaccaatgctttggattctaaccccaaaatttcttcattctcccttgccttgaaaaatatttctcagtcacatctccatcaaacttgaatagcatatccacatagtttagagtgatggcatcaagaaaatcttttgagaacatatctaatgtacagcctccttttcaccattgccaactacattgccaacatatttcatcgaatcaatcaacaaacgacttgataaaaattagtttgtgaagagttgcatgaacttgatctagagtacttgggaactcaaataccttcagcatccctatggcaaaagaggtaatcaattagtcgtcctttcagctgttataccaacaatccgtagcctcgaaaccctctctttataataaattagaaaatctgatgaaaggggatgatgctggccttcaactttcaactttgccgttattcggtaacaatcattcatgcttgctcttccaaatgttgtttttgttggcagctcaaacctactagatatattccaaaacatacatgtgataacagctattttgctgaaagctcttctacatgatcttttgttaagtattgccaatccaaaactcctacactaaggcaaccgctctttatcttttctgacttattacactttttagagcattaagaagtaattagcatgctgcgtgtctttgttcttattacaaacttctttgcttacccagaaaactttgacctgatagctgttaacaacaaaagaaggggttccttttctgcatctattaaaatttcagttgccttttgaaactcttaaaataccatatagatgcaaaaagggacactactactgtcacatgtgaatcagttgatggagtagccacttgtcacaattatccaacatttcatagagaagttatttgaaaaaatgtcataaaattaggcatggcaccacaattgttgtctttcaccatccgtattcaaaaattacattgtagatattaacacttaacaaggcagaaacttgtaacagcaaaaatatagaaactcctattaataaaatatagaaatcttttagtactcaactacttaaatatagaaactaaatcaactactcgaaataaaatgttttctttgacttttagaaagtaaatctaattaagatatttagaagcttcctaaatcaagtttaactttccaacatgctcccttaaacttgatttataattccaagtaagatccttagtcttctaaaatttttaaacttgagaagatttgtaacatatccacaatttgatcttaaaactttgaaaattttaattgcacttcatctttcactaaaataatatcttgtattgatgagcttgcttcaatcatggaaattaggatttttttgtacattgcaataaatgatttcttgttcacataatcaatgccttgttattgctcatgactcttagccaccaatttttctttgtatctatctacttctccctttacattcttctgtctattatattcatctaatttgcctttttcccttttggaagaggtattatttctcattgacattcgtctttattgtttatattttctcatccatagcctcttttcatcttttattttgaattattttttcaaaacatattggttcacaatttgcaaaaagacaaaagaggattagattgttttgattttttgttacttcaaatctcttgtaaacttccaaaatgcgttttcctttcgtttgagtttttcaatgaaggcgctattgttagaacttcaatgatagaggtgttgatgaaggaggagtgacaatctcttgcaagctttctctaatttattcttcttcttcatagaggggaggaatatcgtagttatcttcttgagcaccctaattttatgtttcattttcattaaacatgatatctcaactaataataatatttccattgtttggattgtataacatgtagtctttggagctttagtcataatcaatgaaaatgttttttcactcttgtcatttgatgtaagttgcttttgatctagaacatgagcatatgcaataccttcaaactctctcaaatgtgaaatactcgactttctttcatttcaagcttgttatgatgttttattccttacacttcaattaggaaaatgatttaataaataaaccactttagtgtaaaattctttagtcatcttcttatttttcattcaactacatcactttgttgtggagattatggaaccgttaaaggttgacaaatctcatgattttcacaatattcttcaaattcttttaatgtcaatttaactcctttatcacatctcaatgtctttatattatagtcactttccttttctacaagtgttttaaattccttaaaagcattaaatacttaagatttttccttgaaaaaatgtactcatgtttttcttctaaaatcattaataaaaagtaaaaaaatgtttcttcttaccaaaagtgtttggatgaattgggtccatacatctaatgaatgagctttgaggtccttttctcatcattgcttcctttgaaaaacctttttagggacgttttccaagtaagcatccttcacctaattgattcaggtgatatattgaggtcaatcctttcactatattttccttgttcaacaattttaaacctccaaaattagattttcaaatcttaagtatcaaattctagaagaatcattgacataggattttagatattttacatcattttgaatgtttaataaaaatattttatttttttaaatcatagacacattcataattaaattggcatgttgatttcttatcgagagactttgatttttcacatgaatattatattcatttttgaaagagttgacctaaacttagtatattatttttcatgttgggcacatggtaaacatttgagataaattgatgttttttatgtttcaaacgaattaagattttatctttactgtttaccaaaattttggatgcatctccaaaataaacatggcaactttttgattcattaagttccgcaaacatatttttgaatccacgcttatgattgtttgctctgatgtcaagatatcatgtgtttttctcctcactttctcttttatatgccaataatacaatagcttcttgttgatttttcttttcaatatagttgatttgcctttccttattgttagtggcacttctatattcataagcataatgaccttattttttatcattataacattgaatttcggatttatcatactattgcctttcattttatcttgagtattctctctcgaggaatatgagttttggtttgttccttcatgtttgatgaattgaaaccatctcttcctctattgccttgatcatgtccacatcacgtccacaattattttgacttcttttattaatattttcttcatgctcttttattgaattcttttattaagagttgatataaacttaatatattatttttcttgttaggcacatggtaaatatttgagataaattgatatcttctattttcaaatgaattaaaattttatctttaccttttattgaaattttggatgcatctccaaaagttggtcactttctgattcattaaattccacaaatctatttttgaatccacacgtatgattgtttgctttaatgtcaagatactatgtgtttttcttctcattttctctttaatatgccaacaatacagtaggttcttcttgatttttcttttcaacatggttggcttgcccttccttattgttagtggcacttttatatttataagtattatgaacatattttttgttattacagttataatattaaatttaggacttataatatcttctcatctcatttgtcttgagttgtgccatctttcactcccttttaagcgatatgagttttggtttgttcctttattgtttgatgaattgaaaccatctcttcctcaattgccttgaccacatccacaactacgtccatgattattttgacttcttttattaaaatttacttcattctcttttattataagttttttttggagaacctggtctaatttttcttggttcttctttttcaatctctcttcataggcttgtaatgatattataagttgatcaatggtcatagaatctaaatctttagattcttcaatggccataataattttttttttttttttgatagataaacgcacagaaatatattaataaggggcataaaaggcgacccagagtatacagggagtatacaagcatcacctacaaaaaaaaccagaaacaaaaaggacaaacccttaccaaccctcaacaagaacccacccagtccacaaaattaaacaaggaaaaggggccttcaactatggaagaattagcccaagataagagattacacatgaaggaatttttcaatctttgaattgataggacttcattttcaaaaactatcctatttctttccttccaaaccgtccaaaataagcaaagaggagctgccctccaaaccttactacgcttcttatcctttaagggagcaagccaacctaaaagagtgtctctaaccgaaaaagggataacccaattaacaccaaataaggagaacaagagatcccacaagaccttcgccttagaacagtgaataaggatgtgatttatcttctcttcttcatcacaacacaaggggcacctgttagctaatttccagcccctcctctttagttggtcttgagttagcaccttcccccaagaggcttcccaagcaaaaaagcccaccttggtaggaacaaacgaactccaaataattctccaaggaaacaggactgcactgctgtggtcaagagaattgaaacaggattttacagagaaaattccctccttcgtctccttccacaccatccaatcctccaaatcagcattcaacctctttccttgaatgatcagaaggaaactctccacctcctccacctcccaatcattgaaaggtctaaggaagcggggattccacccgcccacttcccccattgagtcccaacagtccgcaaccttcgcgtctttagaaaccgctaattcaaacaaggagggataggcctcacaaagaggagtgttcccgtaccaattatctttccaaaacctcacccttttaccatcccccaccgaaaaagaaacattgttgagcaacaacaacccttccttgctgatttctttccaaagccccaccccatagccctccctacccccgcaagtgcaccaacctccactaccaaccccaaacttcgtgccaattataagcttccaataggattccctttcgaccgcaaaccgccaactccatttgcacaaaagggccctattgagaatagtgaggtctctaatccccaacccacccttctttttatgagaacaaacaataccccattttattaggtgtggcttcttctccaacgcaccccctccccaaaggaaatccctttgaattttctcaagccttaatttaaccactcttggcatacgcattaaggacatgaggtaggttggcatgctcgccaaagtgctccgaataagagtgattcttccacccttcgaaatgaattgcctcttccataaggctagcctcttgcgcatcctctcttccattccgtcccaaaccatcaccgacttatgcgaagcacccaaagggagccccaaataggtagaaggaagagatcccactttgcagcccaattcagcagctagtaattcagcgttctccactctacccaccggcaaaatttcacttttgttcagattaatgcgcaatccagagatggcttcaaaccacaagagtaaccaacttaaaaaggccaattgctcaatggccataataatatatatgatcaaacttcaaatctaaagattaaggtattttttcaatcacacgaatgtcgtttaaactttcactttaattttccttttaataaatttacaatagtcaatactttagaaaaaataattggagattaattatgatactttcatgtacaaacctttaagttctcctttagcaatttgagcacaaacttttcacacttatcaactatattttgtaacatctctcttgcttctttggagatgcttatacttaaaatcttcttagaagtaactttatccattgcttcatagatgatggtgagagctttcttgtctctctttcttatatttttcaaaaaattcatttgatttagggatagagtggtttcatttgatgactctttgtaacttttctccacaacctcccatacatcttgtaaaccaaacaaaactttcatcttgatactctaattatcttaattgttttttatgaggtgggggcttgaaacggatatattccactagctatcttttttgtatgactgataccagtctcttgaagtaatagtgttgaaagagaaaaacaaacaattacataaaggaagataaaaaatcaaggagaattacaaatttaccgccttctaccacttttgtttaaatgttacataaccttttgtttatatatactcaagtttaacaaaataaaaactccaaataataaaaatataaaatttctaaataaaaataaaaaccttttaagattcaactacttaaatataaaaaccaaatcaatcactaaaattaaaactttctttttaactttcagaatctaaatctaattttagcttttagaaacttcttaaatcaaatttaactttcttacactactttggcatgtgaattagttgatgcagtagccacttgtgacaattatctaagatttcatagagaagttatttgaaaaaatgtcacaagaattaggcatggcaccacaattgtttgtctaaacattcttatacagaatgagtattcaatccatgaggaaaggtgataattaagaagctttttctggtctattaattttctactaaaagtgctaatcttattcattgtggaacctggggggcaccccttatgatatgtattgtttttaatattgtatcattttattgaacaatattactcatacatctcttggtttcatccactggaagacacaattcagatgcttccacatgcttttgttgtttaaacacaaaggctgaaagcatcttttgcaaatccttttcaagatgatggtgctgtgaactattgctctttcattgcatgtgaaattccttatcccattttgcatttgtcctatgggtactgcccatgctgcgctttaaggtgtctgctaattaccatgtcttcatgttatggctcctactgcttttattctttaaactgatgagtctcatgagatgttataatttggttccatgttcacattttcaatttggattaaattaattctaaataaaattttgtcttctcttaatcataatttccaatttgtctgattttatttattattatttttaattgcttattgaaggagagaaattatgctttgcttaattcttatttgacttcccaaaaaatttaattaattaaatcgaatattcacataattgatttgtgcaaatagtgtgaataatgctattttagtgagaccaagtacataaatgagttcatatatagtggatttatttcattacaaagaggctagtatgttaatattttgagttctattaattaaagcatctaaaaaaaaaaggtgttcaatcttatataatggcattcacttttcatctatctcaccaaagataatgtagtgtagatctatgtgtagaagaatatgattaaatttggatggcattacatgtaatttatatgatttaaatgcttatgcttggggataaaaatattcgcagttgttctaatattttataatttacatctatctcaccatgatttatatgagctagggttttatgtgatacttgaatttgaatctataatagaaataaaaatattttctatttaacattccttaaaattacctcggtcagattgtagaaataccctatcttctatttaacactcatgcatgatcattctgaacaatgattagtaatttgcgggggctctctgctatcactcttgttgttagccccctcaccagtaggccacaagacaggttgtaagccaaaggctatttttctatcaaacatactatatactccttttgcatttctgttcatttgtatgattaacccacagcttgtatttcctggatgatgtcttccatgcatgatttgaatttcaagaccatcctttgtattaaaataacattgatgtttgtcctagctcatccttggatgaaaatattttgtctggatgcagatgaatatatatccctccaggcctcaattctacagaaaccttcaatttagttgttaccccttctatagttcttgatgggcacttccacaaacaccacttacttcactgtgaatcaaacgttgagcccttccagttttgatcaagcgtctcaacttattacagaagtttgcaatgactcatcttggagacataacctttttcccttggggattggaggtctagctcttttggtgatcctatttcatcccaaaccaagtacaccaactaagtcagatgaacttgccaacataaaatgcccccagacaaatgttatttcataaaacatcaagcttgcttatgttgaccactttttaagatttgtatttactgctaccatttgttagagtatcagactgacacttgcaaagattgcatgcaaactaactacttgtacatatgctttgacattgtcaaggaagtcatagttagttccataacaagtgtacattaagacctgtagctgttagagacttatcttttgtcccaacagattagataaatgtcaaagtgatcacatgtgtatcttccaatattatcttcttaatttgtacttgcttttgatattcttgttcaaattttctgtaggaaattgtaatagcccatctaaatatgatgtttgttttttattgtaaatgttgtatgtttttgaggatgtgaaaattgtctataacatcatagcaaggtttattgaatttttttgaagttttgaatggagaattgagttttttggttgtatgcctaaaatttgtttattacatcaagaaaaggttaaggttgtcagcaatttcttctcttaacaggcctcttaatggagaattgaattgtttcctacataagtgcttgccgagacatgacttgtgtcactactagtcttttgtatgtataatgaaccttagtaaccttaggttaatcagaagaatatgtactgcaaaaagatcacattacttcagtcaatgtagttggctgtactggtagcacaagtccaccatcatttttgatcttttaacttatagatggaatcatctccaaaacctagcctgcagcaatgaactcttacatgcaaacaaattagttttcacactttggtataaagagtcttttaatagaacatatagacaagggctggataggacctttgctgaacaattttttcatgcattattcataagtaaactacaattaagagaagagctgcaatgagatagcactaaaacacatgctgggaagcttcaagggtttttttttagctatattctggcctctaaactcaaagccttggagatggacctaaaagcttggaacaaagaggtttttggtagtttcatagttaggaaggaattgatgttttttgaattgaaaggagaggtaagctacgcgctttgttgaagaggatgaggctagaagggtggtagtggaagaataagctggctatgctgggaaaaaaagaaaaagaaaaaaacttctcataggtagaagtctggagagtttggttgaaggaggagaatagaaagaccaaatttttccccaaaatggctgatgttcacagaggaagcaattatatgactagaacaagagtgaatggtttttggctcatagaggatggtgaaattaaggaggtgtctaattcctttcaaagtctcttatctaatctagggaattagggacctagtatcaatgggacgtccttcgatactttatggatagaggattcaaggggttatagctgtcttttcatgatcaaataaagatgccttctttcactttatcctagttgtttagggataaatctcctgtgctacaagagagatttcacaaaagactagctatgcataaacaaaaattcttatctagcatgctaatttacttatgtcatagtttgaaattccaagaaaggtaagttgagacttgggaaaattcaaagagattttctttgaaaaggaggagcccttgagaaaaagtcacttgataaaatagtcgattgcttgcatgaaaaggaggatagactcaaaatcaaacatatttgtccttagcaagactcttcctagtgagtggagctcgtagtttacttcagaaatagagcccatatggagatgagttattattaggaagtctaggaagaagttggttgtttgtattcatgtaaagtgagggatgagtttgaagtagggttatagaaggcaattaggacgagtaggatattttaaaaatacaacttgttttattgcggagtattagaaggatatgtggtgtggtgattcagctttgagcccttattttttctcactatatcccataaccaactcaaatgattcatggatttcaggtatgtggagatgttgaagaatttgttgcttgaaataattccatgattgaaagttgggaaagtatcaaagacatttattttggtcttacaacggagatcaatttgaagggatagtgagaaaaaggtcgttgggataaattcaaagagcagaaaattctcaatcaaagcctcatattctttttttgagtttaaggcaaaatagagttttcatattaaatagtttggaattctaaggttcagatgaaaatagggttcttcaattaggaaatagcttgggggaagattgtgacctaggatcaataaaaaaaataaaagacaagggaccttaattagaataagttttatctttgccaatatgaagaaaaatcattttatcacaatctcattcaatgtattgaaccaagattcttatgaaaactcgtattctctttattgggcagaaagtagttgttgccttctcttgtaagagagattgatcttttaaatcggtatagaacttttctagggaagaagcaaatgaaggcatggagggctgcaatttttgtgcttaatttggacattttgaaaggagagaaagcaaattatttgaaagtgtggatccaatgaaccaagctcacaaactctaattttttttctacccttttactctaggcaagaaagtacaagaaagcttatagatgagactttattgtctatgataaattttgttgattgatttgttacttagcaaatggagtagggtttttttttggcaccattgtatttgtcttatttactaaatgttgttattaattttttcttttttattagcatagaggagcacaaaggaaaaatgcatgggaagatctgtgaaagaggccttaagttttcttcatggatcagattttgagggaaaggtctgttcctattgttagaaggggttgagtcatgctgtgggctaaaggaatatcgatttggaagcagccctgtgtgtttgaaaaaattgaaacatcctaaggatctttgaaccattcccattctgggaaagaactgtgagtaagaagttccaaggatgccggtatcctcccttgaaggtaggtgctggttcggtgtcgagttgaagacgtttgagattagcatagaggagcacaaagaaaaagtgcatgggaagatctgtgaaagaggccctaagttttcttcatggatcaaatttggagggaaaggtttgtccctattgttagaaggggttgagtcatgtcgtgggctaaaggaaagaactcatttcaggaagttttggtcgaaaggaaatagaggctacagtctggagctccgtaggaataatgcagggagattcttgttttgcgttgtaagagatgtagagaacaagagattctccttggctttccctgaaggaagatagcttgtaagaggatggaaagttcttgctagtaagctgagaagcttgggagtctctcccttgcagtggaatggagctctgatggaaaaccacactcctgctcaagcccttagtagtagtataatcagagactcttcttctctgcgggattgtcccgcgcctcgtgacgtcgtctggataaaagctgagaaagaagcactcgatagaaatgaggagttgttgggtaggtgccttgtgggcttttgggagggagactctgatcatctccttgaccttgcttccttcgggtcgtgggcaaaaagctcttggttcttggaagggacctttggctatcaaatgtgagagaaaatctcttacttctggaattcgaatttgcggatgaagtagagagggtgtttcaatcaagagcgagacgcttcagaggaagaagcttctgcctagaaaagtggaagccttctgtgggttgttttgagggagacttagggaacctgtgccttgtttgggtcagaattcttggcctccctctgcatctttggggaagaagtctcttcagaaagtttggagactcttgcaggaggttcatggctgtggacgaaaacacagcctagcgtcggaaccttaagtgggccagaatcctcgttgaaatcagagggtgggagcacccaagttcgctgcaggttgtagctggtcccttttgcttcgccttgcagctctggtgggaagacgaggcctgcatctccactatgctcctctcttatggagtcgatgcttggaagctcgaggaaggcgaggcggcctcgttatgcgctaagtggagcgtaggcgcccagccctcacctttagtctctccgcagcttgaaaagctactccccctggtcatgggaagtcgtgcccctccctcggacatgactggtgcaacagccccccctctcatgcctgcgatgtggtcacaggccgacgtaaggacaccatggcctattcgggcttggcctgtgccttcccttttaggcctgggcttaggaaggcccaagtctctgcctctttgggagcttttaatcctctcgacccaaccctttcaattgaattaaggcatggaagcctcatctgctcgccgcgccggaggagaggagcccccgctccttctccagcccctgcttcatcttccgtccccgacaggaaccccctgagggaagcgtcgccccaaatggatgcgctgccccctacaaatgggtcttccccccgtcaaagctcgcaaccctcaaggtacgctctctctgcctccaatctccccgagaggggagtcctcttcttctactcctttctagggttcggggcttgaaagggaaaggggttcttgccttggtctactggagccgacgcttagagaggtggaagtgacgccgatgaaggatgggttgacagagatcccaaaccgtgatctggaaaaagacgtgctcgaaataaagaaacctatcggctgctcctccgtgtgcaaaagaatggtcagaataggagctttccaaacttttccacttcagtaaagtcttgggaatgcctgtcgaagggcatgaagttgaaatcctagccctactcaagaaattgaagctaagaactggaagtagcacccttagcaagagaaggaaaaaaaaatcttgtatcacccgcttcgaaagagagttaaaaatattggaatgctctgttagctatggggggatatcagggataaccaaaaaatcaggtcagagctccagggttttgattccagttgattaatgagaatcaaaattctctgttggaatgtccgtgggcttaatgattttgagaaaagaacgctaatcaagggagtggtgaggaatcaaaaaccagatttggtttgcctcttagagacgaaggtaaaagaaatgtctctacaaatggttaaaagtgtgggcgtaggaagatttcttaattgggtgttagtggacgctaggggtgcggcaggaggcctccttctcttctgggataacagagttctggagaatttggaggttgaaagcgaagggtactccatctctgttcgatttagaaattgtgctaatggcttctcttggattttctctagagtgtatgggccagtgattggcagcgaaaaggaagatttttgggaggaacttggagccatccgtggcctctgggatgacctttggtgcgtaggaggggactttaactctgtaagattcccagaggaaagaaggaatgcctctagcctcacagctgaaatgaggagattttcagaggtgataggggagctggggctaagggattctccactgactggaggtcccttcacttggatagggggtttgaactctcaagctgcctctaggttagaccatttcctgatttcggatcaatgggaggaccacttttcagccatcacacaatcaactttaccttgtatggtctctgatcatagccccatagtcctagaaactggaggtttctcttcatgaaaaatcccattccgttttgaaaatgtggttgaaaatagatggattcaaagacctagtaagaagctagtggaatgggtattctgttgaaggctatagcagccactgcattgctaagaaactcaaagcacttaagaaggacttgaaaatctggcacaagaggtgctaggcaacgtctcttccaatagagcagaggacttcgcccgcctgcagtgttgggaagccaaggagaaggagaaccctcttaatcttggagatatggaggctaaaaatctggctcttgaggactataagaaatgggcccttatgaaagaaacttcttagaggcagaagtcaagagaaatctagttaagagaaagtgacaaaaataccaaatatttccacaaaatggctaatgctagggcaaggaggaacttccctgtctaaaattagagtgaatggggtgactctctcttccattgaagatataaaagatagtgtttgcagaacctactagtctctcatctcagaatctggggattgaaggcctagtatcaatggccttaatttcaaggagttaggagaaggagtggttagcagcttggaagttttgttctctgaggaagaaatatttgcagcccttagcaattgttgtggggacaaatccccaagctcggacggcttctcaatggcattctggttgtattgttgggacgttgttagagcagaaattttgggtctctttagggagttttacctccatggaaccttccagagaagcttaaactccacgttcctcttgctcattcctaaaaaggagggtgcggaagacctaagagattttagaccaatcagcctggtagagagtatgtacaaattgctggccaaagtcctagcaaataggctgaaatcagtgatgggggaggtgattttttattcttagcaagctttcgtccaagggagacagattttagacgtcgttcttattgctaacgaaacccttgattctagattgaaagacaacaaaccgggtctccttaagatggacatcgagaaagcttttgaccatgtcaattgggactttctcatggaggtgatgtccaagatgggatttgggcatagatggattaattggatgaaatggtgctgctctacggcaaccttctcgatcctcatcaatgggagcccttcgggcttcttttgtagctctaggggattgagacaggaggaccccctttctccctatcttttccttttcgccatggaagcccttagccaactgttgtcttgtgcaagaaacgggggctttatttctggcttcagagtgggaggaagaggaagaaagggactgattgtctcccatttcttgtttgccgatgacaccttgatcttttgtgacgccgaagcagatcagttgtaatatcttagctggaccttcatgtgatttgaggcgatttcaggattaaaagtcaatctgagcaaaactgaggcctttctagtgggggaaggcattcctatggagacccttgcctcggttctgggatgcaagatagagagtcttcctaccacctatttgggtttcccccttggagccccttacaaatccaccagggtatgggatacagtggaagaaagattcagaaaaaggttgtctctctggaaaaggtagtacctctccaaaggtggtcgtcttaccttgttaaaaagcaccctctccaacctcccaacctactccctatttgtgatccctaagagggtgtgtgcaaggcttgaaaagatccaaagggatttcatatggggcagtggtgccttagagaacaagcctcacttagtaagttggaaggttatctatgctactaaaaaggatggaggcttgggcatttgcaatctagctatttttaacaaggcccttcttgggaagtggttgtggagatttgctaatgagaatgagtccccatggaagcaaattatgtctagtaagtatgaccttcaagatgggggatggtgctccaaaggtgtaagagatcattatggggtgggggtttggaaggccatcagaaatggttgggagaacttccgttctcactcccgcttcattgtaggggatgacactagagtgaagttttggaaagacttgtggtgtgaaaaccaatccttggaagaagctttccccaccttgtttaacctctctatcaacaaagatagatgggttgctgaggcttgggaggaagacagagttgggggaagctgggcgcctcgttttaatagacaccttaatgattgggaggtgggagaagttgaaagcttgttaggcaagctcctccctatgaccattagaagaggtgtgaatgattcgctccagtggaaagagaacaagaatggaaccttttcagttaaatcattttatagctctctctcaaggggcatcaaaacccccttcccgaccagaactatttggacgccttaggtcccaattagagctagcttctttggttgggaggcggcttggagtaggccgctcaccaatgaccatctaaagagattcagttggagcattcccaataggtgctttttgtgtaaaaatgaggaggaaatcatagatcaccttcttttgttttgtgaaaagaccagaatgttatggcttttgattctctccctctttggggtgcaatgggtgatgcactcctctgtgaaaaggaacctcctgggttggcatggttcttttgtgggcaagaaaagagagaaagcttggagagcggcctccctttgcctgatgtggaccatttggaaagaaaggaataggagggccttcgatgacatttagaggaatgaccaagatattaagtccatttttttgtacacttttgtgaattgggctagggtatatataaaggaacacacttctctttgatagattttgtagattggctagccaccaattaagggtgaggcttgtttgccctttggtgttttacttctttatatcttggtatacttcgtgtatactctttcctttgccttttggcctttaatgaaattactttacctatcattttttttatttttttttgcctagaaaaatattagcatgaaaatgttatataatgtctcaaatattagtatgaaaatgttataaagttattaggtatatttatataaatattttaggttatgagatggagatatatttatgaagattatattataaagcaatgagctcatggttcaaggtgtagattcaaggagtagaaaaacatgggatgtttcaaacccaatattattgttgtttagtttttatcctttataatagagtggaattatcactttcatccatgcatgtaggaaaagttgaaaaaccttctgtatctttgcatatatattattttatcttttttttttttttgtatcaatatgttggtattaaaactatagcctacacaattggtacaaccaaaattttaactcctcaaatgagactaaaagggaaaagggaaattcatcatttctcaagctcattttaaaaacaatcaggggatcttattctaatgaacatttctggaattgattcaagatatcaaaattgtgaaatactttgtatccttgtatgttttaatcacttagattgtttgtatgtatattcaattggagaaaagttgagaattggccttaataacaattaatgacctgattgatggagaatgatatcttaacaaaggagccactgcacatatagcaaatgttctaggtgatctcaaccacttcatgtataaggttttttcgcctacttcttcttcatgttctctcctcaatatagtagagaaaatcttttatctgaatccaattttctattgagaataaatgtttatttttcttctattgttatatctatatcaacaagcaatgaggagaattctgggaaaaagatgcaacaaggaaatctatgtgtttgattgacccatttctttaattttcttttaaaagtaacttttacaatatgtttggttttgaaaaatttgaggtaaaatataagaaaaataaaataaagaggaaaagtagaaagaaagaaaaagaaaaaatagatttaaagtcgataaattatttttatgtgttttttcaaactcatttaacttatttttctctattatataaagattaaataattaaaaatatatgaatttctaattaattttaattatatttgattttttttcgtatttttcataatgaaaggaaatatgagaaatttttttttttttatcattttttcttttcttaatacttttcaataaccaaatatagtcttagtctaggggtagtgattcgtgtttgtgggttgtatttatgtcatgtcaaaacttaggtattctattacataggtcaatctaaacctaacatgaataatgattgtataaaaaatatagacccaaatgttatctaattattaaacaggtaacatgtttgtataattcatttaacccatttgataatcaggtcctatttaataattaggtaaagttaggtctcatatatatctatatgatttatgtcttaatcaaatttgtttataacttaattgacatatttatttaaaaacaaatttaaaatgaggtaaatatgaattacatagtttaaaaatataattaggttaattaataagattattaaatggatcatttcaggtcaaatttgtatcatataggttgataaaaaaactacttatttattaaatgagttatacaagtcaacatgaatttgacaaaaacccatttctaatcaactcaaactcgtaacaatcatgttgggttcaaatcgtgttgacaaatcgtatcatttttgttgatgattttgtgatttttgttagttttatcctatataacacacatttgattttcctttttgattttcttatatttcaatattttgtagtagattgagatcaccgtatacatttttgtttcttggatgacatgtatttaattagttgtgcggttttctttggtttttagcctttctttttcttaactatgatgatcgctagtagtactctatgcctgcctagtagcttgtttttatcatcaaattgaaataattaagatgatcaacctatgaacatgctggagtagatagagccttttttgtaagaatttaggaacatcatcaactaccaatcgagcatcctcctatatgagtcatccaacatcaaattgatatgatttccatgagtctattcttcaaatgagtgcaaaataacacgatcaactcaattaatagagtataagattttcaaataatcatgattcaaagttgtgataggagattattgatttggaagattgagatacattatctgtatcatcatctcaattgaatattggatgatatgtaaaataagataaataaaatttaaaaattataaaaaatattatatatatatatatattgttttaaaattaataaaaaatattatgaaatttaaaattgttcaatatttaatattaaaattgaaaacaaacccaactcttcatttacaaaattcaattaaaaaaaaagaaaaagttggaattttataccacaaatattcattaggatttataacacattagtaatattcaatatatatcacaccaatcaacatttaaaacggtaagagtccatgtattcaaatccctaattgtgaaacccatataagagagagagagagagagagagaggagcaccccggcttggcagaggcagagggatacctctgcagcatccaatgaagcaaagagatggagagatgggagaccaggtgaaggcattgcagtccattcgttgtgaggttagcgatgaagtactctcaacattcccacatgagagagagagagagagaggagcaccccgacttggcagaggcagagggctacctctactgcatacaatgaagcaaagagatagagagatgggagaccaggttgtcaatggaagaggaaggatatgatatttctcgccagttaccacaatggcaccactgacacgaaggcattgtagtccatccgttgtgaggttagggatgaaacactctcaacctttccttcttatacacctcaaagacaaccataggttggatcgaaaaactttttaaagccttcataggaccatctttttcatcacctgttttcaatcatggattctgagaaattttcccttttgaagagaatcattgatttttcagatatttctcaattttggttgttatctcgtgttcttttgctgttattttgaaggaaaaatttaattttttagtaatgatttggcaactcggacgacttggccgagtccactcggatggcatggccgagtcaacttggccgagtaccgagtctacccaagtttaattgatttttgattgaatctttgtttaaaatggtattaggtatcatactcggtgcagaaaggccaagttgcatctgacttggacactttgaactttgcaaagaacaagatagttgtggtggtagttgtgcaattaggcggttttacagtttatagtttctgattctgagattatatgataggtttgcatgctttctagagatctaagtcttcctggttttgaaattcatcatgggtcaaactatctgactaatggaagacaattttcaaaatccttgaggttgtgtggatagtgttatgctgcgtgattcttattctatagaggaaaatttaatcgttcccatgaggaataggcttactttatgtggtttcagtgacgttttcttattggtaaactaaggaacttactatctcaaagccaaattgattgattaattgcaaaacatgaaaaaggatatttaccaagccttaataacttggactattaaccatctttcaaagggtgcctaatatttaccttttttctccttctgttttttctttctctgtgctctactgtgctatggtcataagcatgtagcaaatataagggtctcataaaaaacatcgtcgaaattaataatctcttcacccatttcaacatctaattgaaaacaaaactcttggtgctagtagagaaaatcaaactagagtattcccacccaatatcgggctatagggaagcagccaagcaatttgatgatcatgggatctggacacgataactgtatttcctcaacagccttgtgatgaaagagattatgcaactctcactgcccaccatatgtagaagttgcatcagaagccttcttttgctctggtccatgataaatatggtactgcatgcaaagatttggctctgtaatatcaggctctctcacacctgcatttcgagttttagacaatgtctgttttgtattcttttcttatactaaaaaggaaatggaagtattgtatagaaattataattgaaaacaacatcagcacatggtgtttttaaagcaaaagaatagatagagataagcagacatacaaaatggctagtggtgggtacttcccgatattacttgcaagttcaccttcatatatgttctattcattttatttatcaagtgaatgtgccatgctttttgttttgaagtgtgagccaggtgattggaaggcacaatcagcatc

SEQ ID NO: 10452 - DNA, 8924 bp, Vitis vinifera
  Intron number 4 from transcript GSVIVT01025735001 (locus G SVIVG01025735001) derived from phytozome v7.0 (chr-ID chr8 ; pos 12454085 to 12463008 reverse strand)
gatatcattggtgtgccagaggttgtgtgtcttcctaacctaagtctatggaaagattctctctcttccatcgctccaaacaatcattacactattaaattacttaccaaccctgtttaattatgataattaatttggtgacaaaataaaatgagaatttactatgtaagctccttcacagttaaatagcataaagatgtatttaagacattattaacatcaatttgtcaatttccacactattttcaatcctctttatttaattgccctgtaaatgtcagttactgttgcataatttttaatttttatgcttatttttataattttatatttaaaataaaattaatagcagactctgttgtgtgtgtgtattgtgtgaactactgagatgattctgctatatgttcccttttccttttgtttgatagggagaaatataatttctattaaaagcacctaacaaaagggggcaccacacaagtacttcacttttttatttttttaactaagtgtcaatgttcttaattttccctgaatgttcaacagtggaatccttaaaagggaagtactgatgtttatgatatttttatatcaaaattattgttcaatgtccagatgtttgatggaactcccatgatctggttttgaactttttaaataattataacttggttgtcaatttatgatttctttgtcctttttttatattgaagttttcccaatattgcaacattatttagattctttctctttggtgcttgtcactgtatattttctgtttgtctaaaaaaaaatttattttttgggcattgcgttctctttatttttcttggaatcttttgacaaattttcatctctagagctccacttgagagaaggctccaagtacacatcatttatgattttttcacaattatatgtcttttaatcatcatcattagctgttcctctgatctcatatatactacatgtagcataacaagagttcactaatttcaaaggggagttcctaattcttttggagtgtgttttgctgctgacatcaaacttgggaatgagaatcatatttccagaaatgaattccaaaagtgaaatgaatatgaggtttttatcccaatatttgtttaatatcagttgatgagcttagtaggaagacccttctcttagtaaacttgtcaaccactacaattggatttgaagaattaaagcattgctatgacaatgatgctaattttggggatgtttattcctctcttttgagtggttcaaaagcaacttgtattgatttccagattttagaagggtacttgttttataaaaatcgtttatacttaccaaggacttctctacatgatcatgtcatatgggaacttcatggaggcggaatgggtggacattttggatgagataagaccattgctttggtggaagatcacttcttttggcctagtttaaagaacgatgtttggaaggttatcaaacaatgtcgagcatgttaagtaggaaaaggttcaaagcaaaatgcggggttatatacgccattaccagttccttccaaaccttgggaagacttgagcatggattttgtacttggattaccaaagacacaacggggcttgaattctatatttgttgtggttgatagattttccaaaatggcacattttatcccatgtaagaaggcttcagatgcttcttatgtttctgccttattctttaaagaagtagttcgattgcatggattaccacaatctattgtttctgatcgtgatgtcaagtttatgagctatttttggaaaactttgtgggccaagctaggtactcaattaaaattttcaagttcttttcatcctcaaactgatggacaaatagaagttgtcaatcgcagtcttggtaatcttttgagatgcattgtgagagatcagttgagaaattgggataatgtcttaccacaagccgaatttgctttcaatagctccactaatcgtactactgggtactcaccttttgaagtggcatatgggctgaaacctaagcaacttgttgatcttataccattacctacttctgtccacaccagccaagatggtgatgcatttacacgtcatatacaagatatacatgaaaatgtacgagaaaaaatcaaaatcagcaatgagaactataaagaggcagcagatgcacatcgaagatatattcagtttcaagaaggtgatctagtgatggttcgtttacgaccagaaagatttcatccgagcacatatcaaaagcttcaagctaagaaagcgggtccatttcaggtactaaagcggttgggtgagaatgcttatttgttagagctcccttcaaacttgcattttagtccaatatttaatgtggaagatttgtatatttaccatggccatcacaacgatgtaagtgaagagttggatcttcaattaccacctactcttagcccacgtcctgagatcgagtatgttcttgatgatcaacttgtgtctactcgacaaggtggataccaaaaatttttggtgaaatggcgaggcaaaccacattctgagaatacatggattacgacaacggattttcagaagattaaccccgatctctatgaattgtatcaagcatctaactcatctgagccgagttctttcaagctgtggagaattgatgggggaaagccttttaaagtttattcaagaaagaaagggaagacctaagtaaactttaagtaggattaatattaattagaattgaatagagattggtatttattggagtctaattaggattagctagttgagttataatataattagaatttgagttatgataggctattagagtcctagtggactttggatgttataattagaattagaatcataataggttattagagtcctagtagactttggatttcttagagaagcctataaataggctaatcaatgtaaatcaaagggatgaatttgatgaataatattatactttctttcattgtaaggttgcaaccttcaacggtgagactccattgattttcttctaggtgagactcctaaggccttagtgaaactctaaggtttttccattttttcttcattgttttttctttctctctatttcttatcttataattttctctaccataaaatttattctttgttcctctccttacaccctaaaaataaaaccctagcccacctacccttgagtgtaggcaaccatcctagggttatcctacatcactttgtcttcccgggctagaaattgtgaagattttttttgtttttttgataggtaaaaaagtgtatatataaaaaggaggtgccaaatgagtgtccaaaagtatacaagaagtatatattgatcgccaaaaggcataaccaagaaaaagaaaaggctacaaaaaataccatcctccctcatggagaatccaactaatcagtgaagctaattaaagatacaagaccatcatttataaacaacttagtccatgatcataaattacaaataaacgagttttttagcctttagtttgaaagctcctcatttttaaaagtaattttgttattttccttctaaactttccaaaaggtgtatttgttttctaggccttacgtttttttgcccacaaaagaaccatgctagcctagaaggtttctttaattgaagagaatagcatctaagacaccaaaaagagtaaacaacaattgccataaaacccttgtctctacacaatggacaaggatgtggtctatggattcttctttgttatgacaaaagaaacatctgtttgttaaagatcaccccctcctttgaacctgatccaaggttaagacttttccctatgttgcctcctaagcaaagaagcctaccataggcaggacccaggaattccaaataatgcttattggaatagagactctcggttccaaagtggaatagagagttttgacggaaaactttccgttctttgtctttgtctaaagcacccttttttcctcatccttatacaccctctttcttgaattctcaaaagaaatcgttccacactttccacctcccaatcgttgaaaggcctagggaattaaggagtctagctactctatcctttatttcgttatcctctgagagcctaatttcattaattttaatctcaaccaaaaagttcctctttctgtgggcattggccattttatgaaagaacttagtgtttcatcactcttttcaaccacacttcccttagtttctgcctacaagaaatttcctttaaaaggacccattttttaaaatcgtcccttgcttcttttttgtcttctacctcctctagagttaagacactagacttcttagaattccaaaaaagccacttggtttagggccattgcatttctaattttagtcttgttgaacacttttttgttccaaactttcaaatttgactttaaagctttcaattttggcaaccaaaatgaagcttgatgaatcattaaaattgaaccccgccctcttggttttcagcaaatacttgaaaccctcttctaataacatgttttcgaatttgaatgaagaggtacctctcctcaaccttcccccatctagtgaaatgggaaaaagattagaccctagtctgggtaaaatatattgcacaaccccactgaagtgacattcctaaccctcagaaaccaagaatcaagtaagcctcaacttggattgattattcatgtcatcactctaggtggaagggcccccttacaaggataagtctattagctctagatccttaatgacctctaagaacctccccatggctgaggacaacccatttcttctttgttcctcctcaacgtagggtcatatacttctctaaaaattcagaagaagtcatccttgcatttttaaacaaacacgaaattgagaattaacccacttccattccaaccaccttaagcaccctattatcctagaacacaaggaccttgcctgctgcaccccttgagttgactgctctctactttaagcatcttcccactcttagacttcgcaccaacctggtagacatctcttgaattttagtttcttgtaaataaaccaaatccacttagacatttaatcattgacttaacaaccttccatttgttcctatcattgacccctttaacattacaagataaaattcttaacttcatttgtaacttggagcaatgaccccaccttccgtgttgagcccactttcacaacccgttgcaaagttgttcacagaacaccctaacttcttaagttccctttctaacccttttgcctttttctcattttcattctcttaagtagtttcaaaatctcccccttaaacccctctattggcatgcctaagaaattgctgaattttaccggacaactagaggaccaacaatttagaggcctccctactcccttatgagacctgtcaaccatctcattttccttaaataacccgcccctgcctcaacatattcacgctctagacttgttgtacaacccaaagccctcccattgatcaagataatccttaaaggatcaaggataacctccccttccaagttgtccatgccacaacaatcattgcaagcacccttgccaacaaaccaaggcccaatccaacttagagaaagggtaatccctaaggagacaaaagaccaaggaaaagggccaaggtacttggatgtctctactaagagagctttgtctgttatctttgaatgatagtttgtcgatgaccacattgatgacattgcatcattcttgaccctaccaaaaagcccttcaacaacctttcactccacaacaatttgggactcctcaagagccttaacccctttgaaacggctaagagggccttcgcttccctaaatctttggcccacattaacaattgagctaggtttgcttccaacccttaccaacatagcttggtccaagctaaacaccttgtgggcttagaagccaacgcccctctccatagggcctctaatcaccttggcctcattcccattagaagcttgcaagacttaggcctcaatcgtttcctgttggtccaattctatcctgcacccaaccccactcaagtcttcgttagaggatgcctcttccactgagtctcttccacctatgactagactccttcccaataccttgctctaacccacttgtagtccctttttcaaaactactagttacaaagtttgctctcctttttctccttccatcaaagaatggcatgccattaactatggattgcaagactgacatcacctgtctcactctagcaccatcacgtgaaccactcctttcgtcatccttaaccttcggatcaaagcacccactactcctactcattggagccacttgcgaaaaccatggtggagcttcccactacagctgaatggcatagcaagacattcccaccaccacttgtactgagccaagcaaatctctaccttcggatttcaccaaaatcttgacccattgtacttgtgaaaaaagagcaatatctttatccattgcaacgaaccctctagaacaatcccttagctttcaaaacaaaacacctcccatctccataaatgaagaggaagtcccaccaccctcacccaaacttccttagaatgcacacctttttgaaaacaccctgcttctccaaatgcaaacacttctcaatcctctcctaccctcgcaatctttaatttagctacatcaacaaaagacccatttgttggctccaaaggaacctttcgactcttctcaggcctaaatgcatctaaggtagtaggatgccttgtctttgctggggaaactacacctagaaagggaagcttctcagccaaaataacccaaccccctagaagccctttatcctcaaggaagattagtcaatatctctctacttccaaatgaagagcaaatcagagaatgaacccccccgcctcatttgaatgccactccaacttgaacttccttttcccatcctctcagcctttgtagtacctcttactattgtcctcctagcaacatgcttccacacctttcaaaaaccaatgcaaactcaactcccaaaacctaattcaagaggagagacctctgcttctctctaagatgaacctcttagcttcccaacaactaccccattcaagagttcaaaggacttagactccacgataaaccaacatcttcctcttcttggagccgttacacttgttacttaatggagattgtgaagatgacgtcacttagaccattttagggatctatggtccactaacgaagatggaaagaagggatatagagggattgggtaattagagggtgatgggatgagtgatagtgcttgggaccatcctaagagggggagggggtttgggtttcaatgtggtttgttagtgttctgagagacttagtagttggatgccttttgttatgagagctttctcaaagttcattaaggagcttgagttggtgagtcctttaattagatgtgggtacacacagggtgcaggggcaaaaggcctatccttttcttagttagaccattctctttcttttccaaggattgggaggatcacttttattctatttctctggtaattttgcctagactagtgtcaaaccattcacctattttattggattgggggtgagggttggtgaagagtgatggttaaggaagaacctcgtttagattggaaacatgtggttggaagtttagagctttggtgattcggtggcaaatgttaagggatttgtaaccaccatgctattgaggtatgaattattaagggcttgcttctctccgattccttcctccccacccctcctcccctctcccctttcctcttggtctctctctcttttactcatgatgaggggatgggtttgagtgaacaaatgttgtttttaatattgttgaaaaatagcaataatattttagttcattgtggcaaagccaattactgtgggatatcttttcaattttgatgggccaattaccatgggatatcatcgttgcaagttttgggcttcagtggaggaaatagttaaggatcttctacaaggtttgcatattcgtatatggatacttggaggaaaaaaaaagtgtgttgaatgccttccttctgtttgttttggttatttgcagagagtgcaatgagtaggtttctaatgaggaggagctttctgatcaaagattaaaggaagtcttcattaaatcccttttgaaggggtctattgtcccattggagatggtgagtgattttgattttattgatggtctaagttgggaagcaggattttggtatagattatacttgtttgttttttgtgcctcttgtatacttccaatgtacatggggtgtgtgcctcctttttttttttagttaggccccttttaatatatccctatttgcctagcagaaagaaaaagccgcaaatgcatcattattttaaacaaaagaaagaaactattcctgcgggtcacatgtgaagtcagattgtgctttctgtgattcacttgatcaatcatacaactaaatactcataaaactaggatgtgttccctggggtgagcatttgtttgagaatgcctgaaacattaaaaagaagacttattttagtgcaattttcttcttttcctttttcttctaagaacatcctgagagtttcattttgattctgaagcatccttttgaactctccctttttctcgcaacttcctcttttcttttgttgcaggatcagaactttaattaaaattctctagctggataatgtgtcctttaaatgattgtgctatacttatatttcaacatgcactcattttatatgtcagcttacatctttgctcttcattctctaggctgaggcggagcttatttcttctattgtaacatt

SEQ ID NO: 10453 - DNA, 6020 bp, Vitis vinifera
  Intron number 25 from transcript GSVIVT01026355001 (locus GSVIVG01026355001) derived from phytozome v7.0 (chr-ID chr 4; pos 14845409 to 14851428)
ttatcagagctcttcttgatcatatatcaaacaaggtatattctgccttgcagaagctcacatgttcatatctcaatttcatatgaaaggttctgattctcctttttctctttttgattttacacattttcatttgaaagatctctcattgtccaaacatatcatttttctttcatgttgagggtgatttcccctttcaaattctaccactggagatatctgggtatcctagccacaagagatgctcaaatcatatctagttgtttttaattagacacatccataaaattttcaagcctatgcagacacgtgtctgacttggctagtgtccactcatggctctaacacagcagggttatgtcctagaagtcaaagtttttattttttcagaaatccataattgttgtcatagttgtcttataaagaacatattgattgttcagttatgatattttgaataactaattaactgtatcacttgatttatagataaaaataatttgtaaactttaatggatatacattttcctaaatgggctgctgattgatttgcattgagctacgttattacaaattttggtagttatagttctacacgacttcacttctctcacattgtaacctttagtgaccatggttagtaatctgaattgctctaatattactcactaatttgatttgctctaaatttagtcactaatctgatttgctctaatttttataaggttcacataatgtaaccaatgacaaagtgtcttagcaataagccccttttgtaacttgaagagagcaagataaattatttgatgcggttatatatcataaagaattatatattaaataatgtgattaaggacatttacaaaattgcagtggctaaggtgagaccaattggagagacaagtgaatctccttgcagaagattgaatacatttttgtgtgctaatgaacagtaggttttctaataatgcagttcatttattgcagaaaggtgagcaaggcaagtagggcaatgattaggaactaggattgttatgattcatttttatttttttttatcagatgattgctgtgattcattgtagttagtgttttgttagctactaaggttagtgttttgttacaaaatattgattttaatctagatctaggatgcttaaggtcttagattctttctctttgaatttatagtataaaaggagttagagtaatatttgtgactatgctcaaaaacatgattcagaactttctaaatctggagagagatactttctctgtttgctacttatttttcagtagttttagctcatttgggagtttacatttctggataacaaatttcttttcaaactccactgcaaaaaacccatgtagattacaacaactgaagactgattgttggcatcatctaatactttctcaagaggcactcgcaaggcctatctctaaccatatcccagtgagtgtgaaccctaattcaactaaataagggcaggtctttaggtttaaaatatgtggctgcagcataaggtttttagctcagggattaagtgatggtgacaagattgtagtatgtatgacagcaaggtattgggaacttttacttttggtggacaaattagtaatacaaatccaaaattaaaaaacctataattatgtatattacattttttttttttttatcagaaacaaaatacatgtattaatagagaaaagagacatgagaaggatgagaaatcctccccatgaagtacaaacctgatcaaaagaactaagtaaacctccactaaccaaggaaggctatacaagagatacaaaaggccgcatgatcgaaagaactaagtaaacctccactaacccaaggagggctatacaaaaggaacaaaaggcctatacaagtaaaagaatcctgaccctataaacccaaccctagggtgcacataattgaagccaactaagctggattacactcaaaggatagggtttaaaaatgtatgtacaataagcccaaaaagaaacatgaaaatgaagttgatcccacatcatctctggcgtcttccaaatgtcctcgaaaatcctagcatttctctctctccacacaatccaaaagagagagagagacgcgatcctccaaagagttttgccttaaataaaattcccaaaacacttgaagaaagtcaccaatatatcgcaaatactactaggctgaactcactccatccgagcctgcgaaaagattctatgtcacaatcctaaagtaatcggacaatgcaagaagagatgatcaattgtctctctgctcctcctacaaagaatgcaccaatcagggtaagaactttgaaaggtcttctcaactacaacatgtcattggtatttaccttcttatgagccactaaccaagcaaaggccctgaccttggaggggacttttgagttccacaaaaaaattagttgggtagaaaggaatagaatatgagacactggctaaggctaaaaaaaaaaaaaaaaattatctaagaaaattccggaagaggatggaatctaagctttcgcatttggaactgaaagagtaaaatgaacaagggaaagtaaggattttagtctttcaagatccataatctcctcatcagttaggttgcgtctgaagactagattccaagacaaagaagtgttatttcccagaatagcttaaataagacgagttttagtggtggtgattctaaacagtcttggaaattgtaaacaaagagatttgtccccccaccaaagatcttcccaaaaacgaattctggtctcatcacctaccacaaaacgaatgtgtgtagaaaaattttaaagaaaatgagcaatggttttccaagggcaacaatgtgaccttctaattatatttttggcgtcccattcataaggatgtgtcccatagatactcaagataacctaatgccaaagggcagaaccttccttagggtacctccaaagccacttccccagtaaagcttggtttctcagagagattttcccaaaccctaacccatcaaactccttaggcttacagaccatgtcccaattgaccaaatgatcccttttaccatccccaaaacctgaccacaaaaaatctttttgtaatttttcaatcctcaaagctattgaaattggaaccttgaaaatagaaagaaaataacttgggatgtgtgacaaacaagactgaataagggtgattcttcctcctaaggaaaaaaaggcttttttccatccatccaatctcctagagactctatccagcactagatcctaaaaggagagcgaatttggatttcccctcaaagggaaacccaaatgtgatgaaggccaatcaaagactgcacactcaagcaaagaagccaaccttgcggtttggtcttgactaatgttgatttctgagagagtgctcttatttagattgatccttagccctaataaccgcccaaacaccaatagaattaacttgagagaatgcaactcttcaaaggatactctagaaaaaaagatggtgtcatccgcaaattgtaaatgaggcacccggatcctattttttcccactagaaaccccttaaataaacctctctcctccgctctcacagtcaatttgctttaaacatcagccaccaaggtgaaaagaaaaggggaaaggggatctccttgtcttaggcctttgtatgccttaacccatcccttagcattttcatttactaagattgtaaaggtcgctaaagataagcatcccctcatctaggacctccattttgaactaaacccttttctttcaagtacatcgtccaaaaaatcccaaacaacatgatcataggccttttcaaaatcaattttgaagactaccccttcctctcttgatctcgttttctcttctgcctcccctcaacaaaggcaccttgagttaaaaagatggtgtcttggaggacttaacgcaaccgccctgatagaactttggctatgattttgtacaagctagtaactaaactgatgggtctataatctgaaatcttgcttgtttgactcttttttggcattaaagcaatgaaggtatgtatattacatattcaagctgcaaaattgatcatttttaataagttttgggtacattattcgtgaaattagttaattagtaatcctagtaattttttttactgaagttatcaatttagaaaatagttaagagttaaaaatacttagtaagaaattttaggaaaattaaaaattttttaaatgaagtcttagcaaaattctagctttttataaaaatgagcgatttttaggaaatgttttcaaactatttttataaacatgttatcacatatgttttccacaggtcacaacatagcgaccttggtgagatcccttcaacagttaggggtcaaattcttgaaccaatcccctctttgttggatggttttcacttagagggtctaacacttagtaaattggccattatacacttagttttggcatcaatgaacatcaagctagtcaaatactgtgagaagtgcatacctgtggacaacaacaatgctcaatctgtggataaggtttattttaggaggaagtataaaccttctcctagagtttttttggtgattcttaggtcttgttcttgtagctgtcaggccatttattgcttacttgaaggttattagttagaatattagagggttgggttccaagaagaaaaaaaggttagttgaggattttcttagtcttgaaatcccaaatgttggtcaagtagtttgtgaaggattagtggacttgagctaggtaaatccttgtacacattaattgttcttcataatgaaattttttatcattggtaggcttgtggcttttgatcccttgggagattttccacataaatctagtgtcattatctctcttgctctaattctactctttgatttattttcagtttttgttatcctttgttacttgagcatgtttgttgaaaggatgaaatatgagttaaaattagtgtaattacctttcagatattcttgaataatttttttgttcgtattgttaatgatatctagtagtaattggaaatgtattagggagataattggtcttatgaattaatgttggggagtgttgaagcatttggatgtggcttgcattgataaattgtcgggagagtattgttgcattcatgcttgcctgtgttttttatcctttgttgaatagtggttggaagagagaaatataaattgtgaggattcaaaggaaaagataatatatgtttgggggactttttcgaatttgtttgaaaacacctattcacctcccctctaggtgtagttcatcattgagattcacttttagaaacccatctaatgggtcaattcattaactagaactcaatgagttggattaaatgacttaagcccttcggctatcacatagatttcattgaacatgaacagttagttaatcagtacagatgaaaaatcatatatgataaaccaatcaaaacctccaataaaactgctataactaggagcattttgtttcctcattcatttttcttgtgttatttaccactatttcaatgccttaatgatcgtgatgtgtccttcttggcttctctttgccagtgtttattatgttacctctagaacatgagtagtatgttccctaagagcataattgctttcccctctcatggtccaggttgaaccaattgtcttattaaccgaaaaattaaggcagttcaacatcttccatgttttttcttgcaatgtcatatttagtgctggttttatttcaaatataatacttcatttgttattgtttttgttcattattataaacaccaaaattgtatttcagtaggcattctaatttagttttctgcatcatattttggccttaagtttctacatgtatattaaatatttcgaatattgactaaaatttaggtgagcttccatctaatgttttatgtacaacatttttcagatagcaacacttgaaccg

SEQ ID NO: 10454 - DNA, 17954 bp, Vitis vinifera
  Intron number 1 from transcript GSVIVT01013593001 (locus G SVIVG01013593001) derived from phytozome v7.0 (chr-ID chr5 ; pos 21261811 to 21279764 reverse strand)
gtcctaatatttctggtggagcgaggacatggagactttgtgcaaataatcacaggcattaacacagcacttcaccagcatacagtggcatcttgggtagaactgctttgcatgctgctgtaattcgcaacgaccaaggtacctatatgcagatcttagtggttaattagtcatccaatctattgttaaagatttttttttttctctgtattaatttttatctttatatattcatttatttatcagaataacaacgaagttattggaatggaagccatctctatcgatcggtcatcatcttgtcagtgtcagtttgtgtttttctgggccgcacctatatcgatcggtcatcatcttgtcagtgtcagtttgtgtttttctggaccgcacctatattgatcggtcgttcatttgtcagtttcagtttagtttttcggggccgcacctatatcaatcgatcatcatcttgtcagtatcagtttgtgttcatcttaagtcgggaccgcacccatatcgatcggtcatttatcgttttttcagtttgagttttcagggcctcacttatatcgatcgaccattttcctatcagtttgtgttcatcttgagtcgggatcgcacctatatcgatcggtcattcatcgttttttcagcttgaatttttggggccgcacctatatcgatcggtcattttcctatcagtttgtgtttagtttgagtcaggaccgtacccatatcgatcggtcattcattcttcctatcagttcagttcgacgtccaggtttttgtttcagtatgacattcaaagtcacatcttcagttttggtgttcaaagtcgttgtgcatactcatccagacattttgagtcactattgttcctccattttgcgcattcaggcttcattctcctcacctggtcacttggtgctaattgtttgttcatcattctcttctggacttccccttccactacacatgacatggtcttttgagatcacaaaacgtatttctgtcatgttgttgggcaccttacacctagcattctcatgtatatcacataaggagtcccctttggacgcactctttcttgtacttcaaggtggttcaactattactcatctttgacattgatcttcgagtcacttttagagacgtctcagagggagtctaggtccttagtgtagcttcagagacgctttgagagatccacttttctcttaggattagaccccttttgttcacctcttggcctaagtgagttattgtttcactagtgtccttttgagggtcttctttgttcttcagtagagttcacttcattccactcgctattcacactttctttttcacttcagtgatcatattccttacactcgtgaactctaccgaagaggggcatatttgttgaccctcatttggatataggtctttggttttgttttattgagggctttttgggcagctatccagtttcctggagagacaaataagatatcttgacacatcggcatcttgataccaccaggaacgagaaaaaaaaattccaaggaatcaaaaaaattgaaaaattggatctatgtccaagggatcacacctaccaagaaaaagtattttgttttggttcgacccgtagtcacatatgaaatagcggacggtataaatttagcaacacttttcccttaggatctgttgtaggaaagggataatatgcaccttcaagttgtcaattatatcctttatggaaatggcaaaccgattcagggaatttctgatacaagtattcaattagttcggacttgtttagtattgaattggtaccaagaaaaaaaaagttctcctatcgaaaagacccatgcatgagagagaggcgggaagtgggctttcatttggggggaaaaaaaaaaggaagatctttttagagagggagcagctggtgggtttagtggaggaaagaaaaagaaaagttttttttgctgaaaggagaacgcgggcagcagcgttttttttgggagaggggtgcagaaaagaaagagaacggagagagcagctgaagaaaaaaaaactgagatcttgctggcagcggcctcccgtagtctctggtaagtcattttcattttttgtaaaattttcgaaactgggcaacagtatgtcgagttttgttggttttgattgctgaagtaattggggatttttgcttggctgtcttcaaagtttaggaaagagagaaaattaaatttatttggaacattgcaatggtttgtcaagagtttttaggctgatgatatgtttttttagtggctccaaaatttctgccgctaagttgttaatttggagacacgtttgttgtgttgttgttccagtggaacgttgtgagcttataagggttaatgttgatgtataaatctatcttatttactgatcttcggttttcttttaatggatttaaataagctaaaccaatagaaattaaaatgggtattatacaagatttcttcaatgatgttgatgagtgtctcttggagtttgggggaagtttaaggtggtgtttgtttttttagctttttactgaaaaccatttagttttaaaatttaggttgtttgtttttttactttttcataacttattataaactttttactaaatagaaaaagccaaaggtggtgtttgtttttttacttaattctaaatagaatcttaatacttaatagtattaaatattaggttgtttgtttttgtagtattttatttctattaagtattaaaaagtaaaaaaaaccattgtgttattttttctatttagaaaaagccacatattctgactttttctatttagtaaaaagtttataataagtcatgaaaaagtaaaaaaacaaataacctaaattctaaaactaaatggttttcagcaaaaagccaaaaaaacaaacaccaccaaaatatgtggctttttctaaatagaaaaaataacacaatagttttttttactttttaatacttaataaaaataaaatactacaaaaacaaacaacctaatatttaatactattaagtattaaggttctatttagaattaagtaaaaaaacaaacaccacctaagtgtctttgcaagtattccattaagcaggtgtttcctggaggtgggtttgtatttgtttcaattaattgttgtaccttcaacacttcattttgttgtaagaaagtgactatttcaataccaaaaataaaaaatataaattgaattaattaatcaccgtgttttcaattttcaaacaaactaatcttcaaaactctaattttcttttaattcttgaaataactttctaagtttttaattttaaatctaatttttcaatattcgaattcttaaaattaattctcctaaaattccacaattcccaacttaatttttaaaaaaatgtcgccttcaaataaatttttgaaactccaattccttttaaatctaattttcttaaattcaattcccaagcaattctttaaaatttcattttcttaaattttaattttcaaatctccatttttaaatgaattcctcaaaattccggttttcaaatttaaactccccattttaaaagtcccatcatttacgttcatctatttaattgttattttagtttttattattattattccatttatttcacttatttatttattcattttaaaattccatcattagacaatcccaatttttctcactttcgaatttaacttgaagaaattcccaaaattctcgttcatttatttaatcgctattttcgttattattattattctatccattcatttcaaaaattccttctttaaataatctcaatcttctgacttctgaatttaatttccaatttccacaattctaatttctttcaaatttaatttccaaaattctaattcttaaatttaattcccaagactccaattttcaaataaattccaaaaaaaatccaattttcactcgaacagttttaattcaatttcggttgtcaaatagtttttgttcttctttattttacataagcatgaatgcaattttcataattccagaataatggaatttgtgatattaattcgtgtaagatggatcgagctttggtgggggcctcacacacgtgattttatgattgattgatttgattgctatatgtgattaatttattccactctatgacatgcatgcgattattctgtgtttaattgctaacattcgctttcattgaagtaaaccggttcatcactcaggtacattctttgcctctcctattcattcaattattttgttttgagtaatattcatctggtatccatgctcgattaatcaattgtcatgattgctccattttattagtagagacccattttaagggcttagaggggtgctacggtctttgtcgtaccttcccgataagtaacctaactcccgaactagatccggtttttcacagaccacattttccaaataaggagtcacacttagggtttttctttcttattttgtttaccctttaaaaataaaacaaaaaataagtggcgactccaagtcattttcttaatcagtaaatcaatttttcaaaataaaaatcgagctcgccattaagtggaagcgcatgagccgaaatgtggagtccacaatctatttttacttcttatataactttttagagtttttttaatattttaaaatttttattaatttttccattaccgatattttgtattaaaatattcattgatatatctccaacatatccataaaatcgaagtaccgatacatccgtgattaccaatattttcatctttgcttacaactatgcatggaaatgttggcattaaacgtggtgttataaatgagaaatattccatattgtggcataagagattaggtcatatctctattgaaagaattgaaagattggtaaatgatggaatccttgaggctcttgattttattgattttgatatttgtgtggactatacattaagggaaagcaaaccaatatgactaagaagtagagtgccaggaggacttctgatattttagaaatcatacacactgacattaatggtccctatgatatgtgcttaaatggtcaaagatattttatcacctttattgatgactactcacgatatatgtatctctttttgcttaatgataagtgtgaagtactagatgctttcaaaatttataaagcaaaggtagaggaacaattgggtaaacaaattaagattgtgaagtcagatagaggtggtgaatattatggtaggtacactgaaaaaggacaattatctaatgcatttgcaaggtttctacaagaacatggccttgttgcctaatacacaatgtctagctcaccatcccaaaatggtgtggctgaaatatgaaaccgaaccctaaatgacatggttaggagtatggttagtaactccaacctcccattatccttgtggagtgaggccataaagatagcgacatatgtactaaactgggttccaaccaagacagttcctaaaacgccttttgagatatgaaaatgttggaaacccagtctaaggcatgcacatgtatgaggttgccctgttgaggtttgagtttataatccataaaagaataaattagattcaagaacagtcagtggatatttcattggctatacaaaaaagtctaagggataaatattttattgtccttcttatgctacgaaaattgtagaatctcataatgcaaggtttctggagaatgatgtgattagtgggagcaatgaacctcgacacttagtgtttgaggaaggccataatattgaacccactactgaatcttcaagtagactgattattttcctggatagtcatcaagatttgacaatctaggaggcacaagttgttaatgaaccacatcatgaggatattctggtggatccagttattcaacatcctcaacaagacaatgttgatataacattaagaagatctactagataaaggagacctgcaatttcttctgattgtgttgtgtacttacaagaatatgacattgatattggtgctaaagatgaccccattatgttttcacaagccgtgggtggaagtgaatccacattatggtacactatcatgaaagatgagatgaattcaatggttaataatcaaatatgggatcttgttgagttgcccaaaggtacaaacgtcattggttgtaaatgtttttaagactaaaagagaatccttcggcaatattgaaagatataaggctagacttgaagctaaaggattcactcaacataaggaattgattatcatgatactttctctcctatttcaaagaaggattcatttcggataatcatgacattagtagctcattttgatatggagttacatcaaatggatgtgaaaacaactttccctgatgaagatttagaggaagagaaacacatgaaacaaccagaagggttcatcacaaatgtaaatgatcgcattgtttacaagcttaaaaatctatatatggactaaaacaagcatcctgtcaatggtatttaaagttccatgatgttatttcttcattcgattttatggagaatgttattgatcaatgtatataccataaggtcaatgggagcaaaataattttcttagtcttataagtggatgatattttgcttgcttcaaatgatttgggcttgctttatgaagtgaagcgatttttctcgcaacaatttgacatgaaatatatgggtgaggcttcttatgtcattggcataaagattgagagagacagatctcaacggatattaggattgtctcaagaaacctatatcaataaagtgtttgagagattttgcatgaaggattgttcacctggtattgcaccaattgtcaaatgtgacagatttagtttgaaccaatgcccgagtaatgatttggagaagaaagagatgaaaaacatttcttatgcttttgtagttaggagcttaatgtatgctcaggtttgtacaagacctgacatttcttatgcaataggaatgttgggcaaatatcaaagtaatccaagtctggaatactggaaagctataaagaaagtcatgcgatacgttaaggggactagggactacaagcttacatacaagcgatttgatcatttagatgtggttggatattcaagttctgactttgctggctgccttgattctagaaagtcgacatctggatatgtcttcttattagctaaagaggccatttcgtggaaaagtgcaaagcaaacattggttgcttcttcaactatataagtagaatttgtttcatattttgaagcaatgtcacaggctatttggttaaggtgttttatttcaaggcttgaggttgttgactcaatttctaagtcattaaggatttactgcgataactttgttgtagtgtttttggccaagaataataagaatggaagtcatagtaaacacatcgacataaagtacttagctattacggaacatgttaagtcaaacaaggtgtctattgagcatattagtactggattgatgattgcagatcctttgatgaaaggattgccacttaaggcttataaggaacatgttgagcatatgagactcaattttgttttgtaaatttcatataattgagacaccctttgtgttttattgctttttttgggccaatatgaaaactccaattatttcaagtttgtcttctcattttggttgtatacataaagtttagagaatgataatatgcatgttatgtagaccctaaatgagaatcttggaagctcattcataaaggaatgactcacatattgttcttattcaaaagagaaagttacattgtaatacatggaagggtaatacttgttcttagaggacttactgccatgattcatgtgttttaaactcctttgattaagtataatgatttagggaaaaatatattatgtattaatttaattaatacatattaaataatttttatgggccaggtgggagaaatgttggaaacctttttatatgaaataaaaaaaatagaataaaagtttttaagtttgtagcccatttaaatattattttccctaaaataaatgaaacgtgggcttacatctcttatagagtaaccacccatgtctatagacgttagggatggtaacggggcgagttttttcgagtacccgccccatcccgcctctaatgggatggggtttaaatttaataaacgggtatgagatttttttttaaaacccggggcgggttcgagtattgccccatcccgcctcgtcccgccccgtttacatataaaattaatttaatttaaaattttattttactatttttaatatatagataataataaaaaatttaataaaataagttataaaaaatattataattttattatttataaaatatatttattttaatgtaattaaaaaaatttaaagtaattttttttttttttaaaaaaaaaagctaaaccggatggggcggggatgagaattatttttaataaacggggcggggttggaatgggggcgacccgtaccgaactcgccccgttgccattcctaacagatgtgagacatatcattcgattgaaaactaccctaagttttctttgctgggaagaagagaataaaaaataaaaatatacaatattaattctagaagtggggaaaaagagtctttggtctacaagaataagtctaagtttcatcggtgcatggacataaggtcttgtaaggactagtcaactaatccatattttatgtgaatctaattgtcatggttggaggtacgatcttggattttcattttgttacttgcaattttagagattttatcttacatgaatcacccaaatttgttacccttggagggcaaatcttcaacccttcaatatgttcttgaaagccgttggcaaacaccacattctccatctctgtgcgccaaggaatgtagttgtttctgcctgagtttgattgtaagagcatgttcaatgcttgcatcggctgaatggcaccagctggcagagaggatgtaggagttgcaccagcttgtagatcagaagactaagttgaagttgcaattagagaacgagagatagaaggaagctctgataccatgaaagactttagaatgaaactggagaactaaacttcttaattgaataatttctttttctcagcacactcagaagtttttagcctttattacttttatattgagcaatttaactaactgtaacaatgtttaacaaatcgtctaactcctatcagcttttctaactccttaagatgcttaactaatatcaattaggatgcttgaatcttcggtatcttcttcctgtctatcacaaaccacagtatagaattcagaaatgtcaatgactgaccataaattcagattatttctgtccaacacaacgacattataataagttttcataggataactttagatgattagttttcatgattgccagagtttgaacatggcgaagtaagatcccggaagatcttccaaggtcaatgctttcccacttccattccatcttgattattttttctttgcatcatccatgtggcccctttgaccatagaataatgcttacgtaagtttaaacatatgtaaacatacatacttcatcaattccaaccaacaaaataataataaataaacaagataaaatatgtaactaattcttggccatgaatttgacaaactttttccataaccaaaatatcaaacttctttgttattttaacttacatggtgtggttaccttaaaattgatttaaaatataaaagttcaaaaatatataataaatagataaatactaatatttaaattaagaataatattaattttctctacctgatttagtttaatataaaattaattactatattgaattctaattaaggtagccaaagaatactaattaaggtaatttatttttcttaatttttatcacgtttgtaacacttccaaaccatcacatttaacaaaaggagaattctatggtaccgaagtgggtaccatacctccaatgagttgcagttgttgggttaaaactttctatattcacacttctatacctccagtgaccctattaggtagattctgttttccttccatattcacacttctctctctccttctatgttcacacttctctctctctctctctcatttattttctatctggctggcagggaaagtcggcaagttttacaatcctgattactaagcggaggggcgacaggttctgctctcaaattaattttgatgctattgtcagtgaaatctatatccatagggacaaaaataaatttgcttctagaacaaataaatttatgcggattctgccttccttctatattcacacccaatgttttcagaaccggaccggtgatcgaaccgaaaaaattaccggttcacggttcaccggtcggaccggcggtcgaaccgctattgaaccggtgatgtaataaatatataatttatatattatataaaattaaaaataattataaaaattaaaaatatataaaattataaattttaataatgtttgatttttatatttggtatattaaattaaatgataaagtttaatattttaaattttattaaatagaaagatgtaatatttaagaatgaagatatatttaaaatgaaaaaaattatatatttaattttatctttttgtctttgtattttattgttttaaaattattctattaattaatttatattattttttataattgttataaaaataaataggaatttaaatatttacatttctttaaagattttatatgataaaaatttgaaataaaaacattaatgttaagtcttattattatatatatatatatattttaacaacattgcaatgatatgaaattatgaatagctcatgcgtccagccctcatgctgccatgcatccgcgtccagccctcatgctaccatgcatccagcctttgaggcagtcctattccagtcccacatcggaagcacatgaattccatgtgcttcaagtgctctataaataccttgcaagttgcaacaggcaaaccaagctaaacaagccaacaaattgggcttgaaaggcatggcccaagggacatgttaataagctaatgatttatttgtttgggccagttgtttaaaccaactatgggcttataattaatttgagtttcaaaagttatgggtgtggaataggctcaatggataatgggccttttaattttaaacaaatttttgtagaatttaaaaaagaaggcttggccggttttgtgaaaaaccggacggtttgtctggttcggtggtttgaccagcggtttgaacggttcaatgccggttcgactacaaaacggttccttgagatggactgaaccggaaagttgaccggtcggcggttcgaccggtcggaccggccggtccggtccgatttttaaaacattgttcacacctcttctctctctctctctctctctctctctctctctcatttattgagttcacaactggatgacaaaattttctataaactgagatatttttattgaggttctcaaagctctctttgattcaacaaaaaatagtttcatcgtttttaggcttttgttttttttttttttggcttcatttatgaaatataaggaaaacaaatatgtcatgcattttcaataactttaggatatatttatttctcctcaccttagggaattattattttatttatatagattttggtgtgttcaactattattttatttatatagattttggtgtggtcaattccgtttaagagagattttgagagtttgagaattgaaggatcaaacttttgatagataattatactctcttatggttccacacttattttaaataaaatatttttaaaccctttttagtattatgaagagtttccttattttaaaacaatcaaaaatcattttagaaacaaatacatccacaattttagtatttactaaaaaaaaacattctcaaaattcttcttaaaatcaaacattaatttagagataaacataattttaacacttatccaaaataatttttacaattaatacaaagtaatcccttcctaatttcttatattacttattccaaaagttttaccaaccatagatgtatagtttacctaaaatcttatgactaccaataacccaaatctaatttttgatgaagttgaaaattgtctggagacaaatgagacctaaaaaagtaaattgtatcctattaaccaatcaattaccaactttgtaaaaaacattctaaaaattgtttttagaatcaaacaccaagttagagataaaaatgattttaaaacttaccaaaaacaatttttggaattaaaaacataataaaaattaaattaggaaatacaaagtaatatttttctaatttcttgcattagtcattccaaaagctttaccaaccatagttacatacttgaaattttatggactccaaataaatcaactttgaatttcatgaagtctgaaattgtcttgagacaagtaagacctaagcaagtaaatcacatctaattaataaaaagggaataaaattatcaactaaataaaatatattatgtactgtgaaatggtaaaaaagatcatgggaaaacctaaacacagatgatataattcactagcaccatcaacagcaattctgctgtcatctttaaggaaagtatcatcattacataagctttcaattaccacatgttattaaatcaccatatatacaccataatcacgatcctaactcagctaaataaaacagatatattgtaagttttaaaattttttctaatttcagtaaaatccagttgtttcattcttttatttttaaatatgctttcacaccacagtgtagaatttctgaatgaatgtcaatgactgaacacaaattcagattttttatgtccaacacaatgacattataataagttttcaggcaagaacatggccattagacttttggaagaacacaatcacaaactgcagtcaaagaaataatttaaaatttttaatcataaaactaaactttagataattagtttgaacatggagaaataagatcccggaagatcttccaaggtgatcaattcacaaatagtcagctctccccactgttagaaaagagaaataaaatcaaacaatctctcaacaaatagcaagattcacaatctatcatagcacgcacaagcaaccttaaacgagccatgtatcatatttggagtgattctcggtggttttctcggatccataatatactattctcaaataaactcatggttttcacacggtttcttcaagtcatcttggagaaaatcaaaataattaaaataaaaaatatttcattgaggaatttgattaaatgacaaacaaatttaaagttactttaaaaaagtcagtggctttccacttcaaattcatggaaattgctttttatcaatttcatacactgaattttgaatttcaaagcatttacatgatttccatgtttcttcttcttattcttctttttacattagaaaacaataaaaattcgatacatttgtaataaaataatttaatataattacatccttttgcattaggaaacaaataaaaaattgataaatttgtaataaaataatttaacataattacatccttttgcattggaaaacaaataaaaaatatgtaaatttgtgataagataatttttaaaaaattacaataatgtaataaaactgatattgaaataatacaactagagtactttcctaggcttcattttaattaattcctggtttagttagaatttttttcacaatgcaatggagatggtaggtgtttatacttccattcatgtggcaacggaataaatgaagacataaatgaagggaccatagacctattccaaagctctacgttattttaattagaccttcgattctatttcgttaaaattgatttgatggagatatcattaattttataatgatagttaaataagtttagaaacatttgaaggtcaatggtttcccacttccaaggttattttttcatgatcatgcgacccatgtggcccgtttaataatgtttaaattgtaattacaattacaattaaacaaagaacaatttttcacaatttttcacatgattagccttttacatcattactcctacataagcatagatgcatcaacaatcattacttatccaactaacaagtaaataaaaaaggaaaaataccatatacaacaattatgtttatattttcaatttttaaatttatttttttatttttatttttttaaacatgctagtatcaccatcatggtataatattatgtgataagatgtcaattatcaatcaacacaaactaatatttttgtctccagccaatgacaatattaaaagttttgattctaacattgcattcaaataaataatttaaatattttaatcataagacttatttttaggtaatgaatttttatgattgtcaaagtttgagcaaggaacaagtaggaacccaaaacatattccaaggccaattcacatgctcactctgttaaacattgtatgtatcataatgggatgaacctagaaagggatgtattatatctggagtctataacttttattccaatgaatcccttgaggttcaaaattataatactctcaaaatgatccaatgatttttatgatgactactcttcaagtgtatattatatttcgtgtgacctcccacatagtctatttttctatctaacaaacaaataaataaaaaagataaagtagttgatcaccacatataaaaaaaatataagaaaataaacttttgagtggggattaccctaaaattggtgtgattaatcagatttatttccttaatgaagatgggttaagatcttgttttgtattttcatttttctagaaaataaaaactaaaactgaaaacatgtttagatatattttttttttaataatttgggaagttattgtaaagatatgacaattttttaaaatgaaatagaaaaatataggagaaacttttatatttacatgccttcacaaaattatttattggagttttttttatttaaaaaaaaaagagaaaatcatatgtgaacacattttttccttgttcatttttttagaaagttaaactcaaaaaatagaaaaagtgcaacaactccctatttttaattttattaattttagttaattaattataaatatatttcaatattttatttcaccatttaaaaatttaaaaatcaaaaagaaatgaatgaggtgctatccatatataatcttttataacaagcatttctacgaacatatgttccatttctttgcactagaaagataatttaaaaaatagatttttgataaaagagttttaacatgattaaaataatataagaaagctaatattgaaataataaactagagcactttcctaggcctctcctagttttgttagagttttttcacaatacaaaatggtccgtgtttataatttcatttttgatgttatttcattaaaattgattttaacaaggactcattttataaagacaaataaacaaatttaaatacgtttgaaggtcaatgctctcccacttccgatctattgatattatttttttattccatgatccatgtgcccctttgaccataaaacgatgcttcagctgtaatttttgacatgattagccttatgcatcattttcctacgtaagcacacatgcatcagcaattattacatatgcaactaaacaaataaataaaaaataaaaaataaaaaaacaagacaacatatgtaactaattcttggccatgaatttgacaatctttttcctttccctattgaaaaaaatgataatttccataagcaacataccctatttcgtgcacaaagttctatattattttaatttatatggtggcattacgttaaaattgatttaaaatattaaattcaaaaaaaaaaattaagcacaagaaaattttcaaaaatgggataaaaaatataatcatctttatagcctaggctattcatggaaatatcatggtcttaaattttcaaaaaaatttagtattttatttttatttttaaacattgtcatagcacaatattatgtgataggatgtcaataattgatctatacaaattaatatttttgtctccaacaaataataatatattaggtttttatttgacataaaatatatatctttaatgtctctctcactcacttcaaatcatggaagatggtggtattaaaagtttaagacatggagaacacattgcatttaaagaaataattaaaatatattaatcataagacttaattttagataataagttttcatgattgttaaagtttgagcatggaacaagtaggactccaagacatcttccaaggccagttcacatgctcactctttaaaacatggtacgtgtcataatgggatgaaccttgaaaggaatatattatatttggagtaacttctatatattctaatgagttcctcgaaggttcaatattataacattctcaaaactaacaaatgatttttaaaatgttcaatattataacattctcaaaactagcacatgatttttaaaatgactcttccggccttgaaagggatatgtatattataattggggtgacttcccacccaatctatttttctagtgcacatataaataaataagaaaagtaaataattttgcaagtaaatataggaataatgtaagaaaataaacttttgaatgcattcctttccaagtataaacattcaaccaaatcatgtaagaaaatagtgattccaacaaataattttgataaaccccgcaacattcaaccaaagcttcttttcaaagaaaactaaagtataaacattttttgtcccaatcatgggcatagatttcattaattgacaacactaaatgtaaaatttgagtgcacaacctgtcaagtgtcaccactcgacttcataatcaggatcttaaaacttgccaactttccgtgctaaccggatgaaaaataaataaaagaaaaaagacaaaaaaaaggaaaaaggaaaaatgaaaaaaaaaaaaaaaaaaaaaaaaaaaagaaaagaagacaactagtgtgaatacagaaggaacgcgttgtctagataataatttattcgtcattgtagaagcaaatttttgaaaatcaaaataaataatgcattttcctttgagtcacagagtcacattgtatatatatgcagaaacatagtaatggttttcacgaggatttcagtgttttgtagagatcggggcattgctgattgaggcagcaatggattccaattcaagccaggttgcacctgtggatgatagccaaatccagatctctatccagtctgcaactcaagatgacagtcaaacggagacgagacacatgaatcctcagctctacaaggccgctgcaggatgcaaaaccaacgatgaggtcagcgatatcctcaaaagattccatgaccttggagacaaactaaccccaatggagaacactgtcctccacattgcagcccagtttggtgaacaagaacgcgtgcaattgatccttgagcaaccttcaggctcatctctactgcaacgtataaataaacttggtgaaactccagttcaccttgcagccagagaagggcatctgaacgtggtgcaagctctcattgatgctgaaacagaaagggttgaattcctgaggatgaagaatcatgagggagacacagccttgcacgaggcagtgagatatcatcaccctaaggtggtgaggttattaattgagaaagacacggagtttacctatggtcctaatgataaaggtaacactccactttac

SEQ ID NO: 10455 - DNA, 6050 bp, Vitis vinifera
  Intron number 6 from transcript GSVIVT01034907001 (locus G SVIVG01034907001) derived from phytozome v7.0 (chr-ID chr5 ; pos 4455 to 10504 reverse strand)
caagtgtacatatttggctgtaagtaatacttctgtatccaattctcatgatgaatgggttttaaaattcattcataattattgtttgaccagatgcttgattatataaccactaggaatttggtatatcacatataagaaagggcaagcaattttgttctagactgaacatggctttgagattgtaaacttatgttatgatccttgcattaaatattgtaatgacaagtattgaccattgggctattttatcttgatttttttttaatgtttattaaaatggtgaaataaataatgtgtgatctgggacaatattcttaagaaagaatgggcctaatgggaaaaagggaggagaatgcagagaatagagcaaggtaacagagagaagtatggtaaaataattgaaaaaaggtaactgctgatacaaacaaaaataaccgaagaatggttattgctgtagccagagacacaattggcttgatgtaatttgtttagatggagttgttttttgatttctagaatgataaaaagtggtggtttatggaacacttggtaattgggaatacttactgcgacttattttccttggaagagaaataaaatgtacaagcaattgtcaattttatagcagttctgaagccatcactttaggatgttgagtcttccataaaccaatgagaaacatttatgaagaaaatattcttcttttttctgtgtcaaaactgaatacaaagtgacctctatatatacaagtgggattcctaatctaagccatataatatgcacaatcattatctctaaggaaacaataactaattaggagagattctctcatccataaaaatagaaaatatcctaacacaatccctttaatcttggcacttaattacaaatcataatcccatatttccacactccccctcaagttgggtagtagatgtctagcattcccaacttgcttttcatgttttcgttggtggcctttggaagtgcctttgtcagaatgtctgctgtttgacgacttgaaggaatatacacaagtctgattgttcccccttcaagtttctccttgatgaagtgacggtctatctccacgtgcttggttctgtcatgttgaactggattctttgcaatacttatggtagccttgttatcacacaaaactgtcatagtggagtttgatataattccaagctccttgagtattctttggagccacattccttcacatatcccatgagccattgcactgaattctgcctctgcactgcttctcgccactacggactgcttcttgcttctccaagtcaccaagtttccccacacataggaacaatacccagtagtcgacctccgatctgtcaaggatcctgcccaatcagcatctgtgaatacctcaacttccctacttgaggttttcttgaagtagagtcctctacctgggctctttttaaggtactgtaaaattctgtatacggctttcatgtgtctttcagtgggattgttcatgtagcggcttaccatgctcacagcgaaaccaatatcgggccttgtgtgagttaagtagatcaactttcctactaacctctggtacctgtctttgtcagttggatgactgtcattatctttatcaatcttaccaataggatccataggcgtgtccactggcttacaacctagcatcctagtctcctgaagtagatcaaggacatacttcctttgcgtgatcacaattccctctttagttctgccaacttccatgccaagaaagtatctgagttgtccaagatctttgatttcaaattctcttgttagcagcttcttgagattctctatcccttcttcatcgtctccggtaattataatatcatcaacatagacaatgaacagagtcatttcaccttccttagagtgcttcataaacagtgtgtgatctgcttgacattggatgaacccatgttttttcacaactctagtcagtcgatcaaaccaggccctaggtgactgttttagatagtatagggactttctcagtttacacacttttcctgaattttctggagtttccatactaggtggaatcttcatgtagacttcctcttctagttctctgttgagaaatgcatttttgacatcaagttggtgtagattccagtccaaatttactgtaactgacaataacactctgatggagttgagctttgctactggtgcaaatgtttcttcataatcaatgccatagaattgagtaaatcctttagctactagttgagccttgaacctgtttatacttccatccagattgtgcttcatggtaaatatccacttgcatccaacaggccttttaccctctggtaattctgagatttcccatgtcccatttttctccaaggcttgtatttcttcctgaatagtagtcttccattcaggttgttgaagtgcttcttggatgttggatgggatacgatcatcttcaagagaagtgatgaacgcttggaaattctgtgaaagctttccataggacacatgattactgattgaatgccgagtgcagaaccttacacctttccttaaagcaatgggttgatcaagatcaaggccattactggaatctagatcataaattgtgttacttggttgtgagtttgggttgcttggatcctggttcaattcttggttctgctcaggtggagtgctgtcctcgggctccttttgaggaggtttctcgggcttttcctttaaattttttctagaataaactattacctctttactgccttgtgtagttgactcaggtgtgacagaagggacatccaaggaattgttttcggggacaaaaagagtactatctgtttgaggaggcagtgatgaactcaaaggagtagtgctgatttcggtttcccaaaattggaattcatttgtggaccaattctccccctgaattgcagttttggggtagaagggttgattttcgaagaaagtgacatccatggaagtgtagaattgcttggttgttggagagtagcacttgtatcctttttggtttggtgagtacccgagaaagatgcatttagtggttgtcggatcaagtttactacgttgggacttatggatgtgaacgaaagcagtacaaccaaatactttgactgggatagacgagattattcgagcggatggatatgcagcgaggaggatttgacatggggttttaaattgaagaatcctagaaggcattcggttgatcaagtaggttgctgtgagtatagcttcaccccataattgtttaggcacgtttgaagctatcatgagggatcatgcaacctccatcaaatgtctatttgtcctttctgcaactccattttgctgtggagtatcaatgcatgagctttgatgtacgatgccattctccagaagatatgacccaagaatgttgtgatagtattctcgagcattatctgtccgaaggacttgaaattgcgtctgaaccatgttgttgaagttttcaaatatttccctcacttctgatttcttcttcataaggaatacccaagtcactcgagtgtggtcatcaacaaaggtgacaaatcatctagaacctgtaatgttgttgattctagaggccccccaaacatcattgtgaatcaaggaaaaaggatgagatggtttgtatggttgaatggaataggagttgcgagtatgtttggacaattgacatatttcgcattgaaaatttttggaatttttattgaataatgatggatatagtttttcaagataggaaaaatttgggtgacctaatcggtagtgccataacactatccgtcttggtactacggttggaaactacacaagcagtcttcattggtagccttcaaatttcctcagctctcagaaggtaaagtccagcacgcacctcagcattgccaatcctcttcccagagttcaaggcctgaaattcacacatgtgaggaaggaatttagtaacacaattaagatcctgtgttagtttacttatagacaataggttgcaatccaattttggaacatagagcatggagtgaagagtaatatccttggaaataataactgaacctgtgccgaataccctagaaagggttccatcggcaatttgaacagaggaattgttatggcaaggagtatattcatgaaaaaccatgagattcccagtcatgtggtctgaagctcctgagtccactatccatgtagtgtgattttcctgtctaacatttagggcatgggaaaaaatacctttctgggctacagatgcggtaccaatagttgttccagttgattgaagagtctgttggaacattttctgtagtgcctccaattgctctttgctaaacggaccaggatttgagatagtgccagatgtgtcttcttcggctgcagcgatgtaaccccgaccttctctgttttgctgtggccgagaaggtttccaatcagcaggtttaccgtgtagatgccaacaagtctctttcgtgtgtccaggttttctataatggtcgcaccatggacgattcttcttcgtttggtggttgttgttgttggattgggttccttgtgcaactagggctgagttctcaagatttttggaggaattttgggttcccaacatcactttttgtccgctttcctctctgcgaatttcagaaaaaacttccctaacactaggtaatggcttaatacttagaactcttccacgtacctcatctaaattcttattaaggccaagtaaaaatttgtagatgcgttccttttcaatgaccttcttgtataggagtccatcttcaagacacttccaaaccaattcttcttaaatatcgagttgttgccaataccgtgtaaggatattaaaatattcggtaacagttgaatctcctcgtcgaagatcttggagaatactcttgatttcgaaaatcgctgaggtattatcgatgttggagtaggtctctctagctgcatcccatatctcctttgctgtgccataatacatgaagttttctcctatgtcattggtcatagagttaattaaccaagacatcaccatactattttccaacttctaggttcggtatcctggatcatcttcctttggctgaacaatggctcccgtaaggtattcttccttacctttcccgcagatgaagatccgaacagactgagcccattgaataaaattctgcccattgagtttatgacctattatgggaagaatgatgccgtctgtggtgctggcactgccggagtgaactgcttcaagtctggacgtcacttccgagtttgatccttccgttctgctctccattgaaaaagatgattttttttttttttttatatgtggttcagatttgaatgctctgataccatgaataaaatattcttcttttttccgtgtcaaaactgaatacaaagtgacctatatatatacaagtgggattcctaatctaagccatataatatgcacaatcactatctctaaggaaacaataactaattaggagagattctctcatccataaaaatagaaaatatcctaacacaatccctctaatcttggcacttaattacaaatcataatcccatatttccacaatttaaaaatataatttcaagtgtccatgctgtttctttgctttatctaaattttacttgaagagtggttcatgtacttgcaggcccagtctcacaacttttaatcttttccagaaattagaccgacaattgcaaacaagggaaaagtactgaacactttttattaccttgtttgttacaaatgcttctccttacagtagagatggcattctttccgtgtagacagttctaatgacttaggtaacagggaccattatgtataacaatccaaaagcagttttgacgtatccaggatgcattatagatattgagaattggtagctggtagatgtcccaaatctctcttgcacattcatgtcttgtttcctatgcttttggtgttgcttttcagtactcacaacattaagttttatgttttataggtgaggtctcat

SEQ ID NO: 10456 - DNA, 5250 bp, Vitis vinifera
  Intron number 5 from transcript GSVIVT01023612001 (locus G SVIVG01023612001) derived from phytozome v7.0 (chr-ID chr1 1; pos 8002215 to 8007464 reverse strand)
tagacagccaagtttgagaaattcaaataactgtaagtaaatacatctctactgtataagtgtattgtacgtcactttcaaattattattattaatatgcagcattggagaatgtatgcacttctaaatgtggtcctaactatgcttgcttaattgcctttgtcaattagaaatttattttgacaacccagtgttactgtcaggattttttatatataattctataacatatatttcatttatctactctttgtagaactggtggttgtggcattcacaatgacccttggtagtctattttagcttgggttttaatttagattttgtgagggagaaggatgtacttatggataagagtcttggtgccctagagcctagcttatgacaagtggttgaagataggattggggattttgaagttcaacggaaacaaatatgtttccagtgaaagagggatgagagcttcagggtccttatgggaggtttaatcacagaatcagattggtagccattgtctcactgcttcacctttcatgtagccttattttgttgaaataaggttattttttatgccatggcagaaaaggttttgatacagtaatcattgaaattgcagtataattcaatgatattcaagtttaccaattattgttttcttattgtcaaaaatcttacaaaatttgtcccgacaattgatgcatgtgctttttcatcttgatttatgtctgaggacaaattgctcttttgcagaacacctgaaaacaaaccatttattgacttttagaatcacttacatatttctatactggggcagtagcattcaaaaattatatttggtttgtaggtgaatgtgtgtatccggggtctaccgcatgtccttttcctaatgaaaaattgggatattagagtttccctctatattaaaaaagaattttttttcaaaaatcacaaatgatctgtcttcacaaggccttaaatacctagaagtaacacatttacaagataaagagattcacatgagaaaagttcaaaatcaggttcaaagtataggtgaaattagatctttttctttttcttttgctctttttgttaaataaaaggacaaagttcaaattagaaaagttatagatcaagttagagcaaaatgaaaaatatttatgcttaaaaaccacaaaaaaataaaaataaaaatagaacattgatcaaaggatactaatactaaaacttatagcttcttgtttatcccacatctatgtcttggctgatctcatttctatcaaaggtgagcatgtagattatcaggcaaagtcttgtatattttgatttgtgtgaaatccctcaactgaaaattttctaatggttggttggataggataaaatgtgtatatcgtaggatattatatgtcactggataggatatgtataacctaaaatatcattttccataggataagatatttatatcataggatatcatttctgatggaatatgatatccttagatgttatatgatatattcaatggaatgatattccaaggtattatatccaatgaggtatgttatatcatacttatatttggtttgtaaaaagaataaacagtggaatggaaaacattttgcatttcaatgcatgatatttgtttaaaacaaaaattatattgtacctcaatattgactattaaaaaaatatgaaactcctcacatatttagcattatttgaaaaaaaatcgttctataatttataatttagtaagtaatttttattttttactactaatatttatgattaaaatatttaaaatttataaataaaaatactatattatattgttaaatatgggaaataatttgtatatattaaataatacatatattagtattattttttgtgaaatattttatacataattttttaaatctttttctttttttattcaaaattatttgttttacaaaatgagtaatatagaaacttcaagaaaaaaaaatgaagaaaattgataagtgtaaatttaggattcatggttatacatatccctatctcaactaggaattattgtatcccatggataggggatataaaaaggaagtgagatgatatatctcactacttaccctatttcatgtttagttgcacatcacttatcatattccatcttcaactaatcatgagataggatatattatttcatctcttatcttatctcttcctatattcagctggccaaacatggccctaaggttttagatgtgatgcattcccaatcaaatggcctttttaatataaccaataagaagtgagagacccatgccaataactactttattctatgactgtaaagatgattttttttacactattcgactctgaattattcaattgccatcaagatgatgtttttctgccctagttaactcgttctttctctctttctctctctcatgtttgctgtttgtcttttcccttcctgttttctgctgctgctacagggtatttttgtgcatttttttgccatgtgattatttaccccctcaaatgattgtattttgttctcatagcatttgcagaaactcaaaatctattgctttacagagttctgtttgggttttaatacctgatatcaaaactattcctttgggggtaagaggggaagttagggttgaggatgcaccagggctggggagtgtgtgggtggtcctagtatgctagatatatatacaagagccccaaatagcaagaaaaaacagaaacacaataaaacctatttccatcctgtacaggtgacaaaatctaagagaagatttgatgaccctaaaggaccccttgcccattttacctgaagctatatccaaatgatcccaaaacaagcacaagagggcctttccactacttgctgagaaaactcttgcaccaaccaagtaaaacctcctttgctgattgactctctgcaaagcaacaaccagtaattaaatattcatccttttttgaaagttgatccatcatcagaattttcttcccactatcttccaagcatagaaattcacttcagaaggagcatatgagacccatgcctcctaaaggcaaacagttctggtagggctatatcccaaataagttggatgtatattgttggcccattacctacaacttgcgtttttgagaaagtataacatggtattaaagctttgttttctgagagtttttgaattttaaccttactacttgtttatttctcctatttattgagtccatggataaacccaaaagaaagcttcccatgaagtgggatgtcagggctatagcccaattaagcttaatatacattattggccagctacttaactacttgaacttttaataatattggtagcttaacagattccaaagcctaaaaagggatttgacagaagatcttatccttggtgctagtccgctccaaacaatccttgaaacctctatgcacctctatcaactgaaaagagtctcactctccagctctcaatcattaaagctcctgataaagcaaggactccaatgactgctaccaccctgcaaactcccaaatatccaccaccagatcatcctttttcctggcaatgttaaacaaagagaagaaggaatctcttagcatcaatttttttcaatttgtcttcaaaagcaaaatgttgaaactcatagagaaaagaaaattttttaaatcaccaatatttttttttgtcttaaacagtgaagcaaacaaaatactatcttgtttgatactctgtttcatatttgttactttgaattatgtgtgaaggttattcttaaattcattttttttaagttgaaaaaaattgtgattcaactttcaatgacaatggatgtgattcaaaattctattgtccttttgggattacatccatctattattatatcatataatagagcaaattgaagcttctgaaaatagcaaaatagcattaacatattgagcatggaagatatttatataaccatgatgtgttagctcaaaattcagaaagcaaagctgtcaattcatgtatagtaccatgcaaggtcaattaagggttctctgaaatagtcaaaagacaaccaaaataaatagataaacagataaacctatcaaaataaataaataaataaataaatagataaacagataaatagagcaacatactctttcctgaaaggaaggcaccccattgagccagctagtccagtccagttttcaaaacattggtgtaaaataaataattaagtccaaagttgctgctgttttcatggataaagtttagactgtatgagagttgagagatagctaatattattttacttgaaatcagcatatcatttctaatgaagtgatccaactgtaactgcaacatattatgttccaaaataagcaggatactgtatacccattcttgttccatgtaccattgcaattgttctctgattaagttagccaactggcttcaacaaaccatgtgccatattgagtggcaccaagtattttttccttgttccacatacaaagatgagttgtttgtttaataatgagaatgatagtggaattattccaatcatgctatcattcctatgttagcagatctggctttgttagaacctttcaaacgatgtcagttctattcatgtccccttttcccttaagtcaataacttgacataattttcaggccttagtgagggtgaactggttttgccatgattatacaaactgaatgatagactcttccacatcaaaaattcctgttaaaacaaaagaatactactgacagcatatcttgcattgaatcatagtggttaatttgggtttatattttttgcatggaaaaggttaaaaccttaaggtacattacatccacacaactgctagccatcttagggtgcttcttcaactgaaaactgatatggctattttccaatactcaaaatggttctagtgtccctcttccctggacgctaccattattcctatattcatcttagtttattagttgtatgatacccacctctgttgccatgctgcactacagcaaactgtctactgtttgattaataatgtaaatggatagcctttgttctgtgtctatgtttcagggttgcagtgatcatcagtatcctctacaaagatccatcatttattttgttattcttgtaaaattgaatttttttctgatctgtttactttgttcctttcttctacagttgctctaaatagcatctt

SEQ ID NO: 10457 - DNA, 6349 bp, Vitis vinifera
  Intron number 8 from transcript GSVIVT01013291001 (locus G SVIVG01013291001) derived from phytozome v7.0 (chr-ID chrU n; pos 69311 to 75659)
tttgttcaaccgacagtgagtcgtgtggtaagcaggtaatgacttgctaaaaaccattactgtgccactgtcaagtactttcaagtttatcatggtgccttcctgttgaatgacagttatttatttagttgggtttaacttgtgactcgatcttggccatggtatcatcaggactcaatattgatgacactgcttcattgatttgctgagttatgaaatagtgataaaaatgcaaaaaaaaaaaaaactaaaactggttaagacttagtaaaaggatcaagctacacactgtaatattgatctttaataagttgaagaatagagtttcatgggaataattttctttcactgagatttttcttttatagagtttacagcatatacaaatctttcaaattaggaaactaaatcactaattaaaaggaaagaataactcctaacaattactttcctaaaaatacaaagattgacaactaataaataactcataataattactttcctaaaaatacaaagattgacaactaataaataatttacaactttacaaagttatttctttccatatcagtttcggttttccaacactccccctcaagttggcttaaagatatcttccagagccagcttgccaactagaaaatcgaattacctcttgtgtagtcctttggtgaagacatcagccacttgttcctcaatagggatataggtcatacagactaatccgttgtctatcttctctttaatgaaatgcttgtccacttccacatgtttggtgcggtcatggagacccggattgtgagctactgaaattgttgccttattgtcacaatacaacttcataggagatgaacctgtcatctttaactcttccagtaatcttcttatccacataatctcacaaataccatgagctacaactctaaactcagcctcagcactacttctagcaaccacgttctgttttttacttcgccacgtaaccaagttgccacctacaaatcaacaatacccagaggtggaccttcgatccactatgcttccagcccaatctgcattagtgtaggtttcaatttgtaggtgtccttgtgacttgaactgaagacctctacctggtgtcccctttagataccttagaatcctgtaaacagcttcaaaatgctccggtcgaggtgcatgcataaactgactaaccatactcactgagaatgctatgtcagggcgtgtatgggataggtaaatcaatctcccaacaagtctctgataatgatcctggtccttcacattcttagcttttgtagactgcagttttacattcggctctataggtgtttcagtaggcttacatcctaacatacctgtctcatcaagaagatcaagaacatacttccgttgatttacaaagataccttctttggacttagcaaactccatcccaagaaagtattttaatgcccccaggtccttaatctcaaattcctcagcaagtttccccttcagcttctctagttcattacaatcatccccagttaacacaatatcgtcaacatacacaattaagatggctactttaccttcatttgaatgtttgtagaacatcgtgtgatcaacttgactttgagtatatccataatgctttattactttgccaaagcgctcaaaccaagctctaggcgactgcttaagtccatataaggacttcttcaatttgcacactttcccaactccaaaactttcttcaaaacctggtgaaggattcatgaacacttcctcctctaggtctccattaagaaaggcatttttaacatccaattggtgtaagggccaattggaatttactgcaagggacaacaaaactctaatcgagtttattttagctacgggggcgaaagtctcttggtagtctatcccataggtttgagtaaaaccctttgccacaagtctggctttgtatctctcaacacttccatctgctttactctttattgtaaacacccatttgcaccctacaacctttttttcccttggtaaatctacaacctcccaagtgccattctttttaaggcattcatttcctcaaacactaccaatttccaactcggttcatctagtgcttcttgaatatttctaggcaccacaagttttttgaaatatttgtagtgaatgctctatagttgtcagaaagtttactataggagatatatttggcaatgggatgtttagtgcaggctcgggttccctttctaagagcaatagggagatcaaggtcaaggtcctgtgtaggaacaattggggctaatcctaaaccgggttcgggtgcagatagttctggacttggaccaaagtgtgatggtaaacttagatcagtaacagaagaagaagaagcatgtatatgagtaggaatagaaggagggttacctgagacatttagagagccattgcccagggcttttggttgaccatgtgctgggatgatcggctagtctttacttcttctagagacttttttccttgaataaaccataggctcaagattgtttctattttttttcattcgtactatttcttcttttgacagaccaatttcaaattaggatttagtaggtttagtttccttattttctttttcaagagagatatcaagaattacactaggcaaaggttcaacaatttcccaaaaatttggttccactaatttctccccctgaagtaaatttttggtaaaatatgagacattttccataaaagaaacatccatagttgtgtaaaaacattttttcaggggattaaaacatttgtaaccctttttatcaggagtatatcctacaaaaacatatttttctgctcttgggtctaacttagatcttgacctttttggaatgtgtacatatgcagtgcaaccaaatattttcaagggtaattcagaattaattcaagattctggaaatacctttttcaagtactccaaaggagtggtatactgcaaaatttttgtaggcatcctgttgattagatatgaagcagttagtatggcatccccccatagtattttggaatattcatgtaaaacatcatagcccgtgctacttctaacaagtgtttatttttacgttcagctattccattctgttcaggggtatcagaacacgaggattgatgtaaaattcctttctcgtttgaaaaggtttccaaaactttattaaagtactcggtcccattatcagatctcaaaatactgatttttgtttgaaattagttttcaatcattctgtaaaattctttaaaaatcctttcgaattcagatttttccctcattaaatatacccaacaaatacgtgtatggtcgtctgtaaaggtcacaaaccatttttttcctgaaattgtggttacttttgaaagtccctaaacatcactgtgaaaaagataaaatggttttgatgcatggtagggttttggaatgtaagtttttcgttagctctttgccaataaacaacttcacattgaaatgataaaggatcaaccttttgaaataacattaggaataaatgttttaaataagaaaaactaggatgacctaatctgcaatgccaaaccattatttgatcatcaatagaaagagaactaatactacttagtccttgagcaattttattactaggtaaattatcctcgaaataatagagaccattgatcatcctagcattgccaatcttcttccttgagctctggtcctgaaaaatacaatgggattcatagaagataacacaacaattagaatctctagataatttgctaacagacaagagattacaagtaagtttaggaacatggagaacagatttaagatctattccctcagagatttttattagaccttttcctgcaataggtgagaaattaccatcagctatccgaacctttttatttctaggacacggtgaataggattcaaacatgtttgaggaattggtcatgtggttgaatgctccagaatcgattatccatggactagatttaaaacgacaagatagaacatataattcattacctgtgtgtgccaaagaaacactagaagtaccggatgtcaagttggatttcagcagtgcaagaagatgctccatttgcttagtggtgaaggggctggtcttagcctcattagcagtaggaataatggttcggcctggtttgtcacctatttttcctttccaatttgcaggtttcccatggattttccaacagttttcacgagtatggcgatgtttgttgcaaaaatcacaccaaatccgtggtctttcatctgatttgcgctgaaacgtagcagctttattacagcctccacccatggtaaccaaggctgaaccttcaatagcaactcctggtcccttcttgcccagcatcatattcctccgactcttttctcttctaacttctgataaaacttcaccaattgaaggcaggggttgtcttccaatgtttctcccccttacctcatgaaactcgacattaaggccagccaagaacttgaagatccgattgtcttccatggtcttcttatgatgaagtccatcctcggcagatttccactcataggtgttgaagaggtcaaggtcttgccagatctgcttcaaggagttgaagtactttgtgacgttgtccccccttgttgcatctcaccaagtttcagggttaattcaaagatctatgattgattccctaaatcagaatacatttgatttacattctcccaaagctcttgtgctgttggatagcacatgtaattagagctaatgtcttcttccatagaattcacaagccatgtcaccaccatggaattctcagcatcccatatagcgtagttcggatcatccactgcaggagccttcttttcactcatcaggtagcccatctttccatgtcctctgatgtacattcaagctgattgagaccatctcagaaagtggtcaccattcaagcgaatcgtggtgatttggacagagtgagattctgaggtggtaggactgatttttgaagaattagtgatgataggattgttcagagaaggttgaggaatagtagtggactcgtttgaaatatccgacatggttttagagaacagggattgaaagagaggaagaatgaggatttcggcaagcaaattgctagctctgataccaagttgaagaatagggtttcatgggaataattttctttcattgagattattcttttatagagtttacagcatatacaaattcttcaaattaggaaactaaatcattgattaaaaggaaagaataactcctaacaattactttcctaaaaatacaaagattgacaactaataaataactcctaataattactttcctaaaaatacaaagattgacaactaataaataatttacagctttacaaagttatttctttccatatcagtttcggttttccaacataatcacgctaacatataatatttaaataacaaatattagttgttattttctttaataacggggaatccaccctgatggcaagacatttatcttgactgctggtgaataaactttgggtgacattggctcacccctttgctctacaccatctaaatattggggaggttcgaattcaggacctctggttcattgccagagggcactatggctgagctacacctttggggactagctcttatcagaatattttcttatgtgtggcatctgattttaaaaattgaattgactttccttcattatcacaagcatcttgtctttttgttctttttttggtcttaactaattttttatttgaagataggagatcattctgaaagagtgatgttcaattctctcaaaaaattctattattcaatttcttttcttttgtaattgtttttttttttttgggggggggggggggggggaatagaatcttacttacttacttcaggcacttggggttaaatcattgatgagttgatttgatttctattgctgcttacaaattatctagtgctcccaatatttgtttggttttgccatgcattagtaatgcattagtggataatactggtatttgcataaagtattatggcctttaagtattgacaacttgcttgaggcatgctctctctctctctccctctctctctctctctctatctcttctttcttcttattttatatatatactgtaaatctaaattagatctggttaataccaatatgagttaggcaaaccatcttggtattagctcatactccataatctatgtgtttttagtgttgtctatttctcattcttactatcaattttgatttgttgagaaatggtattttagactcaaatatat

SEQ ID NO: 10458 - DNA, 2020 bp, Vitis vinifera
  Intron number 2 from transcript GSVIVT01013852001 (locus G SVIVG01013852001) derived from phytozome v7.0 (chr-ID chr1 6; pos 5226269 to 5228288)
gaggaggtgagttttggaggtacgaaattctctcaaaaaggcatgcatgtgacaattttcttgcataaaaattaaaaaagaaaaaaataaaaataaaaagaagacatttctgtaggaaatctaggagatattttttgttattcaaatatttctattttgtttaaataataaatctgattatatcagattctaggagttagttgctgttcttttaaattattgcttagagtttaaatttaaatcttttatcctgttttttaggcatcaggttgttcataagtctcctagtttctaggcggcaaaattgttagctattctctagctatctatttaaatagttgtaatcgccagctttgtaatcaatttgaatttcaaaagagttgagaaatcagttcggtttcagtttctttcattatgtcgttttcaaaagcaaacctgtggcattataacttcctttaggcatcagtttctagtgttgagaaaagatgggctaatgcatcagttaatgtcctatcctaaatgtattttcaagtagcattacaaacttatagtgccacattcatggggatttccaaatattgaacagctgctagtggtttcagaagatcatcagaagattatgtagcatctaaaatcagatccaatgatggaaatgcaaggatgaaaagaaaaaagttaccaaattgagctaatagatgagaaaatcttggaaaataaactgctattctgttgcagtcagcacaccctgccccattaagcagttgatgctagtgaaaaactacagttgattggcagaagttcattctcattctttggtatttaactttaaagagcttggacctccatcatatattcacttgatttttccctagcctttgtgtcctgcctcactgttactttagattccttcttttccaaatatttgtgcatacatttttcttgttagtaccaattgaatctcttatagttttgttgcatattaaaagaattaaagagatttctggctcttaaatctccaatttctagtcttcaaaaacaatatggtttcttgatataattcgacaaagcattctgtattattttttggtaatggtccattaaaattattcaaggaactatcactattattttaagataataatacatctccattaaagagcatgatatatattgtgaaccctaatcctacaagcgtaagcatttaggaaaattggtagttcaatatggcattagagcctcgtttgactggaggtcgtgtgttgctgtatatttatttccctaatttattgagtaaatccaaaagaggctaattgtggttgtttgtctatgggcttgtgcatctctccacatgagggattggggctgcatgtgaagtaattaaagagcatgatatacattgtgagcccaaatcctataagcttaggcttttaggaaaattggtagttcaacaccctcattttatataccatcagtatcttacaagttttttccttatccatatttatgcttaaaaatttatttttttccttaggaagttccactgctaattttaacacatttccttcccttttactcttctctcacttaatatatgcatctaatatcactagcataagtcatgtggttagatacaatcctaatgtaactttataatccttattccttacacttttttttttttttgatcagaaacgaagaagattatattaataaaagaacaaatacaggagagaaaaaagagacaaaataaagaataatgtaactttataatccttattccttacactttcactacaacctcatttgaagaaatggtcaatctgatatttgtctgatcctatgtttgttttgtcattaaagcactgaatgctctcagtctatgcttattggggtttatgaatgaatgctagttgcccatggttctactcttttcccctaattttgtggtatcacaattctgatactgatgtttcttaattttgtaggttcgcaggctgaggatacaacaaagaattaaaag

SEQ ID NO: 10459 - DNA, 10145 bp, Vitis vinifera
  Intron number 4 from transcript GSVIVT01036166001 (locus G SVIVG01036166001) derived from phytozome v7.0 (chr-ID chr6 ; pos 19899965 to 19910109 reverse strand)
caggtatttgttgtgtggtgtggactggtggagtcttaaacttttttattatatattatttattattttattacatttattttatctttattttttgcctgcatttgagaactgcactaacctcacaaatcaacgttttctatttactatactacttatatctaccaaagttttctacttacacatcaaattgagcacatgcgtgaagggatttatcacgatagttcgagtttattgaaggtaaaacaagtctaatcagtcttcaggaaagtttgtcattttaaagacgaggcaaaactaatgagatttttttcttttcctttttttcctttttcttttctgaatggggaaatgcatgctatatttcggaaatctcattaaaaattttagacaaagtgaattcatgagaattgcattctcttcatttatgcaatatttatggtgccttcccaataaaattggcatttctcattagttacttaaattggttaggataagagtgcgggagattgaagtaacaactttcatacaatgtgacagtttccaaagtcatgaattatagcaagaaaaatatcctttctagaggaagtgaagaccatatttaagatggagcctacgggattttttcttttaaaaaaaaaaaaaaaaattcttttctccaagtacagttttcaaaactgtttctgagatagtgtatagaacagttgttacttgttagagtttttgctcttgaaacacaactagtaaggtaagttgaaaggtcttaaaaagaaatatagtgttattgatgtaggacaaccctaggatggttgcctacactcaagggtagatgggctagggttttatttttagggtgtaaggagaggaacaaggaataaattttatgatagagaaaattataagataagaaatagagagaaagaagaaacaatgaagaaaagatagaaaaccttagagtctcattaaggccttctaggagtctcacctagaagaaaatcaatggagcctcaccattgaaggttgcaaccttgcaatgaaagaaagtataatattattcatcaaattcatccctttgatttacattgattagcctatttatatgcttctctaagaaatccaaagtctactaggactctaataacctatcatgactcaaattctaattatattataactcaactagttaatccttattagactccaacaaataccaatctcaattcaatcctaattaatattaatcctacttaaagtttacttaggtcttcattttcttccttgaataaactttaaaaggctttcccccatcagccatccagctttgtttggttgtacaaattgaaaacagttacaaataaagaaataaaggacctaggaagtattcttgaaatgaattttctattctttagaaaagaaaacgattttctaatttaaaaaacatgttcagcaaatctttgattgaaaatagttttttgggattttgttttgaaaactgattattttttagaacaagtttgtattgttttaagttgtttttttatagaatattctgagaaaaaattgaaaatatgtagaatactttaagaacttttggattgtatataagtgcacactaaaaaaaggaggccttgttccagtcgggagatgggcgagagctgtggtgtgcgaatgtcatgttggttctgttaattggactgaggtcggccgggctttggcgaaaagattagggcataaaggtgtggtgactatcgtccccttctctgatggaaaaggattatttcttttggaaaccatagaggaagctttatcactccatgatttaaggtttatcaggatcaagggtgggcttatagtcttgttgagaagatggtcgccaaaggaaaattcagtaatagtggggaaattcagagaaggttggatagaattatggggtttgccatttcatttatggtatgaggtacatctgaagaaaattatggagcagtgggggacggtgacagagatcgattggagaacgatgaaactgtttgatcttagcaaggcaagggtgagagttgtaatgaaggaacgatcaattctcctagctttaatcgaggtattagatgggggaagggagttcacagtttcagttgcaatgactggagaggaagacattaggcaaggaagagaaatgggtgagtcaactcagcagaagcttgaacctcacttgtggacaggtggcagaaagagggctgaggagtctaaatcaacggctgtaggtagggcttctaatggggcaattggcagaatgaaggagggaaaagtttgtcaaaaggttgaatttgctcttgtggggacacgtggcaagagaagaccgacagtggggaacaactggtcccaaccatcccaatctttcagtttgaattcaaatattctaagaacagggtatgttgggccaaggtaggatggagatgtttgggctggaagggacaaagcccaatcaactgttgaggattggcttcgggcctccaaagaagggagaagagcccaatcttctcttaagcccagtccacagttgaaactgacttgggctggaagaggggagtttctttaattagcccgcttttgttgttgggccaagaaatgggaggcaaacaacccatctctgcgaagggctctttacgtagagatgacccctttgcaaagggaaaggggaaggtaggctatgaggcttctgaagctcaatcgaggggttccgtgttgaagtgtggttcaaagaagctgtggaatgccctgttccctccaagttctggttgccgacaagggggtcaaattcgaagcgagcctctaacgcttgagagaccgtcgttagctagtgatgatcttccaaaggaagattctttcgaagtgggaacacagttggaacggagcttcagtgcgagtccaagtcgttcgtcagggagtcgaaaaaggtgtttcggggattgggaaggaatgtcgccgccaagtggggacgcggatcgaaggtctattcttaaggctccttttctttcaaaagggaaggagaaattgcacaacttctctaaaggtgaagatagagcaggttttaagggttttgcgggttttcctcatcagtcgcggtttttccttcttatccagtaaccagagaaaaagggttcaactctgtggggtcttgtagaatgatggtagtggaaaacctcgaggtatcttcttatcaacattctcagtcatctctatctcttcttccccctccctctggcttggctcttccatacctgagtccttctgttcccattcttcccaattcagccattcagtctcagtttcctatgaaaccttaagttatatatgaaattttttccaaaaaagatgacgatggggctttttgtcttgggtctgttggcaatcctaactgagatgttgcggtgtcccagttagctagtctaaaccatttttccgagagttttaaatcttttaaatccaatcccaactcacctcttggggccctcaacttggttacagttagccagggtgatgcggagtcccccccgatgggtgggttccaaattgaaggcctttccccagcaaaatgaccaaagtctgtgaggtcttaagttctctggacattaaggtgtattcaaggcagaagaacagattttacacatatagttgagatctgttggtgttggtttggaggtttagggtgagtgaggtgtatttatgaaaatcatcagttggaatactaggggattgggttctaggaaaaaacgaagggtggttaaggattttttgaggctcgagaatccggatgtaatgatatttcaagaaacaaaaagagaggtgtgtgacataaggtttgtaggtagtgtctggtcggttaggaataaggagtgggatgctcttccggcgtgcggggcttcaagagggattttgatcatttgggactcaaagaaattgagcagtgaggaggtggtaattgaatctttttctgttttaatcaagtttttgttggatggatgcggacccttatggttgttcgcagtttatggcccaaacagtcccttacttaggaaggatttttgggtggagctgtttgacattttggcctttcttttccattatggtgtgttggcagtgattttaatgttataaggagaagtttagaaaaattgggtggctctagtttcacttctagcatgagggattttgatggttttataagagattgttaattacttgatcccctcgtacggaatgcccctttcacttggtcaaacatgcaagagtcatcggtgtgcaagagattggatcggtttctttattcaaatgagtgggagcttttcttccctcaaagccttcaagaagttcttcctagatggacatccgattgttggctgattgttttggataccaatcctttcaagtggggcccaacaccttttaggtttgaaaatatgtggttgcaacatccaagtttcaaagagtgctttagtagttggtggagagaatttgaaggcaatggttgggaaggtcacaggttcatgaggaagttacaatttgttaaggcaaaattgaaagattggaataagcatacttttggaatgctaaaggaaaggaaaaaaaagcatcttggatgaaatatctaacattgatgccattgagcaagaaggggttctctcttctgatctttttgctcaaagagttttaagaaaaggagagctagaggaattaatattgagggaagaaattaattggatacaaaaagctaaggtgaaatgggttaaagacgaggattgcaattcaaagttttttcataaagtggctaattacaaacgaaacaggaatttcatcaagtttttggagaatgaaagaggcttggtgttggataattccgagagcatcatagaggagatcttactatattttaaaaaactctacttgagtcctcccggagagtcttggagagtcgaaggcagagattggtccccaatctcataagagagtgcgtctaggctggattccccttttttcgaagaagagatctttaatgtcgtttttcaattagatagggataaggcgtcagggcctaatggttttaccatagcaatgtttcaggattgttgggaggtgatcaaggaagacttagtgagggtgtttgcagagtttcacagtagcgggattattaatcaaagcactaatgcctccttcatagttcttttgcccaaaaaaagtcagacaaagaagatttcagattttagacctattagcttgatcacttgcctatataaagtaatagccaaagttctatcagggcgattaagaggagtactacacgaaactatccactctactcaaggtgcttttgttcaagggagacaaattttggatgcagttcttatagccaatgaaatagtggatgagaaaaggctatcaagggaggaaggagttgtcttcaaaattgactttgataaggcttatgaccatgtgaattgggattttttgaatcacgtgttggagaagaaggggtttagtcctaaatggaggaattggattagaggttgtctatcttgggtctcttatgctattctagtgaatggaaatgctaaagggtgggtcaaggcatctagaggattaaggcaaggtgaccctttatcttcttttctgttcactattgtcgcagatgtgttgagcagaatgatgttgagagctgaggaaagaagtttgttggagggtttcaaggtaggtaggaatagaactagggtgccccatctgcaatttgcagatgacaccatcttcttttctaactcttgtgcggaagaactgcaaactcttaagagtttattattagtgtttaggcaaatttctgggcttaaggtcaatcttgacaagagtaatctttttggcatcaaccttgatcaaaatcatctctctaggctagccttgttgcttgattgcaaggcttctgattgacccgtactctacttgggtcttcctttgggagggaacccaattgcttgtggattttgggatccaatgattgagagaatctcaaggagattagacgggtggcaaaaggcttacttatctttcggaggtaggataactcttatctactcttgcctttcccacattcctagctactttctctctctgtttaagattcctgcttcagtggctgcaaaaattgagagattgcaaagggatttcctttggtcaagggttggggaaggtaaaagaaatcatcttattagttgggatgtagtgtgtaagtcgagggtaaaaaggggtttggggtttgggaagatttctttaaggaatttcgctcttttaaggaagtggttgtggaggtatcctagggaaagtacagctctgtggcatcaggtcattctaagcatttatgggacacatataaatagttgggatgccaacactttagtcagatggtcacatcgttgtccttggaaggctattccacaagtcttttacgatttttttcaagtatactcggtttgtggtaggagatggggaaaaaattcgcttttgggaggatttgtggtggggggactagcctttgaaatcccaatatccaagactatttagagtagtcacggataaaaatagtcatatttcttcaattcttgattctgtttgccctttctcttggaactttaatttcagtcgtaatctttttgattctgagatagaagatctataatgcctcatgcaacttcttgattgtatgcatttatccacctcggctttagatgcaagatcctggtctctatcttcttcaggattgtttacagtcaagtctttctttatagccttgtcccaagtgcccgatttatctccttgttttcctactaagtttgtatggaattctcaagtccctttcaaagtcaagtcatttgtctggttagtggcacacaagaaggtaaacactaatgccttgctacaattgagaataccctacaaagctcttagtcctaacatttgtaagttgtgcatgaagcaaggagaatcagtagatcatcttttcctacattgttccttgtccatggggttgtggcacaaattatttcagctagccaagatggattgggttcctccgagaagcatttcaaacatgatgtctatcaattataaaggttttggcacttccaaaagagggatagttttgtggcaaaatgcgtgcattgctttaatttgggttgtgtggcgggaaaaaaatgttaagatatttgaggacaaagttaggaattcagagaatccatgagattccattcacttcctagcttctctttgggcttattgttccgtggtttttaagggcattccccttaacatgttacaaatagattggctagcagtgtgtagttccaatgggatggtctagccaagagagcttgttcgtaattttcacagtgtagtttcttcttttattgtgttgttaagttttatctttggtgggaggatttctcatccttcttttgtacttcttattctttcaatatatatatatatttgttgtttcctatcaaaaaaaaaaaaaaaaagagttaagaaaacaaattttcatgtttgagcaaacaaaattttgttcttgaaacaattgaggactatttttatgacttattcttaaaactgttttttttttttttatcagaattaaaaactgttatttgataactgtttttgaaaatgctgccaaaaaggcccaaaggtgcttcccacttgttaacccttgtgcttactattgtttctaggatataaggtcatgtttggttggttggatgtagccttgaataggataggagataaaataatgtatcctatcccatgtttggtaggtgatcagatatggtaagtgatgcatatcctaagtgcatatcccatgaatcaatttattcttcatatcaattttttttccattttttatttttttatatcattcattttgcaaaacagaaaattttgattaaagaaattaagtttatagttaaaaaaaaaggaactaaaaaatatctataaatatattgtaaaataatactaatatatgtattatttaatataatatttaatttatacattttttttatatattgaataacataatgtaaaaatattttatctatgcattttaaacattttaatcaggaatattgtttataaataaataaataaatattcattaaattataaattgtagaacagtttaaaaaaaaaaaagttaaatataagagaaatttcatacttttttaacaaaaaatattaagacgcaatatgatttttattttaaacaaatgtagaacattaaaatgcaatgtgttttccattccattttttataaactaaatatacaagtattagagatatctcattggatataatatcttatgatatcttttccatgggatataatattcaaaaatatcgtatcctattggaaatgattttctataatatacatatcttatcaagtgggatatgatatcttaggatttacatatcccatcttatacggccaaccaatgtagcttaaacttattattgtttctgaaatccttccctctcttaaactctcaagtttttaattgtttcatggatccttctgtatctgaaactttcactactaattggaatgcaagatgcagaagagcataaatccagtttacctactttgttggcctttatacccttatgcagctttcacgactgtactgtataggctttaagttgccacaatgcttccaaaagttggaatttataattctcattttggatcagctttttattggaagtttgccatgtcaatgtgtagtttatgacatgtgctgtagcctgtagggactgtttcatgattaatgtcgttttataggcaatcagtagcagtttgacacaaaatttcctccccagatattatgaagttcatacagaaatttatatgcttttcttgataaatagatgttgatatcaaaatgatttcatctgcttgtattatcatatgtaatttaccacttctttcatgagtttgtgttccattctcttgtccactttgaatatctgttgctggtgctgcgaacttggaactgttgggtgctttcacatgtatttggtgtgcccctgagttgtacatacgttgtcatgaaccaagcctgagttatgccatgggtctcatgcttgaagcttaacccaactaggatgcccatgagccaagtctaagcctaggtggaaatagtttggctggaaaagtgtgaaaggaggagaatggaataccgacctaatccaaccatccccaatctgaacctccagatctagtctgaatttctaaatagccaaaagatgtaaaacaattatttatttattttttattttttattttgttttatttttttataataggggtgagatacaaatttgtcaaaaaatgatttcattggaacttatggagttgaaatagaaaagctgtgacttgaaaaactttggtcgtaaggtgaggttctaaaggccactacaaaattagttttacaacatttggtgagtggattaagaaaatcaaaggaaataaaaatgctgaaagtgaagacagaaaactgtaattactttaaggcatatgataatgtttacaatgaactggattgatatgcatggccctgaattcttatatctctatggtgtaggttatcagtgcacttaatgcatgtaaattttgtttaatgaattttttctatttatgaaaacttaaaaacatttagttccctaagtttgtaaggaaagataattgagagttctgctgtattttattagacttggcagtttaattaaatggaatcactttggaaactctgatttttgtagaggtacttctgttagagaccttgagcatgataattttgtttcatattttattttaaagagtaagtattgaatgttatctttagtttctttttcattctttcttgaagaataaaaataatagttgcttataaataatattctgtgatgcttcatattacactatcatattctggtttgagaagggaaaattttgaaacttttgatagttagattcttcagttctttccctgtcccagtcttaatgttgagctggtggaccttatcctttttccagggtgtaggacaca

SEQ ID NO: 10460 - DNA, 11678 bp, Vitis vinifera
  Intron number 2 from transcript GSVIVT01021187001 (locus G SVIVG01021187001) derived from phytozome v7.0 (chr-ID chr1 0; pos 2411259 to 2422936 reverse strand)
aggacagagaaaatacttcccccgagatcataagcgtggccttcaccattcttgctcttctctgcctctcttctttggcagccttccctcttgtccgccatctccatcacaatgtattcgaaaggactcaccgttttgctggatggatagctctagccctcctctgggcctttgtcctcctcacaatctcttacgatccaaagtcaaagtcctacagcaatcaactcggctctaggctgatgaaacaacaggagttctggtctacattagccatcaccgcactcataattattccatgggtgacagtgagacgagtaccagtcaaagtcagtgcgccttcaggccatgcctccattataaagttcgagggaggagtgaaagcgggtatattgggaaggattagtcgatcccctttatccgagtggcatgccttcggcatcatttctgatggtaaaacagagcacatgatgcttgctggagctgttggcgacttcacaaagtcactggtttcagacccgccaagccacttgtgggttcggcaggtgcactttgctgggctgccctatctcatcaacatgtatgacaaggtcatgatggtggctacaggttcgggcatttgtgtatttctctcattcctcttgcagccatgttcagctgacgtgtgtttagtttgggtggctaaggggattgagcacaactttggaagggaaattaaagagatagtgaataggtatcccaaagataaggtcattgtccatgacacagctgtgtctggtcgacccgatattgctcagttgagcgtagatactgctaagaattggggtgctcaagtagtgattgttaccagcaatcctcaagggagcagggacgtagtcaatgcttgtaaggatgcaggaattcctgcctttggtcctatttgggactcctaacttcataaccataaattaatacttgattttctttggctttcaacctactcctaaagttataagatatggtcaagaatgtgtgtccagtgttcaagacatacagaagaaagacaccaagtctaatacactaccagaccaagtgtacatgttcgaaaactatgtcgtgatgaatgtgactttgttatttaataatgtaattagattttgagtattctcggaggtacgtacatctctaatttctcgacctaatggagatggaagaatgctaggaaccattattggaagggcaataccaagaagacgctgtctcataagatagaaaggtagcataaaattcagctgtatatctgaacaaaatccaaaggctactgacaaagagttaaactaacatttctccaatctaacgactgccgtagtgaggttgacgtcaattctgactctctgtattttagaattgagcaatttccttccatagcttcaaccaccgaaaggaacataaagaactattttattcgtgtgaaaggggcatccatttggaggccaatctataatcgtagatgatcctttcggcgatactatttactagagttattcttattgcctattgcgaatgccgtacaagttgatgcatgctacgtgtagaatgtcagcagagatacacacataacatacggaagaaccagattcaatatagattaggttctgcaacaaaattctaggaatcccatataggtccaaaggctgtaagtccagcggccctccaggcaccaataacgtctctgcttccatgaggattactggtgacgacgactacctctgctttccaactctgggctgtttccacactcatctttgccacattaggacggccacatacagcagtatcacgtacaataaccatttccattaaaacagcaagaaaaataatgcttctcaagaaacaaacaatcaatgatctaatgagaagaaaaacaaaggatgaagagcatcatcacaagatttaacgtggttcagcttgttcaagcttacatccaggggagcaatagaagaaccaatccatctgagagaaaaactgagaaaattacaacacacagccctttcagcacacacacaacccttttacaactccttttcggcttagaagtgtgcttgcatacaccgtcatcataccgattaaaaactcacataacaaccttccagctggaaggtaaaagaaataaactgtcatgtgtatatattattctgagagggttgccacacaaatagactaactcacgtgcttggcttatatattttgtatcacatcacaaaaatctccaccttagcaccaaaataagaaaaccaagttcagctcggattgatttccctttacctcttgttgttacaatcatagaaatccaacattgatcaagtttaagcattgcttaaacttgacctttggaattggttttataagcatatccgttggattatccatagttgaaattttcctgacattcatcagtacttgttccattatatccttaagaagtgcaatctcacatctatgtgtttagtcctcccatagaaaccttggttctttgtcaaacaaatagcattttggctatcacagaaaactgttgcacttttctgattcattcctaatttagatactagaccttttaactacaaagcttctttagtggcttctacaatagctacatactcagctttgatggtagaaagagtcacaatattttgtgatgtagatttccaacttactgtacagccacacactgtaaacaaataacttgttattgatcttttcctatccaagttcttggcataatctaaattcacataaccttcaaccaaaccagttgagatatatgctctccttggtatatgaacccaaaatttgcagtacccttgagatacctcaaaatccattctagggtttcccaatgatcctttccaagattactcatataatggctaaacaaactcataccataggctatgttaggtttcatgcagaccatgacatacataatacttcctatgccattagcatatgataaattagccatatcttgcatttcttcttctgtttttggtgacaaattagaagaaagtttgaatgggcttgaatttgtgtatcgaccacctttgcagcatccatgttaaatcttttcaacactttcttcatataatctctttgggagattgtcagaataccaacagatctattcttgtacagctccatccccaaaatctttttagcacatctaagatccttcatctcaaattcaaattgtagttatgtcttcaaatgagttacctttgttatgttcttgcttgccaatagtatatcatctgcataaaataacaaatagacataactcccatttgtcagccttctcatctatacatagttgtcaaacttactccttgagtatccaacactagtcatgaacttgtcaaagcatttataccattgcctagggactattttagcccatacaacgatctcttgagcaaataaacctagttttcttttctcttaactgaaaaaccctttagttgttacatgaaaatttcatttactaattctccacgaaagaatgtcatcttaacatccatttactcaagtttaagattccaaaatgacaccaaagcaactaatacccaaatggaaatgtgctttatcataggtgagaaattttcattgaaatctactcctctttgtgtataacctttggcaactatcttgccttgaatcttttagattctacatgaaggatcctcattttctttttaaacacccacttgctatggacccacatttttcacgtgcgtccccactcgatcgacgagactctctttttattatttatttgtgaaaaattaatttttgaaaaaaaagttggagtcatcacttattttatttttattttaaagggaaaataaaacaagaaataaaaccctaaaaatgactccataatttttggaaaaacgtgtctttgaaaaacccgagtctaagtccggggatcaggttacttattaggaaggtacctttaaaaggtagcacccctctaagccctataaaagtctctactgactaaattgggggagatgtgacaattaattgattaattggggatacctagatagattaaggtgatttcaaaaaataacatgccaaataggatcaaattacaataaaggagagttagggtgcatacctggactgcttctcaaacgctatcataaaacataagagttagtatagagatacatcacacaacatgtgtatttgtcaaagataatcaaacaagcatcaaatatatatcaaggcaatcaaacagaatagcaagcatgggcataatacgcaatgacaatcatattcctagggtttagaaagtgggtattagggaacgtatctggatatcatagataacttgtaatgtgctttcataaaacatgagaggttagataacaaataataaaatatagaaatcctagcatgctcgttatctaattagcatagcaaaagtgatcaaagtatacagaatcatcaattatcacatacatcttgtatataattcctaaaaaaatagatagacatgatttcaacaagtgtcaaatgtggcaacaaaaataaaatttgaaaagattttcttatgtaggggtgtggacccagcatttcggcttatgcatttcccactggaatggcgagctcgatttttatttgaaaaattgatttgttgattaaaaatgacttggagtcgccacttatttttgttttatttttaaaagggtaaacaaaataagaaagaaaaaccctaagtgcgactcttggttttggaaaaggtgatctacgaaaaatcggatcaggctcgagggtcaggttacttatcgtgaaggtacggtgaagaccatagcacccctctaagtccctaaagtcgggtctctactgataaagtgaagctgatgtggcagttgatgagtaaatcaatgaatatcttgaatgatcatgcacatatgagaatcggaacatgtatagtgaagtatcagaataagagtgtatgcgtacctaggccacgagccacaatgcgctatcaagaaatgagattagtacacaattaacgaatacaaattatagctcatgcatatcggagtgcaaaatgaagattaagaaaaatatattaagcacaacagttgacaatcaatagagatcaaacatagggcccccaacaaagcccaatttattgttcatgagctaatatcacaaatccagtattttagaattatgaaggaatcactattgcttaggtaaaatcaagaagattagaaaattatttaggaactgaaatgggattaaaactattcgagtgaaaattggattattggagtttatttggaattaaatttaaaagattagagctctggtaattaaattgaaatttgttaaagaaaatgagaaacggacattaggaaattgaactgcgagaccatagacttttgaaagttgaatttgtaataatgatagtaataaggttttaaaagtttgaattaataataataataataataataataataataataataagatttcgaaagttggaattaatgataataataattataataagattttgaaagtgtgaattaattataataataataataataataataataagattttgagagtttgaattaatgataataataataataataagattttgaaagtttgaattgataataataataataataagattttgagagttgaattaataataataataataataataataataataataaggttttaaaagttgaattaatgataataataataagattttgagagtttgaattaatgataataataataataataatgataataacaataataataattgtaacaatgataacaataataataacaataataataataataataataatatccatccatcaagcccaagtccataagcctaaacccactaataagccccatcttcatcaagcccagtctataagcctaaatccataagcctaagcccataagcctaagcccacatccatttattaaatagagccttgggctccatcttcagcataggtttgggcctgggctccaaattcaaacccaagcccaaagccatcatgggcagcaccaagcccgtcaccaacacaagctccttcacagcccaaggcacccctctccatctgggcaactccttcaggcaaagcttccaccttcaaagtatactaaaaacatgaacttttaaataaagaatcaattttatcaataaataaataaaactataaaaacacataaactaattaaaaagaaccaaattaaatcaaagaatactaaaaatatgaacttccaaatatgaaatcaattttattaataaactaaaactataaaaacacctaaaatactgaatataaattattaaatcaaagcaaactaaaaaaaactgaaactttcaaacatgggatcaattttattaatgaactaaactacaaataaaaatctaaattaactataatgaatcaaattaaattaaagcaacctaaaaacgaaaactttcaaacatagaatcaattttatcaatgaactaaaactataaatgtatttgaactaaatagatgaattaaactaaataaaaaataaactaaagatatgaacttttaaatatagaatcaattttattaatgaactaaaattataaaagtatctaaactaattaaaatgaatcacattaaatcaaagaatactaaaaacatgaactttcaaatatgagatcaactttatcaataaataaataaatgaaatacaaacaattaaaagagtagcaaatgcatgaataaatgaataaataaaactcaaatgttttcaatctgatgcaatcaatcaaaattaaatagggatcaaatcattcttttttctaatataatgaatcaaaattaaacacacaaactcattcaagctaaactaacaaataaattaatactaaattaaattagaattaaaaaaagaaaaaaaaaagatatctaataaaaaaaatgaaaactctttcaaaaactaacctgtgttataaagaaaaatccgtttttgatgcgttaaagtggctcatcttagaaaattctctgttcctctctcttttaaaaaagaatattacgtgtcctcttttgcttggaaaattctctcttgcgtattctctaaaaaaaaatccctattccgtgttctccttgccaaaaaattcctccttcaaaaaaatctgtttcttccttccttgcgtgttctctccaaaaataatgataaaaaaaaaaaacccccccttgcccgttgctctgttctcctcttttatatgactgcccactttttttttatggaatatcttgtttcctttttcttaatggatatagaaagtgtatgcatgtggctcactttggagacttctctaagatgcatccgtgttctatttggtaagtgatcaagcatgttgacttttccttcttaaaaaaataaagaaatccctcttacagctgtgcacaaagtggccattcctttctttttatttttaacaatataaatctccttttcccaccctccattcagccgtgatctcctctatctatatgcagtccagattcctatttgaagccatgatctcacttcccttaatgaggactcttcccaaaacgttcacgcctacctttcaatgtatccatcccaccatgcatccaaggaaatcctccaattattcaatctcaatgtgattgtgcacacctccaattatcttctaattccacatgaaactctaccttatccttgacttcttcattttcttcactaatggaaacttctctgtcatcctttagaaattcgtactctctaaagaccatatccttgcttataaagaatttcttagtggtaggacaccaaagcttataccctttcactccgtttgaataaccaaaaaaatatactcttcctaactcaaggctttagtttacctcattttggtgagcacgggcaatgcatccaaaagtccttaagttactgtaatcacaaggactgtctaatcacatttccataggtgttttatgctacttattaacttaatatttatcattaatctaattataatacaataaatttaactaatttatacttcaccttatttatttatatatagtttattctaccactttcatatttttcaaacacaactaccataacactcacacaattatcattgtaatatatataaatatgtacatatcatccacccactcacatactccacgaacatgcctcttattattattaatattattattttcatccacccactcacatccacatgcatgtcttttattattattaatgttattattttccttattcctctatcttccaattcccacacaactttttattttttctcaccattcttctatcttctagtgcacacgtgttccttttcattttttttttcttttttttaaaaaaacttcctccagtgcacatgtgttccttttcatttttttttttttttttttttttttttaaatacttcctccagtgcacacgcattacttttcattttttttttctaatttcattacttaaatatattcatctaataaattttgaattttcctatttttatcaatagaacaacctatattcctaatttcaatattttgacctataatttttttaaataaattaaccctagcctaaaatcgaaatatttcaaataatctttttttttttcatctaaaaacttaagatttcccaatttccaacaataaatcaaaatcttaaattttcaatattttgatattaaaacgaattaaagaaaaaaaaaattaaccctaatctaaatttggattttccaaaaaatatctaatgtgtttgaaattaattaatgaatccaagatattaatttaggggttagaatcttacctatagagatctgttattcaaaccctgaaatctgactccaactttaagttctctagaatttttgtgaacagaaatgttattaaaaaagaataggaagaatagaatttctaatttatacctagggtatttatttgaaaaattacatttttacccctctttcattttaattaattaattaattaattaattaattaattaattaattaattaaattattattaatattttcctaaattacccctaaaaaaaactcgggcgttacataggttgtctcaaaaatatgataaagacatcttttgatagatacttgataaaaatatcaaattattattattactttagaattgcgatacataagaagagtgaaaccttgtctagctcctcaaattgaaatttctactttcttaaccatcctgaccatgattgtattgtctaaacaaaaacttgtacatgctctaagaacattttcttttctccgtttaggtagtaagtgattgtttatgccactgaagaactactatgaattggctaaaagagtattctaaaggggaaaaaaaatcttacttttatccatagtcataagcgaattgacaattttgtcttggtctaaaattgatttttcattgttacgagattattacatatattttgaagtctcttaaatattcttcaaaagatcatgattgagttttttattttttattttatttttgggagtcatcagcatacttttcaaattttatttttaaaatacactggagagtgtttttaaagagaagttcatacctcataatcgtgttaataccaaagatcatattaaaaatgattttttttatttttttattttatagttccaataactaatgaaatgacaaattaattcatcaattgttgatccataattggtattacaagataggattttttattctctcatcatcatgaatttcttcggtaagttttttttccacctaagagatgttggagaacatcaacactacaaactaagaggatgatttggtttcgcaataatagaagatttgtggtgtttagccggattgaaatcaaagtagaaagaacattgaaggaaaactataacaaaaaggatgattattattattttttaggaagacataatttgtaagagcaggttgaactttttatgattgtcgaccccacttttggagaaggcatgaattcgaacctcctccccaaactctaataccatgaagagtttgataatttggtaattaaagttatatgcatttattattactttaaaaaaattatacaagaatgtattgtgaattatatatatatatatatatatatatatatatatatatataaaagaataataaatattttaaaattaaggaaaataaatattattttttaaattaagagaattaaatatcattaatatctaattattcttaatttatggaaatattgattggagttgattcttataattatgtatgtggttttgtgcatatcatttttagaatctatatacaccattctatgtcttatatcctctcattcgatgtcctacaattctgtgttttgttattcgatgacctatcattttatgtccctcttttatttatttaatttttttcttaaaatattttattaccttttatttatggaagtattaattggataggttcttatcattatagacctgattacgagcatctttttctgtcattgtgtcctatattctcatttatactttcccttagttacttttcatttatgaaaatatttatcggatgggctattcatcatgtgtgtgattctgtgcacctccctcatgccattatgtgtcctatctgtcattacgtgttcctttatattctttgtccttttatattctttcacttgctacaaataaccaatcgcattttttttttctctctaatatgaagtgaatcacattgctattgagattaagtcaacaattctttttgtggaggcttataaagccaagccacacttgccatgggcacaagccttctcgctgaatctctctttccctcgctttactttgtgacatagttgtttgctcctaagaagacaactatgaaaagcccagaaaaggttgcgaggatttcaagctacagaggcgtggcttttgagattaaacctcattcagactcattcgccgtcccaacttctgtggtggtagatggtcgctctggcagcaacaggttttggcttccttggaatcaggatagcccttttagagtacgctcgtcggattccttgggaaggagtatgagcagaaggagcagccatttctgtgatcttgatatagatgaaaatgattttgaggatgatttgaaggacgtggaagaaggcaatattcatgaggagaaggagcagaagttagttccagtttcattcactagtaaacgtgaacaaccagcaaaagttgcgagacagcaagagtcgagactttcgattatattgctggatcaagggctgttcacagtctacaaacagctgttcatggtttgcctgatcctgaacattattggtttggttctttcagccaccgggcatttcccatatgcaaggcgtaaagctgctctcttctccattgggaacattcttgctttgacactgtgtcgcagcgaggccttcttgcgagtcgtcttctggcttgcggtgaaggtcttgggacagtcgtgggtgcctctcggactcaagactgctaccacatccctcctccaatctcttggtgg

SEQ ID NO: 10461 - DNA, 6902 bp, Vitis vinifera
  Intron number 5 from transcript GSVIVT01013938001 (locus G SVIVG01013938001) derived from phytozome v7.0 (chr-ID chr1 6; pos 7116868 to 7123769 reverse strand)
atatacttgggattgaggttggttaatcgtgaactctatttccttccttaagtattatttttttaaatgatattatagtcattaaacttctttctttatgtgattttattaaaaaaaaaatgttgtaattacgtaaatagttctaaaatactaaaagagtgccatacacataaagaaaaacgttgaaattttataaataagataaaaatgaaatctcatagatatgatgaagctggaatcttataatgattagcccattattttagtacaatttctgatttttctgattgagtcatcaagttttctgattcaagggtgctttgtacaatttgagggttggtttatccattctttatttatcctgcttggaatcctgccaatctacataatttggcaaacttttcaaggggatgattattaatatattatgaattgtttaatatatttcagtacttagtttggaagcaataatcatatattcacatttctatcttgaggtttgtcatttgttggattattatagtaataaatcaatgcataacccataaatgagtattcatttaaaagataaataaaataaatattattaattcatgaagacataaatgggaacgcaaagaaaaaacatgtaaaaacacatttttttttttttggtttttactcctaatcaaccaatccctatccaaaatagaagttacatatatcctgcctccctcctttttcactagaaaaagcaaaaagaagataaaaatgcttattttcactcttagaagagttgataaatccctcctctctccctctctccttccctccctctccttttattttgatttgatattggttttctgttgatatggttaaagtaccatttaactcaaaagtttaagctgttaatagtgagtttaaaatttatagaaaggtgactcaaacttcagttaatagcttcaacatcccacttcacatgtggctttttctcacacttggattcaataaatgaatgggggaataagcaaggtgtgaggtttaaacccaagaacttctgagaccaaggttttgataccacattaacccagaagttaacccaaaattagctgttaggtattggaccaaaaatgcaaatcaatccagctaatagtctaagtggacattttctttattgctaattagttctggtcagttgcatttgaataagcatgcatataaattgaattctagtatatttttttttatgttttgattagattatcaccaattgttagttcggtatttgtgcttattggatcatgtgttatttaatgtttgattttaggaattgatgctttttcctttccattcctgtttagtttgtaattattgtgagaacacttctattagaactgattttcttatattagtagttttctcttgattacttagtttgaagtagttgccattaatattgtttgcatattattatttagaacttcttcctcttcacaatttcattaaacatggaaacttcatagagcaatctagttagtagcttatttagcaaaagtaaatcacatctctaatggaaagtgacaatgcacctaggaaactagaagggctaatgaatttgcttgctattcattacaagtattggtacctttgttggagatatccttcttctaagggctcgctttccatgaatctatcaatttaagggaagatcgttgttaagagtactatattttctttttctttaatggtcttttcttctttttcttggaatcttaatatccattacaacctcattgatttggagattagggactatgaaagactcatctcatcccacacttgtgtacacttgtctccatctgccccaaatgtgagagtctcctagtcattgacctctttaggattattcctagtcaaatctttcttcatggctttgtctaatacatcagatatagttcctttctctctagctaaatttatatggaaacctaaagtcccatctaaagttaaggttttttcttcgttaattgaacacaagaaggtaaataccaatgacatgctacaattgagaaaacctttcaaatcccttagtcttaattggtacgttttatgtgaggggagtggagagtcgattgatcatctctttctttattgcccgataactttggggttttggcacagtctatccagacaggtcaagattgattaggtcttacccaaaagcatatgtgatttgttgatcatttcatataaggattgggaagctccattaaaggtaagaccctttggcaaatttcttgtttcacatgctttggattgcgtggtgagatggaaatgttagaactttttaggacaaatggaggacatcagagatgtggtaggattcatttcacttctattcctctttctgggtcttttgcatcaacgtttttaaagacacacctctcaatattattaagctcaattgttattcagtgtgtagatcaaaagggtttggacaacattgagaggggcttagttaggacttgaggagatgacatctatgtatattgttatgtggtctaaacctttttgtataggcttcttgtatagtggaggagttcattcatattttgataaggttttgtaattgtggggtggaattcttatcttatgttcttattattcataattaatacatcttttattttggactaaaaaaatcattttttttttaaattaggaaacaaacattttgttaaatcttaataagaaataagagacatgggaagtgaattagtattagttgcaattgagagcgattttgatgaggatgaatgtccaagatatacatcaagaaagtgaattagtattagttgtgattaaagtaggttagtattgcttgaaattaaattaggattagtatttgttggagttaaattatgagtagctaatgaggtcagaggagaattagaattatagttataataggttattagaatcctaatagactttggatttcttagagaagcctataaataaggctaattgatgtaaaccaaagtaattgattgatgattaataatattatgttttcttgcatactttactattttcaatggtgagattacattgattttcttctaggtaagactcctagaaggaattagtgcgactttgaggtttctatcccttttatttcttatcttccttctctacattttatttttatttttatttttctctatcataaattttatctcttgttcctctccctaaccctaaaagataaaaactctagcctacccatttgattgtaggcaaccattatagggttatacttcatcaattatgctattagagcaaaagttcttggcttgaagacgtatgtaattgaggagtggagcaacttatgaaagcatgagttcaaggaacacttctaacaatcaagatgccactacaacacacttagaggaaattttggtcacacaacaatcccatcaagatactataatacaactaaatagcaaacttgatgagatcatgaagttattagaaaagagttaagaaaaatgaccaattgatgatgagactacaagccatcaatttagacaatcacctactagaccatgtgaagaacaaaaaaaattttatgatagggaatcaaagaagggcaaactgtttgagcaagatgatgatatgacaaaaaaggaacaccttaaagtcattgaattttatggtaaaattaaatcaaacaacttttcttgattggattatgtcaatgcaatattaatttgattggtatgctatgcctaaaaatagaaaagttcgttttgtgaaggcaaagttgaaaggagtagcatgtctatggtggcataatattgaaaattggctttatagaactggataactctgcctatagacacatgggatgaaatgaagttgaagatgaatgggcactttctctcaattgactatgaagaactcatgtacacaaaattgttttccctcaaaggaggtactaagtcagttgaagaatatacagaagaattccatgagttgagagtttggaatcaagtgcaggaaagtgaggctcaacttgcagcccattatataattggacttcaaatgaaggttcaacttgagatggtagcacatactaattctgtggatgatggttatcaattagctcttcaaatagaagaagggctcaagttttgggcttctagatgtctaagttcacaaattgggagcactttctccaattagacagcaaacaagcctttaagcacaacaaacttcaaaacttctaatcatgcgagtgttgggagcaacaatcaacaggcttcgaatgtgcctaatagagatgctaataagcgtaaaatttcaatgagtattgcagataacaaggtagacttaacttctttgtgcttcaagtgtggtggccatggtcattatgctgttgtgttcccaagcaaagttttacacttttgtattgaagaagtagaatctgaactttggagctatcaaaagaaagatgagactcgcaatgaatatgaacttagtgaagaatgcaattactatgatggtatgatgggaggccatattttagtagtgcaacctttattagctgtcccaaaggtgaaaatagaagatcaatgatgtactagcattttacatacatatatctcttgctaaaggaggttatgtaccacgatcatcgatgaagctaacagtttgaacatgctttgcaagtgcttgttgagaaactaaatcataaaagagagaagcatcctaatctatttttagaagtatgggttaatgacatctccattttggtaagtttttgctgcttagtcacattcctttttggtaaggactttgaatagtcggtacagtgtgaagtgttaccaataaagtgagtcacattttgcttggaagaccttgactttttaatagaagggttcaacatgatggctacaaaaatacatatttcatacacaatgggcatgagaagatccttcctccaatgaaagaagttccgccagttaaggagctagagaaggcacaacaaaaaaaagtgtgtaccattttttttttgatagataaaaaggaagtatattaaacgaaaggaggaaacaccaaaaatagtgccctcaaagtatacagggagtatacacaccaccttcccttacttagagcctaaccagtcgaaaaagcttacaagagaagaagggtccataactaaagaaaccctgatccaagaccaaagattacatataaaagaatatttcaacctttgaagcaaaaactcctcattcccaaaagctaaacaattcctttccttccagactgaccaaaaaattacataagggagccgtttgccaagccttcttacgaactttccccacaaacgctccatgccacccaagaagagttttcttcattatacacgaaagagtccaagatacaccaaaaagggagaaaaaaagattccataggactcgcgtattcacacaatgaagtaaatgatgatccaccgtttctactttagatagacatagaaagcacctatttgccaaggagaaccccctactttgaagttgcttcaaagttaggactttaccccaggaagcctcccaagcgaagaatgctaccttaggaggcactctcaccctccaaatactatcactagggaacatagaagaacctctgagctccaaaatagaataaagaaaaaataaaagtgcttaccatgcatcaatttgaaaaggaaaacatggaaagtaaaattgtttttgctctaatggttggagaagtggatgaatttaaagagaaagataaggaatatttaatagaagtacaaaatatccttaatgatttttctaacttgtggctggtagaattacttgataaacttcctcttatgcatgacatacaacataccataaacttgttgatgacacataattattttgaggactatcaacttgtttcacaacattggaaagtgttttgaagtttggtgcttgccttgcatgaaattgaacaagttcaagagatcttaagatcctatcatattatgttatggagctgacgaaataagaaagggtggaaggcattactcagcatttttaattgattgaggaaaatcaataaaactcaaggtcaagttttttttcaagttagagggaatgaatgaggatgaatctctaaaatatacatcaagaaagtgaattagtattagttgcaattaaaatagcttaatattacttagaattgaattaggattaatatttgttggagttaaattatgagtagctaataaggttatatgagaattagaattagagtcataataggttattagaatcctagtagactttggatttcttagataagcctataaataaggttaattggtataaactaaagtaattgattgatgattaataataaacaagttgttttttagaataaatttgaggtgcttttagggggttatacacacacacgcgcacgcacatacacacacaaactcatatatatatatatataatgagtgtgctgagtaataattgaaaatatggagatttttttgaaaattttgtattgtgtataagtgtctgctatctttcatggagaataagctgagaaaattatttttgatatttgagtccccaaacatagttttattcctaaaaaccattaagaactattttcgaaaacattggcaaataggtccaaagtttattgtgcttcaaagtgatagtagctaccagaatgttatgtgattaatttgtagttagtgttctagtagatataatgtctttgttactcaattcaccatcttttccattaacatttatcagttttccacaccattatgctcttgataaatttcagggaggatacagaggcttttactccaaaaataccat

SEQ ID NO: 10462 - DNA, 8666 bp, Vitis vinifera
  Intron number 5 from transcript GSVIVT01032915001 (locus G SVIVG01032915001) derived from phytozome v7.0 (chr-ID chr1 4; pos 24080154 to 24088819 reverse strand)
gggctattaccatagcattttgagggctgtgtcttcttcaacaatgacaggataattcttatctctctttttagcttggttattggattccccaaggcctagtctttgggtgagcttaaccggattttttgatagggtaggaaaaacggagttggggttatgacattcttgatggctgtttcattttagtgaaaaaagtcaatctggtgtgggatgctgtaatttgcaacaggatggttgcttggaacggttaggatgtatgtttaagagaaactctctttctggggaacccatattgagatgactaacatggattctgattgatacttcaaccaagcagctactttggaaagtgctttacttatagagctttagtactgagatgaagccttgctgatggattttcatatcctgtttacacaacaatcaggaagggccacccaggcagtcaatctagctatatcccattctctgcttcttgttctcccatgtactgccatgttatttactattgaacagaagtttctgtctctatctgtccttatcgtagaacatgaatcccatgctttcttggcatgatcctgattgtcatatcttaatgaaaaacgctgtcattcattcatgacagttcaataaagtggttgtggaattgcagagaaataattttgacatgaatgaatccagttgttagcatattctatgttctgttcataattcttgtttggaacttctccatatgtcgagtaatctagttggttgtgtcctcaaacatttatctatttgtttgtttgttggtcggggttggctccgagtgaggtgtgggggcaatggggtttggtttcttgctcatctttgagtatatagcatcctcaactgattgaacaggatccccaagattcacagcatcatcattgatctcataaaatctctcttgggcatcctttggaaaaagctatgtgtttctctgaactccaattttttattatataatttaataaatgatatttttgaattttttgggtcaattaaaacattggaaaatacaacaatggtaggtttgtttggtttcttactccaatatctttgtcaccaagtgagtcgcagctaaaggagtatatttcagaaaatttgctactaactattttctgtcacaaacagatgaattattgcaagtgtagtctttggatcacagaaaaaattttatgaaaaaaaaaaaaattaatcatgaaatttttttatggttgaatgtctccttcggttacaacaatgaaattagcaattgcaaaggagtccttcataattgaaagttaatttttgctgtgaaatggttagtgacaaaaagtgtttagtattaagtaaagttatttttataagatttcgcagctagaaaaatgttaaggtttcataatgttaaggtttcatattaatagttactgaataaaagatttgaattcgaatcattaaatgattatttaataaatgttattctttaataagtttagggataaattatttaatttttgaatataagaagacaaaatgtaaaacatgtaaaagataaagggataaaatgtatttacctcagaaaaaaaaaacccttttacaaaaaatatcgggcagtattatgtccttaaaaattacttcaaaaaattttaaaatttgagacactaattttctttaaataatgtttagaatagaaaccattattattttaagataaactttttaagaattttgcattttatgtaggaattataatttaattattatttttttaaaatagaaaacaagatcgacatacaaataacactttaataatttaattttctattatctcaactttctttctttcttttttccttaatatttttttattctctattttctttccatcaaaactttttgaactatacataaccaaaaagaaaaactcgcgttgttccttcatgttgttggctaactttcctccaagatcattagctcaccaatgtgagggagcaataccaccttggcctagaggaagaattcaatgcccaaaatcacatgaaagtagtttagggagcaatacaaatcaatttaggccataactctgatttgtttttaaaactgattaaacccgacttatatttaaagttcaaaatatatttaatttttttcattccaaaatataatctacgtgtttaaaaattaatttgaccatagtctaataataataaattattttaatagagtccaatgtgaaaaaaaaaaaataaccctcattaaatatggaataattatatataaattttaaaatattggttttgtttggtttttatcaattacgagatgaagaaacaaaaaaccgaagcaacaaagttaggttataaatttcaaatcaaactaaactttataattattaaagttcgaatcaatatgatcaattttggttgatatttcaattttttttggtttggcttacacccatgtgaccaaaggtctccattggcaagataagagaatatactcatgatagttaaaatttggtgaataatggagaggcctgtgatggaaagaaggtttaaagagtgtggtgggtacaattacaaagaaaagctatatatatattaggattaatcatttaggtgtcttagtataatcattagtttataataaggtttagtcataaaattaaggttgttgtggataacaataacatagaggtagtagagaaaggtacttcttcgaatgtccttatgattgatgcatttaccaatcattcaagactgcacaataaaatcatgacacaaaatatatataaaaaacctgctccaataaattcatcatcattcttatttgaaacaatcatatcagtttgttacatgtgatttttcttttcaatttatgaattgagttaaaaaaagactgacccagaaacctcgaaagactttgtgctaactgtggaatcatgagggccacgaaaataaggagataaggcacaaaagctttggaaatatatgtggaatcattgcagacttgaaaaggatggtgatgatggccaaatcttgttcatatgcccatgactttctgttgctaccaccatcagttttttcttcatcattttcgtatttgtacagagagtaggtgttgactctaacccttccatgacctaaccctcccatgccagcccattacgtcttcttcataaacatgtcatgtgcatctctctctctctctctctctctctccgtggcttcatccattttcattaccataaaatcatcacattttggactcttttcgtggcatgcttccaccaatgtcacgttatagaataagaatcttttccaaatgacaatttggctggcattctctttttcatatacccttctgttcataccatttgggctgatttggtgacgatatcctgctaggtttttcaaaagggatgatacggcttttctgagatacttggggccacggggccatggagaaagatcaacaagtgggcggtggtccctgtggatataaatggatgacaggatccagtaatcctaaccaccttccttcattagagattattaacacaatcaccatggcatgaggtgttttagggacttgttaatttctattccacatcccattaatcttttttattgatgaaatttggttgatcatgatatggtaattaagtacatatatataatgggcaaggcatgtgccttggatggctttaaattaatctaggtgacctgtcaactcggttttgcaattcatcatctcttgacttggtccatttgtcaatatcatcatctagaaatattcttgtgctaattgaagtccaaatcacttagttttgacacgaatcgatcaataattcttattatatacatgaaagaaaccattttttaattttggaatcaccaatcgttttgcgacctctgcaaatttccttcttacattagccaaaaacaaattaagcattgcatgtgctctaataaagttcatgatgtacaagatgagaaagaaagttcttattttttttaaaaaacttccccctaaagtcaatagtcccattttcttaagccccaaggctagatccataaagatgtcaaggatctggcccccaaagggataagatggaatcttgacctaaatcccacattcaacatacccttaacagggaagtattgcccttgtttaagggtcacacaaagttgggaaaggtctttagaaatgtgaatggttttgagctcttgaaggaagtagtagtgctccatgatcataaacaaataaacaattgatagtttggaattaaggtaaaccattaaaagggtatgatggtgatgatgatggcttgcttgttggcctaaaagcccacttaataataatgagtaaatgcacatggtgatatggtgggagggtgggggagacatcatgtgggagagagagaaagagagagagagagagagagagggagggagtgataatggtgaaaatggaacatagtttaggatgattaggataggtgagtttggtccctgcctagtgaagcttgggcatcccacatgtgatcaccctttgctttatccatgtggtttggcatatttccttctatcattaatcctttctctttctcaaccatcaccatcaccccccacttgtgttttatatatgtatatatatatatatatatatatatatatgatgaataccctttgattaatgaatgtgtatacatatatatatatgcctatatatatattcttgtatagtttcacgtagagctttccatgcatgcaagtttccacactaatattatgtatctcctgagtcctaactagcaccatatttatgtccatgactaattgtagtccttttccatcttaaacttgcgaatatatattccaaatatataacaataatgcttttattttcaagtgagattcaatgcatagaggtgtttaattttattcttttcttttcacactatatttatggaagtgcatatgcaatactattaaatatatgtaatttttaaaaaattagggatgtttatttttcttaaaatagttaagttttaatgaaattttgcttcttttatattctcttttcctattatatatatatatatacctattttgaatgtgacgcactaataattcaatcagtattttgttcatattaagtaaggaatttcttaattattactttcaaagcaatggatatatattctttgatttaaaatattttcgaatttatttgtacttttgaaaaataaaaaataaagagataaaaaccatcaccaccgacattatataacattggatgtaacacactaatagtacaataacatggcttaagaaatagcttcaaaacaaaaaaggaagtacatttgcaagcatggagtataattccactatatgaagacaatcacacaatagtaccctaagcataagggcttagccacacaatacaaaattgtacttgcattattcattctcaatacttatactattaagagcaaaaaaataaaatatatgtataaagttagggccccattttgttaaataagggtaaggtggggccaaactatgtttacatcatcctccctccaatcaaaatgcattggtcagcccaatgaagcctaaattattgcctaggaagaattcattacctttttttaattctaaaatcagattcattattaatagttgtgttatgtactttcctatgctattatcgtatataagcctaaccatattttggttcataaggattatgtaaatttttagattatatttgattctcaaaaagtgtatggaaagacgctaaaaacattgaattactttaaacccttttgaaaaaatgtataaaattttataatttagatgatatttaatgataattactatgaatacattccttcatgacattttttgggtgatggggtttcatacatagagcttggaaggtgctgaaaagtcatttggttaatttattttttattttttataattgtttgtggtctaattatttgtttgtaatggttggcagaaagatgaaacccaatggggggtgacccacaaagcattaagtgggtgaggggtgagaggcaggcaggccaaatgtgtgggcagccacatgcccttccaacactccacacacacttacccaccatttacacctttttccttttccctggaatgtagcctctgcctctcaactacatcaccccatttcttaaataccatcatatagtagaaacttccctcaattcacttacccttcatgtgatgtttgggaaagaggtaaatctgagaattttttctcagtgccgtgtttggtaagcaagaaaatgatatcccattggatccagtgtagttcagcagttgtgttctttgacgatcaattagaggtttcaaattggagttttttcaatattgaagagatcaatgttactattatttaatagtagtggagggggaatacatgagtaagttaataaggctctgtttggatcaaagacataaaattgcattggaaaagtgggatcatcaagaccctttccctttccctttccctttcccacaatgaatttcaacatgggaggtttcttgtgtgaaaccctactaaacccttgacaagaaagtcaagccgtgccatgttgaaatttcttgaataccaaagattaaaaaagagaaccccccaacagaaaaaaaaaaagtgatcatgtgattgcaaggttccaagaaaattcttggacatcccataggaaatagacatggcaataaaacaaaggtttcccaatccacaaggtgcaacaaatatccaagtcattttctttaacaaaaacagctttcctatccatctttttttttttggtttttttggtttttttggggtttttgcattctttttcctctagggcatatactggtactatgaacacgtatgtttgagtctcttcaccattttggaaaccctagagaagaagaccaattgcttggatagttcccctttatggaccacacttgtgttgaaacaaaccaaggaaattaaggcaaaaaatacccactttttgttttgcagtggcaaagatcttcttaacctcaaggagataatttccaaaaggcttgatatagattatggcatcaaagcttattggacgggaatgaatacttctacacttctatgattgcctcagaccatatcaaaagggaaaaacaacagtgaggggggacttgagcaataggaattcgtatacattatatcagagtttgttgttttctgatatcatgaggtagactgtcgcatagtatgtatcccatgatgacattaattcaaatgatgtgctctgacaatggggtttgaatcaaaccatgtgaaacaatttggaatggtaattacagtaacacataaaatataacatcattttgatattctgataagaggtttttcatttttccctcactgtattaagccagaaggaatacaaaatatggccaatgggggagttgggaatacaggcctgctgtagtgaggtacaaaatgaagtggagggtattgtagtaaagggagaggatgggtaatggaaaagggttttagactgagcaggctttccagtacacaaatccactatggtatttcctcttccacacttctgacagactccacatgcccatgtagagaggtcctgacttgagacccaccccacattattttgtccacatggaagtggaagaaaataaccagaacaggtctgacccacacactcactcacaccagatctgacccacacatcccacatctctctctctctctctctctctctctctctctctctctctctctattataaaatcgtattaaacaaataatataagaaaagttgccacctcatacctcatacactcccccaaaatgatttacaccttgcccttcatataatacaccctacatcctctatcatctttagcctctagcggcctgcccttgagagagccagaggacaaaccataaacttctatcttttgttcagcgaggaaacctcccccccacccccccaaaaaaaagaaaaagaaaaacatctcttcttgggcatgcagaatttccctccagtttgggttgataatttgctttgaagcatggagggtgggcactgttggtgactgttgagagtattgggtcccccaattccatttctttacctttttgttccttttggttttcacagaagatattgtctgcctcgttctctgaatcccaagagatggctcaccttattgtttcttcaatgctcatggaaggagaaatcatttggggttctctctaaatcccttctctcattctctcattctctttgttattcagacatacagttttgtgaaggagatttatattagctgtctgtcagtcacagttgcattgagaattaaaagtttctgaagaagaggcctgactgcaggtgcttctggcctgttatgagccggaaaagtaatgccttacttggttagtcttcttgttgcaattactgataaatgataactgcattatagtaccttctgatcctgaatcctgatcactcttctgggtcacctacaattctctatacttgctcttcaaacctctggaagatggagaaagataaagaaaactgagaggacttagattccttgttttcttgt

SEQ ID NO: 10463 - DNA, 7148 bp, Vitis vinifera
  Intron number 7 from transcript GSVIVT01030776001 (locus G SVIVG01030776001) derived from phytozome v7.0 (chr-ID chr1 4; pos 15790635 to 15797782 reverse strand)
agagaggcttaatttatcaaggtataatctaaattactttaccaaatattttgatggttctagctcaatagcaactttttttttttgatacctaacttgagaattttaaggtagatttttgagtttgtgaacaccgttatccacaaactaggttatttgttgactagatgttttcaaataaataattgatttgtttaacattatatcatgtggtttaactataaattgtaccatcaaggggtttctaggcaatgtagctgatacttggtttatttaaaatataagaagttaaacataagggtttcaagaaacatctgccagttgctggagaaagctacattcaatgcctgcaactatttgggtctgtttgtgtcaaagtagaacttcaatctttctttctattggaccatcgtggatgttcgacggttcacttagagtgtcagaaaaattattaatagcctcttgtaatggtaagcaagatggtatttcctctatgatactgttgccaattgttttctttgcttttcagtttgatacacagataaagaatacctttggtaatcgtaagtgaagtatggttttttccaatttcctgccactagaattctatatttcttcaagaactatgtttgcttggattcctaacttgatgcagcgcaacaacacagagtgacaaaagaattttgttgtcaacaaagaggagagctatataattgttccacaaaaaataataagttgattgcttggggccactcacttaagaggggacacttgcttactctcctgaaaatgcactcatgtctccgatggaggctaagaaaattcagcagacactcatttctccttttcttacaaaacttaaatagttggaggaaaatgttcaaaattcaaaagttggaagtcagcctttttcttcttttctcttttccaagaaaaagaaaaaaaaaaatgttggctagctttcattagtcactaatgtcaactttcttgtagctgttttgagctcacattttgttgatctctgtttacttgaaacttcattatcctaatgcttctttttcactgaaaaacaatctaatagtaagtcagatttatccatgctgctacactcaacttcatgcaacaaatccttggtctgagttactttgggttggctacatgaatcctttctgccatattgctccacttaggtccccaactaaataacttccaattatctcactgcttgaatccatatttgttttgccctccctcttgcttctttctgccttaaacttgaatcaagtcactcttctgcacatggtgaatcatcatggaccactctcgtatcttgtcctcagtatatgtcatctctggcttcttgggaatgcatgcatttctattccatattttcttgtattgccacccatccattttgacatccttccccctggctgctgcatcgcataatcatgctaaataatagattgcatcacaagttgtctcaaattcatgtttaaccatctgaaaatccactatgattcaatgttgaccaatgttgaaaatattgatattggtggaaatattgtgaccaattttttgggatgggaagttcgttaaaatttaaaaagttgaggcaattaaaaaaacaaatgaaaatgttggatgaaactttttttttttttgttgatcacaaacaatgatatattaattatatataaaaagaacattagaaggatgaggagtcctccccacaattacaaaaaccttatcaaaacatgattgaacttctccactatacaaggagcctatacaagaaggtttagaccacaaaacaatatacattgatgtcatctccacaagtcctaactaagctcctctcaatgttgtcctaacacttttgatctatacaccgaatgccaattaggctgaataacattgaaaggaatggctttgaaagcattagtgcaagaggctcagaaagaggaatagaaatgaagtaaatcccatgtctttagtatcctccatttatctaaaaaaattctagcatctctctcgttgcataatacaaagcaatgtgagacaaacaatttgccaaatagtcttgcctctaatggagcttctcaaaccacctatacatgaaatgatcattgtatcacatataatcttggatgggacacaatcaatcctaacttgtctgacaacactgagaggaatgcctttcaaagtaatggtgtaagagcctcaaaaagaggaatgaaagtgaagcaaatcacacatatttagcatttccatttatcctaaatctttttaacatctctcttatttcacagtctaaagcaatgtgagaatcaatttgccaaagggtgttgccttaatggagctttctaaatgcttatatgaaatgatcatcatgttgcatatattcttggttaggacccaaatcaatcctagcttgtctgaatagactgtgccaaaaccctaaagttattagacaatgattaggctctcacatatggggcagatggagacaagtgcacatgactcatgagtgagggttgatatgattgactttcaagattctaatctccaaattagtgagattgcgatggaaattaagattccaagaaaaagaagaagattggctaagaatagctcaaatgttaggattattaattgtaacatttcaagaatatttgttatttattttattggttgttttagattttcgttatcataaattttatttatttatttactaagaaacaaaatatgtactaaatgtaggtaaagaagtatgttagaaggatgaagaatcctccccatatttacaaaaattgattaaaaaaaatgtaagattgaagtccttcagtatactaaggagatatacatcggtatagtaccacataaggatatacaatataaaacatctcattactccatgagggctaacaaatctccttctacttttcttgctatccaaacccttttgatttgtgcactaaaactagtagggttgaccaacattaagagaagtgtccttaaatgctgttgtgcaagagacctagaaagagaaatagaaatgaattagatcccatagtgcctttgatgtccaccacttgtcctaaaaattcctagcatttctttcctaccacactatccaaatcaatgtgaggtaaaaggttcgctaaaggagcttgccttcactagtgttgccctatataagatgatcatcatgtcatatatacttctaagaggagcccaatctaaactggctagtctcattagtctgtgtcatagccttaaagtcaataaacaatgtaaaaaaagataatcaactgtttttccactcttcatgcacaaaatgcaatagttaggactaagagttttgtaaggtcttctcaattgtagcaagtcattagtgtttactttcttgtgtgccactagtcaattataggccttgaccttagattctataaaaaattaattggattgaaaacaattggatttgatagattggacaagattaagacaaaggtaccataaataaggctaaagaattctttgtcttcttgtctagagaaggaaattcgaaagcttgaatgtttggtgaattacaattgctctcctctctcaatcaggggaaagggccccacagtgggggtttaattgtctcactttgaggtcgcagtcttgtttccctgattggatgatggtttgtaagtttagaagggcttttaggcagcttattgtcattcttagggattagctagctttctaagggtttgggtttgggtttgggtttgttgtttgggtggtttgtattagccttgcccctttattcttttgctagcctttaggccttttttttttgtatactgcatgtgtacttggctgtgccttttgctagcgcttttttatatattctcctatttacctatcaaaaaaaaaaaaaaaaagccgaaagaagataaaaggccaagcttttgcatttgggacggatggaaacaagtatgcatgagttagagaggatataggtctttcaaggtcctttatctccaagttggtgtgattacgacgaaaattgaggttccaaaaaaaaagggtaagagatgttaaggagatgagataggaagatttccaactgtgacaactctaaaaagacttggaaattgtgaacataaaggttgattcccctatcataaatcttccccaaaacaaattctttcctcattaccaccacaaagcaagtgtgcttagaaaaatcctaaaaaatttatgcaggctttccgaggtctcacctgttaggttatgtcccataaatggagagaaaaattttccctaagaaaccttcgaagccacttccctaagggggcacaattccttagaaaaatcttcctaaaccctaattcgccttccaccttaggcttacacactaggtttcaacttatgagatgatctctcttacccttaccaacccttaaccatagaaaatatttttgtaattcacaatctttgagtccagtgatgatggaatcttgaaaagagagaggaaatatctaagaatgtgagacaaacatgattaaattagaatttatcttttccttaatgataaaaaggcttttttccatccattcaatctccaagagattttatcaatcattggatcccgaaaagctcttgcttttaggttccccctaatggtggatcgaggtaggataatgaccaattagagactttgcagttaggcatcaaagccaacctactgatttggttctgactcatgtttatatcagggagagtactattgtctaaattgatcttaagtctcgatatgtgctaaaaaaccaacaagattagcttgagattttacaaatcttccataccaactcttgaagaaaagatgatgccatttgcgaattgcaaatgagaaactctagtcctcctacccactattaatccttccagtaaacaatctcctattctctcaacatcctacttgaaacaacagtttcaatagtgaaaaggaatatgacaaaaagatctcctccttttaaacccttggttgcttaactcatcctttgacattttcattcactaagaccacaaaattttttccaagacaagtaactcctcatccaagacttctatcttgtactaaaccctttcctttctagagcatggtctagatgggccattggatctcactacccattttcaatgaattgaattgttgatgcattaagaaggaaccattggatggcttcattgatttttttacccattttatcccaaaaatccatagaagatggccaataaatcaatagctttctatgacaaagtaagaaaataatggttgtctcataaaaaatgattatcccaattttattagtgattttaattggtagccagccgattcttttacaatgatttgatacccatcaatattttttccttgatacccaatgactaattttttgctaaaatattgggatttatattccatgttgttgatagaattgttaaagttccctagtaaaatgattttattctatggattgacaaccttctaccgttccgattttatgtcactttttgcaattgcaagaaaggttagcttagagctagaaaagatctaaagggatcccctatggtgggtggggctttggagaaaaagcttcatctagtcaagtggtcaataatttgcacaaacaagagggaggggggattgggctttagaaggttgtcaatccttatcaaaacgcttctaggtaaatggtgtgggagatttggattagagagggattctttttgggagatggtgatgaaaagtaaatatggtgaggaagtgaaaggatggtgctctagagttgttagagaaagttatggagtgggagtgtgaaagacaataagaagtgggtggaagaccttcaaaagtaagatcaggtttgttgggggtggaggggaatgggtggagggtgaaattcttgaaggataagtggtgcagtgatttgacccttagggaccttgttttctaaagatgcttgggtagctgagatatgagatcaagaaagggaaagaggatgttggaatcctcaattcttgaggcaattccatgattaagagttagagggggtgaagacttttttcaagcaattcgaattgacgtctattgatagggaaattgaagattacttatcaaaaaagaaaaaaaaaagggaaattgaggataaaatggtatagaggatccaaaaagttttttattttttatttttattttttttatagttaaatctctttattcctctttgtccattggaagcattgagacccttccattctgtctttgtttggaattcttggacttaggtgagaatcagattcttcgcttgggaagccgcttggggtaggatattaaatttaggctagcttataaggagaaggtgtatgattatgcaaagatgctatatgtgcaaagaaaaagaagaaacgatggatcatatcctttttcactacttgaaagcggtaatattttgggaattgttttcactctatttggaatagagtgggtattaccctccttagtaaagaatgatcttttgagttagcatgaaacttttgtagcgagtaagaggaataatgctcagataagtgctcccttatgccttttttggaccataggaaggagaaaaataagtgagcatttaagaataccaaaaaaacatatcaaatactcaaacaatcctttatgtataattttttgggaatgggctaaagtgcacatatgagttgattcattgttgatgtttgactttatcgattgattaagctccatgtaatggttgggggttgtttcttatgttcccttttacctagttatgtggtgcctttgtatgcattatgtatacttcagtgcgttcttttgttagacgccattaatacaatgaatatttacctatttaaaaaaaatgaattgttaaagtctgataatgaaaataatattcaagttattttctctttttcctttcttggcgttccaggttatttttacagctaagtcacatatttctcaagcataaggtgtttaaaaatagttcattgtatcattgataatctagttgtagttagtgatcatgcgaagtgacattttcttcctttcagggtcttac

SEQ ID NO: 10464 - DNA, 2244 bp, Vitis vinifera
  Intron number 3 from transcript GSVIVT01000735001 (locus G SVIVG01000735001) derived from phytozome v7.0 (chr-ID chr7 ; pos 290704 to 292947)
tggtattacatggactagttctctagacttatcaaaaaaatattcgaaaggaaatttttttcttcaaaatgattccctcaaaacaagaagattttatgaatttattcttgttgattcagattctgtagaagtttcccatattcaaaacagagattctacaaaaatttgttattcaaaatgcaaaattttcaaagttatttttgaacttgagtagagacaatctcttgtcacccataaaatgttttctcaaaattttaagccatcttcatatgattattatgattatatggatgcatggttttgtgtttttctctttcgtccattcgatcattcctagttattccattagtatttaaatttcaaacttcctttccaaattggttccaagaatggtggttatactttggcgccattccaacaattttatatcctcaaatcaaaccatcttttgattacttcaaagagcatgcaaagggtttgatctctgctcgatgttctcaaactcttttcttcacttctcgctttcaaattccatgaatcttgtgttgagattttgttcaaacacatctaattgatcttttatttcccgcgcatttggcgtatgaattcaaagttaaatggtggtcaaacttctccccatcttctgctcaacaactttctcatataaaaaactagattgcagcaaaggctccctccaatattcaaaatcctttttaacttcattttcttctatatgaaggaattccaacttcatcaacacctttagttgcacattcttccatcaagctgttgagagaacacctcaaaatgcttcagcaacgtgcggtggaaaccctctctcaactggcttcaaattttgatgatgatgattcaacctcttcaattctcaaagagccccaaaatgaagacatgtgttatagcttgccatacacaacgttggactaagatggagtcctttctcttcaacaatattcaaaagcgtcaaatcaacttcaaagcaaaatacaaaaccacacatccatataatcataataatcatacgaagatgacttaaaattttgagaaaacgttttatgggtgacaagagattgtccccactcaagttcagaaataactttgaaaattttgcattttaaataacaaatttttgtagaatctctgttttgaatatgggaaacttctacagaatttggattaacaagaataaattcataaaatcttcttgttttgagggaatcatttgaagaaaatattttccttttggaaatttttttgataagtctaaagaaccagacttattgagatgatgaacttcgaatattcgaactttcatcaaatgggcttttgcaatgtaattgcttggagcctgctttgaaggttgggcttgggtcacttgataaaatgtttgagaaggcttaaggatatttcctaagacttgaaattggtttgaaatttgggtttgaaaaataataacaataataataaacaaacaaatagcgaatattttatggaaccttgaccaagtctaattcaatcttatattaaacttttttgagttgcattggaacaatttcaaataatttgagttttttttttcttattatattatttaaattattaaaattaataagacttatatttgtaattttcattgttaaaacaaataaacttgggattgatgtttttaaaactcttcgaaagatttttctattttttttaagaaaaaaatagtacggataaataaatgaagtaaaataaaaatatgaagtactatgaggctagacaaaagaaataaaatacggaaaagaaggttgaagaagtgcatggatagggaaaaaagagtttatggatgatcacaaaaaacttcaaaagatactttgcaaattctcaacatttaatttctcgtactaattctcacctttcaatttctagttcccatagtttttgttaattaataaaaataataacaataataaactaataaataaaaataatcatttaatgaaacctcagtcaagtccaattcaatcttgtattaaaccctttttagcagttttagaacattttccaacattttgaattttttaaattattaaaagtaataaaacttatatttataattaatatttttttttaaaaaccttgggattgatatttttagaacccattgaaaggttcttcttattctgtttttttatttttttactttttattttttatttatttataattctacaaggccga

SEQ ID NO: 10465 - DNA, 10741 bp, Vitis vinifera
  Intron number 2 from transcript GSVIVT01021404001 (locus G SVIVG01021404001) derived from phytozome v7.0 (chr-ID chr1 0; pos 4959225 to 4969965)
acacctttggtaatttcctattgcaatatattgccaatgagataaataatgtggattcagatcatatcactttgcctttctcttaactgatttgttttatttgtcttggtggatgtcactttgtattgaatactagccagtcaagaagattactcgaagagtaaataacttaatatatgttttgggcatactcttgagattcttgataacgaagaaaaaattcttcataaaaacactagtatgattcatgttccttcttcaaaccatcccgatgtaattatgatgtcaagttcaattacagagaacttatatttgttaatttgttttcttttgttaagaaacaacattagtgctatatataaaactacaaagagtgataagggatcctccaaaagctcatgtacatcagcacaaatagaatgaaaaaaaaaagaagaaaaagaagaaaagtcaacacccatagtccaaatagctcaaagtgcataagctccccaaccaaggctgaaaatatagctccttttttatccagtctgccaattatttgattttctgatttagacctccaagaaaacaaacatcccatatttctagtgaggtccccaatcctcctcacccaacgatcatatctccttgacccgcgttgatcttgggatacctaagaagattcttaggcatgctatttgggcttggatctcaacctcaatggtcaacccaaatgtagccatcttcaaaaaaggctccactcataaaacctctcatcgtcatcttccttggtttattcaaagaacaactatcaaaattgagctttaagaaggagatgcaagcttggtttagaaatccttttttctaggcaaagaaacttggttgaaatctatttttataggaaaataaaatatacaaaagcttctaaccgaggagaaagaaaccaagagtaaattaattaattaattaattaataaaaaaacaataacaacaacaaaaacaaccttagctgataacataaagaagttcaacaaagtgtaagactccaaccctataggagctccaaaacactttaacaacaacttgacaaagaactctttcaatcttttgtccaaaagatactactttttaaacactttctcattcttctctttctacaagaaccaaaacaggtgcattggatccaatcttcacaactttctcctccttttatccaagcccctcatttgccaacttagaaggagattttaattggactgggatgaacccattgaaatctaaaaattgcgaataaaagatcttttaaaaacttgactgtcactgtgaataaagatgtggcttattgtcttctcagccatcttacatactttgcatctattaaccgaggaccactctctcttcatcaattggtcaataccaaggatcttctcaagtagcctcccaagcaaagaaaaaagccctcaaaggtgaaatggagtcctacacctcctttataggaaccaagttcaaccttgtagtgtacaaaaaattgtcataagatttaattgaagaatgtccctttttctctcccttacaaacaattctatctacctcgtcaacaatatccccatggctagctcccaatcatgaaaaggcctatgaaaacagaggttccaatgaccttgatctccctctaccacacatataggggttccaatgtatgcatggcaaaagttggtccttaacccattccccattgaaattaaccgcctaattgtgaactcctaggtctctttctaatgactttctagagtgccatcccaaaagccttcctaccttttagtgtactttatccttcatctaacaacctaaacttgccctttattaccctccttcaaaagttatttgcctttttcatatttctttttaactagttattaagcaaggcattgtttaaggtagagacacttctgattcccaactccctgtcctttttacttgtacacatggttgactaactcataagatgaagctttctcccctcaacttgattcccttaaaagaggcctctctagatattcttcaatctacttttaattgtctttggaatgattatcaacaatataaaataaattggaaagcttgaaagtgtacttctactaagtgccaatctagctccattggacaaatatgattcttccaagaagtcaaccttttcttaaaattctctttcattgaatgccatgctgagtaggatttgaaaatagcaccctaaggcaatcataaataggtagaaggataatcacccaccctttgtccaagcaaagaagccaatctcgctgccctctcaatctccctaatgtggtcatctcactcttttgcaaaatttatcttcaatcctagcattatatcaaaccaagtcaaaacttgccaaatataattcaattggttgggaaatttgaacttgacctataattcgattgggttgggttaaaaatctatcaacttgagcccaaattaaaagctcgacctaagacatgaaaattgtttaacctatagttatagatgcattgttttgtaaaactcatatttaggtatatttaatttttttgtaaacaattttattttgtacttattcaattaactatatagtgatgtaagtgactttgggcctatggcaaaggctattcaaattagccagtttagattgggtcccttcaagagcatatgtgatatgatgactaatctcatataggggtttgggaagctctattaaaggcacaaccctgtgcaaatcgcttgtcttttgttgatatggtttgtgtggagggaaagaaatgctagggctttagagacaatttgggatctaacatttctattcatctttttgggtctcttgtaccacgacattaaaggacatcccttttaatgttgtttagctcaattgacattccatgtgtaggtcataagggtttgaatattgaggaaaagagatttgttcttatcttatcaaattgaaatgttgttattcctcatagatgttaagatggttaaaaccttagttgattgagaggttttgttttgatttttctcttattgttctacatagatatataggtgttattagtatatcggattatttcaatcttttttttttttttagcttttgtaaatatagagaggattcctcgttctttttatgtattcgttttatccatttctaatacattcttgttttcaataaaatgcatacatatatattgagtagtaatggacataaaatgtgtaaaatcaaaatttttttttctttaacttgagcaacttgaagagctaatttaaaattgattaaactctatgttaggcaaatctctaattagagatgaagttaggttggtctttttttttttattagaaacgaagaagaatatattaatagaagaacagatacaagagagataaaagaaacaaaagaaggagaaaaaaccaagggaaggatgagaggtccttcctacacaaattgaacaaaggagaaaactcccaacaatagaactctaaaaacaaagagaaaccccaacaatcttcaaacatttgaagcgcaaactgcaatctagttgagttgtaaaacatttagaggaattcctctaaaagcttcagtacaagaagcctatagagaagaataaaaccgaatcaaataccataacatcttttccgttcttcctttatcctcaaagatcctattatttctctcttgccacaccatccaaatcaaagtaaggcaagtgatttgccaaagtgtcttgcctcttaatgagttccccaagcctttaaaagtaataaccaacatgtcctcaaaactccttggagggacctagaccaacgttgctagattgaacaacttgtgccagagtccaatggtaacgggacaatgaagaaaaaggtggtcaatcaactctccatttcctttgcaaagaatgcaccattgaggacagagggctttgtagggtcttctcaattgcaacttgtcattggtgtttactttcccatgtgctactaaccaagtgagggccttaaccttcgaagggacttttgaactccacaagaacttggccggaaagaacaatataggatttgagacttttgacaactccaagaaaaaagatttgactgaaaacaatcttgacgaagacaaagaccacgttcttgaatctgatgaagaaggagagaaaaacacataactaagggaggacattaatctctgaaggagatcaatttctgaatccgtaagattgtggtgaaagttaaaattccaagacagtggaaaggaattgccaaggacatttgagacagtgaggttttttatagaaataattctgtaaagatcagcaaattgagaacacaaagtttggttgcctcaccaaagatcttcccagaaacgaattctctccccattgcccactactaagcggacaaaaggggaaaactcctggaaaacttgagcaatagccttccaaggacatctgtgtgaccatctaaccaccatgttggcgtcccatccattaggatgtgtcccatatatactcgcaataaccttatgccaaaggccactcctttctctagggaacctccaaagccatttcccaaaaagagcaatatttctcatagaagtcttcccaaagcccaaacctcccaactcctttggtctactaacaacctcccatctgataagatgatctttcttcccttcccccgccctagaccaaagaaaatccctttacatcttctcaatctttgaagctattgatactgggattttaaggagggagaggaagtagctagggatgtgagacagacaagactgaattaaagtaatcctccgtcccaaagacaaaaaggcctttttccaaccatccagtttcctcgaaattttctcaaccaccggatcccaaaagcctattgtctttgggttccctcccaatggaagacctaaataagacaaaggccactctgacactctgcaatccaaaaccgatgccaaactagacaacaactcctgcttagtgttaatacctgaaatggtgcttttttctaagttgatttttaaactagatacttgcctaaaaaccaaaaggataattttgaggttttgaagatgttccatagaggctttagagaaaaagatggtgtcatcagcaaattgtaacaaagacactctagtcctatccctccccacaaagaaaccctcagttatcccagtttcctctgctctgatcatcaacctacttagaatatctgccactagagtaaaaagaaaaggagaaagggggtctccttgtctcaaacctctagaggccttaacccaaccctttgcattcccattaactaggattgcaaaacttgatgaagacaaacggccccttatccaagatctctatttttggctgaaccccttcctttgtagcacatgatctaaaaagccccaatccacatgatcataggccttctcaaaatcgattttgaagactaccccttcctcccctgaccttcttttctcatccaccacttcattgggtcttaggttagcttcttacccgattaacttgctcgagttgcaattttacctttagactaatttgtaagaggaactcactattaatattaacaaacattacctcgtatgagaatgatatattgatctctaaaatgtagcaagattttagcaattgggaccttgaagaaaccatctttggagtagtgagataacagatgttcccatagaagtcaatcacaaatcctttcttgtgcttggatatcatgttattcctctttgaccatataatccacatgatagctaggatgatccctctagagatttcattttagggctcctcccaaacccttgaaaggagaagaggaatatgttaacaatgataaaaacttcatgattttctcttctttgttttggataaaggatctgttgaagatctttggttgattctgtgttaataagaaatttggacaaatatccttgattatgtgttgattccctcttaatgcaaaagttgacaaatatctaatgaatctagttgtatattttatagttttctattcttgtaaatttgacctatgatttactaacttaaaataggtaatttccttattgcatactataagaataatttttttattgtattttgtctctatttattcttgtatatggttattcaaaggaattattttcctacatggtattacagtgggttaggttaacctaatctcattttgggcctttattggcacccttattttgtgtttgccttcattgtaaacttctaagggttttgtccttcaccgctgatacctattttggcctgtataactagtctttcaattattagttgcatttttttaactagttttattgaggatgtgtgaatcttgcattatttcaaccaccctaagcccaaatcccaccaaccagggctctatgtatagtgataactaacaaaatgagtttcatggagtggttccagtctcccaaactatttttgaaaagtgaaggaaaaacgaaatatgtgatgggaatagcatcaccactagcaatggaagatcctaaattgtgtattagaaggcaatttagttacatggaaaaataagaaacaactgatggttgcttgctctagtgcctggaaaagtttagggctatgggtgataggaaatgggaattgctttagttgaaaataatactttcagatttgaaagtagaagtaaaggagttgctgacgttatattgtgataataaagtggccataaatatagctcatgatctagtgcatcatgatctacaacttttcagattgttgacatgcttagaatgcaaaatatcttttcaccagcttgatgggggatgatgaatctttagctgattctttcttaatatgtaagttgactaatatcctaggtcatgggccgattccctcttaatgggaaagttgacaaatataccatgaatctgattgtatattatttaatttccaattcttgtaaatttgactcatgagttattgcatgttttactaacctagaataggtaatttcctaattgtatgttgtaagatgtctccctatattcctttacaaaattattcaaaggaataaaaaggaattattttgtacaggatcctttcttggatacagaagatttagaggttaagaagggtagctagtcctttgtagataatactttgtatacattctttgtggtagggccaaataacctccatgatagctaggattatccctctctatatagaacttcctttaggtttcttctaggaacacttgaaaggagacaagtaacatctcgatattgagagaacatccacttatagtttttttctttttgttttggataaggattctttttgtgtatatagaagaattagaggttaagtcatgtggctacctctttgttgatgatctcttatatacatcctgttgaccaaagtgatgcttctttttggtgtgttcaatatgattttcattttcccattaataggaaagatgggtagctactttgtccatttcatctatttggttttttcatgtggttagttgagaaaatttctatatcaattgaagattagattatgttattaggggtggacctctattcttttgagatcaaatatgcttttgtttttagttgaaaaaatgtttcctaataaattgtcacaaatgtaagaagtttttaagctttttttgtatgaattgtaatagttgttaaatgtggcataattatttaggattcataaatttttttcaggcttgtcacttgtaagctccttgtctaatccccataaaatttgatcaattgaaaagtttcgctaacatctttgggattagaaaaggatttcaaaatctcttaggactcaggctagtcaaaacgagaagggatattccacatccaataagggaaaaagttcttgacattgtatgtgcatggacttttcttaactttgtagacgttttgaagtcgtaagatctcttttgcgcctagaacggataatatttatataattgggagcgggtcgttacgaatggtattaaagtggatccttgactctagtgtgagagtttgtttggtcctataagggatgtttgtttgtttagtcccataatcttgtgggacacgataaggacattttgtttacattagggggtaggtggggggtggttattgtgatatcccacataaagtaagggaaaagttcctggtgctatatatgtatgggtttctcttaaccttgtagatgcattttgaagcaatgagagcccctttgggcccaaagcggataataaatacacaattgggagtggatcgttacaaagggttctcatagatcttaggtgggttgatcgtagatcaaggtgagctccaagagggaattaattatatctaaaataataacatcctcttcaattaattgagataatagtatctaaaataacaaattgaacaaggtattacaagattagaagctgtggtgcaacagggccaaaaagattgagggcattttgtatcatccactcccaaccttgcctttaggactcagtcctaattagcatgcaccttttcctttttctaaaggaattgaactctttaaattttttattcgttatatttggctctttttgatacataatggttgtagtattcagtagatgatgattacttttaagttatcatatgcaatacttagccaaggttaagagtgggaagtagtttcaactatccattgttgtttaattttcaagaagataccatattcatttttcatccaggtgaggcatttaaattcaggtaagtttgccaatacagtaaaaggtcttatctatgctgatgttgggttatagaaaggatggttttacgatctttattgtgatttttctgaagtgaatctttttaaggttttaaagtcatcatttagttgcgagttgtagccttatctgtgactttggatcattgttatgtgatatgtgtttggagactatctgatgaggatgaatattcaagatatatatcaagaaagggaattagtattagttgtaattaaagtaggattattattacttggaattaaattaggattaatatttattggagtctaattaggattagcaaattgagttataatataattagaatttgagtcatgataggttattagagtcctagtagactttggatttcttagagaagcctataaataggctaatcaatgtaaatcaaaggaatgaattttgatgaataatattatactttctttcatggcaaggttgcaaccctcaatggtgagactccattgattttcttctaggtgagactcctagaaggccttagtgagactctaaggttttccattttttcttcattgtttcttctttctctctatttcttatcttataattttctctaccataaagtttattccttgttcctctccttacaccctaaaaataaaaccctagcccacctacccttgagtgtaggcaaccatcctagggttgtcctacatcactatctataatcattttatagatattgtgtctgaaaataatcattttatataagccaaatagtacatatcataaattcaatcgaatatcccctggaatgtgacatcttgcaaaatagacaagaatctataatcacttcatattggaaaaagtagcgttgaaaattttattttgctgttaatattgtatgctccactgtccaatcaatagaggaaaacaaaggaaatatgaggttgtataaccattttccttgtttctagaacctggagatgattaccttttgtcgttttgtttctttttgttgggcaaaagaaatatatgtgcttcagctatcccgcctgtggaagatgaggcctactctggtcaacacaccagaaattcaatcaagtcatcttaatactccactcggttacaagtgcatctactaagctcgattggtgctataatatgatactatgaaccttgtcaaatagtgctatataacagttaaaactctattaggatagagtatattaagttccagtttttgtttggaggctctgcctctaagtaatagtggttgtagcattgctggtatggctgtgggggttgcattggtgtgagtaatggctattgtggtagcagaatttggttgtggggggttcagggtgggggtttgtggtttgttgtgttgggggatggagaagatgatttggtgaaagaggtgctgatgatggtagttcaatgggggtgggagttcgctttggcagtaatggattagtggaggtagtgtgtcaacatggttgagggctgggatataatgaattttagaacctttcgaagatgtagttaaacaaagagtaagaaccagggcttgacagtgctacacaatgggggccaagtgctctgtttgtggtttgatctattggaagttatggtttgttggaagcaagtatattacctatttaaatggacctctgagcagtaaaagatacagatccagaaatagctgaatagtgaaagaggatctgcatgcgatagagctatatatttgtttttttcttttgcttattgtccatactagatatttggtttatctgtgtcattatgacactcttattcatcttagaaaataactttctggtctttgattacatgattaacagaaagagaagagaaacattgcaaatttttatgaagctattgtctgacatacagggtataa

SEQ ID NO: 10466 - DNA, 1955 bp, Vitis vinifera
  Intron number 2 from transcript GSVIVT01017222001 (locus G SVIVG01017222001) derived from phytozome v7.0 (chr-ID chr9 ; pos 5605451 to 5607405)
gggaagtcaaaggtcttagttaaggttagtgggattttttttggctttttccttattggcaaattgctttaccttgcttggagatattcgttcatcatttttgtatttttttcctctttaattattatattttttctaactgctgttataattcctctgtttattacatttttgccatattatttccctttgcttttgcttggtaaccttttgtttttgggtacatggaaggggcctttacattgcaacccaactcctttgccacctgagttaggtcttaagggattatggttttcaacaatataatgcacaattctgaaaaatgggcatatgttgtctgggaacttgagatctagtcttgttcattcaatcacagtggatgggtctttctaagtagtaaaatttatacaccaccatgaagtttttcatcgcttcccttaaccccttcagtaaagtaaaagtcttggcttgggtttgcttcctgccacccacctacttggagaagttgaaaatgctcaactccagataatccataaaaatagctccaataccattttagctctgattacaagattaagtttgatcctttagtggaagattttaactgctgatatgattagggctatgtggcctggtattgtaaatcttgatatcatcccttaaaactaaagaaaagggaactcattctatgtttatggcagtgaaagcttgaagcgaagagtagacttggattctctccctaatagtttcaaaataaataaaaaaataaaaattaggcttttatttccaaacaagcaaacaagttgacccaaggtgtcacacctccaatgcactttgttgcactactccaagtcctttattggatattcctaatatagataagattggtggtaaacaacaaatccaacatccgcaaaaccaaggaaaaactgtcataaagagtaagaaatttactaattagtaaaaggggtggttggttattagagaaacatgaagctactcggatcaagtccaacatcccacataggcccagttcaatccttctgcttgttggtgatgcaaagatgcctctgagctaaaaaaagcatctaaagtctataaacaacataaatgaaaatagaagaaataatggatttgagttggatcattatgttgcaatggctgatatgcatccataggtcaatgatgtaagtgccattttgcaggttaggaatgtacatattaatgattttgatgtcttagtttgaattgttcaattcttttagatgattaactactcaaaacagatgccagttttctgagaaaaaaaaaagaaaaaaaaacagatgtcagttttacaaggaactctcaagaagagagcagatctcagtggagattactttcttgttgagaatagactgtgatttaaatgagctgttcttacacacattgaaaattgattctgaggatgttcctgaggctgcctaggccctaaaatgaatttgcttgctttgttccatgtaaaaacaagttttttcatgtttagttcatactttaccatgtttccctacttgccaatggcatgatttttgaccgagttcctaatttacattgacatttttaatttacattgacatttttaatgttgagtgcaaccatattacatttttctggaaaccaaattttttttgtttagtggctacctttggaggattaactcacattggaaaatcgtaggcaattagatacattagcacagaatttaagttttccttttttcatgaattaatgcaaatcacaaatcctcctctcatacagtgaaatagaccttctgttgatactgtgataaaaatttctgttgtctgtgtgggtacattttgtagaacccgatagcaaacagtgtatggttttcttgtctcatttctatggttattcaccttcttttccttgtgttcaggtacatccagaagggaagt

SEQ ID NO: 10467 - DNA, 11165 bp, Vitis vinifera
  Intron number 3 from transcript GSVIVT01026191001 (locus G SVIVG01026191001) derived from phytozome v7.0 (chr-ID chr1 0; pos 13748102 to 13759266 reverse strand)
catacattctaatccgagatctcgtccaacaatgcaacacatctcatcgaagcttcttattcaatcaccatttcttgaaccttttcatgggatttcactttggcaactgaatattcaagaaatataattaggtaactggcatccaatgatgataccaattttgatttgctttgatattaccaatatgtgttccatattgtttttcaacttcataatttttataagacaagatgatctattaatatatttagataggtggatgttaaattgaatccactcagcttatcccccacatggtacttatcaatagtccatatcacttctatatttcttttaaaagtaatagtagttcacatcccccacatctcaagtgaattacctactaaagtaaggctatatttaattgatttgatatacataatattggatgagataagatatgagataacatatcatatcccatgtttggttagctttggggtaaggtaaatgatcttatcatttaattatcatatatcatgttcaatcaaacatttaataagataatttatcaatccaatctctttatatatcctttttacataggatataataattctaagctgagatatataaatatctcatgtatcataaatttattcttcttctacatttttttcaatttttttatcaaccttttgtattactcagttttaaaacaaaagcttttgattaaaaataaataaatttttagtttgaaacaagaaagaattagaaatattttacagtaaactatacatgactaaattagtagaatatgtttatactaattaaattgattcattgtaactatcattcatgatcaaatttgtgcaaagaaaaagcttaaccccaattagtccttttttggtccctatatatgtgtgtgtgtgtaggaaaaatagttgaaacattaaatttagttcaaattgaatgttgttgttgcaatattccattttcattcctaagtaaaatattggaagaaattaatattagaaaacatatatatgacaacatattagaaaatgttaattagacaatatagaagtgaaagcatattctagaatgaatcaaaattaaacattttttttaaaataaagagattacatgataggatatctaataaattctattttattaataataatccacaataatatttaaatccaaactttataaacatttctaaaaaaatttaatctagaaattgtacattcttcttcgcaaataccttcttaaagttcttttacctcatccttgagattaacatgacagtatcatgaatatgttttgaagcatttattgtaaaagtacatgtaagcaagaaagttacacctaaatcaccatttttatcattcaagtatagaaaaacaatacaaaaaaggctgaatgggtcctttttgtaatttgctgataagcattcaatagtatcttataaaatttaaagtgaactatataccaatgaacacattgttaggatagagtctttaaaagcatgacatgatgtaacggatttgaaattcattatttatttgatgatattctaggttcatttttatctatccttattccatgcattattctctatgggcattctagcttaccattcttacattgtacatgacttgagtgtatcaacagttgcacaaaagatctaagtcatgggttccttacaaataaatgatttgtccatagtcggtttgtggacttactcaatccatttgagattgtagtgcaccacctcctaattagagggataaatagttttagttgtcaggatgaggtttccatgaagagtgcactaatgtgtaaacattggataggacctatagtgagtcatgatatagactatcaggtagttatgacatcacctagttattatactgtattgcctttcaaccttgagagaatattgaacttgtgcaaaagttaacaatgacttcgacctatgggtgagatcttaagttgatcatatatattccttatggattgggccactattgacggaagctaatagcaagagttattctcaatatagctaccacgatatctcatggactttaagatagtgtgttcctttaggtgatcttaaggatgtgtgatcatgaaatttatatgcctgtagtaattcctatagtagaattcaccatatgctcttagtgagctagagtatgtcatttgattacataataaaaagatctgtaactcaaggattatggaggtagtcttgaaaggttgataacttttagcttgttagactatggacgaccagttcaaaatgagattatatatagtggatagtaggttatagacccgaacacttggtatctcattgtaatatatatagggcattggagtgtagttggctctctctagtgggacgttgagtcaacttcaaaattggattctaagagagacaatactgtcttatgggttcaatggtccctactcgagctcatgatatcctttgatgacatcgtttataagggttgaatgagttattagttcacttatatgcataagggcattttgataattatataaggttgcataggggtaagtgagcaatatctctagactgggctaattgattaattggaggcctatagggttaattaatcaattagtgccctttttgggctagatttagtactaacctaagcccattgtgagcttaagtcatttaagtcatttaagcctagtaaggagcctataaataatcctttaggggttatggtttctagtgaagttttgtcttgccattctctcactacaatcaataagagaaccctaacctccaacccttgagatctcactatctttgcacctagactcaaggagaagttatcattaggtggaagatcatggtgttcacgagatctttttttagttttagagatttctacaatgataagaattgaccaagaacatccaaatcacaagtatatatgacactaatctctaaatctatggtattattttttgtttcaattgccatgtttccattgtatgatagatctagagagcctagaataggttttcatgcgtcctaacaatctaaggcatgagaatggagcaatccaggttttcccaataattggtattagagccttaggttagggaaaagcttgttagattcattttagggtgtgcatacttggttttgcaaatatgtttattcatcctatgacccaaagggatgaatatatggatgttatttttatgaatatgatgtttataattgtgattgaatgtttggatttgttatttgtacaaattaggttgtaagcttcatggttaggagcataggatttttattttacatgtaaaaatatttttgtttttttttgtttttagatagattgtacacttcgcttgatggagcataagatttttcttaatgtaaaaattagatttttatccatctttggtgacccaaaagcaaagattgaagattccaagcattcacaagcatccatggtgcaaaaaggcatctaaaaaggtgacactttcggagaaacggtggtagaaacaaccttgtatccacaagtgtaggatgtggtgctcgagcacttagattagtgcttgcgtagcctaaacgctcaaacgaccatattagtgcttgagcggcttaattgatcaagtagtccttccagcagcttttcgaacattcaagcgcaaatgatgcctatttgacgttttgggggtatttttttaaaattttataaccctatttttggttgcaagattttttggtaatattagttacttggattttatccaaattattaccattatgcaacaagatccctaatggccatggggaaatatttatgttattattcctttatttattttatgctattattgtttattgaatgggaagaatgtggcagtattaattagagtgattcatatgtatattttttaataaaattttaaaatatttaatgttatatcttcatccatgcatatatgatcaaatctgggctttcaagctttcaaatcggggaaatttccaagttaattagaagcatgactagaaaatagtgggtagtctaagaagtggacataagaagacttggttgacatactttgcttggaagaaaaatcaaataaagtcttaaacaaactaatcatgtaaggtggatgacaaccaaatagtaaaaatgcaatcttttgacttttattgtcatagaatatttttttaatttatatcaatgctaaacatattagtgattttaattttatcactattattaaaaaatagaaaataaaaaatatttggtgattatatgacaagtagagaaaaatttaattacaaaaaaaggtggaattaaatatatataccataaacaagttcatgtactatttaaaaaaagattatttaaagcgaactatacatgattaaattaatagaatatgttaataccaattgggttaattcactataaatattttaatagaatattttcattcacgattgaatttgtgcaaagaaaaaacttgaatcccaattagtctctttttagatggactctatatattaatgtaaatggattaatatcacacactatgactctacatttatgctctcttcaaccgtatgaggagtgggtacattcctatcaactttttggttttttcatttatagatgtcttatctaatagaaagttttacaaagattattgggttttattgcacttgtgaaatatattttactaattgtacaaatgaattaactaatagttgtttagatctattttctattttctatttttaaaaataaaaaatattggtaatttctaagagctctttaaaagttttaaaactggttaaaaaaaaattgatttatttattttttaaaattactatctcaaaatttaaaatttttttttgggaaacataaggtaattgtatatttttttttataagagtttccaagttttatataatagtcattaatattaaataatatttttttaaaaataatgtaaaatatatccaaatgagactttaataacttatttacagtaaacaattaataaactagttataataattattacatttgaggatgaagagttattagtgcatatagttgattagatgttcatttttttttctttttctttttaaatcttaaatgttatctttgaaattttgatcttgaagaacaaaactcaaatcggaactacatatagtttttttttccttaaatcttaaatattatctttgatattgcaatattggaaaatatatcgcacataagaactcctcgctctagaaaagaattgaagtaaaaaagatgataccatgttgataatatttgataaaaaaagttataatataaattaataaagataacattttagaagcaaggaacaacaccaatctctccttggagttataattaacaaaattcttttttaaatatgaaaaaaaggaagtctgtgaaatgaaatctttaaatggtgaaaaaaaagagtaacaaaatgcaagttctcaatagaatcattaagtgctgaataaaacatgaaattgagaatatttgtagagaaataaacccaagattataaaagtattaatatacttcgttctcatttgtttgaaatttcatcaaataactcgaaggaaagtcagtaaaattaagtcttaattctttaaaaaataaataaattagagtacccttatcctttttgaacaactttttcaaacatcatgacggacatgacacgaccattgtggaattttacataaaatgaaattaaaaatcattggtggtgggattgaaaagacctcctattacttagaaaagaaccaaataaaatattggctaaaacatatttttagtttatattaatattaaagtatttaatatttgtaattttatgttttattatgattaaaataaaaataggtatttaatagttatgtagcaaatagaaaaacatttaaaaaattattttgatttcttttttaaaattagtgaaattaataagacaaataaaacatttattttgcaatgattgagataatgttaaaatttttaatatctttattatttggaatatatatatatatatatattccaaatacatgtgaggtatgagtatttcccacacttcatttaaaaaaaaaattgtgaataattattttgttatatcattatagtttgagtttttatttaaaaatttcaaaaataattatggccatttcccactaaattcccaatcaagagtggaagacaacttgcttgacttgttgcgtggctgaaacaagagttatgaaggcatcattaattctagaaagtgagcaagaaaagaaaaaagaaattaaaaattttcaacttttaacatttgaaatcattgactccttatatagtaaactttgcaaattgggaggactactttgcatttatttatttatttattattattattattattttgtgttctttttgtgtggtcttacatgtcatcatataggaaattttcaatatggcgttttagaaatgatttgagggtggttgcttgactggacttgttttgtttaagagagaaaaaaaatggagtgcttataggagctaattttatttttttattagcaaaaaagaaaaaaaattatgattgcctaataaatagaaaaactttttcaaatgtttttatttatttattgattcctgtttaaaattagtgaaattgataatttttttttatcaaattactatgataggaaaatttctaagttaattagcagcataatagaaaataatcgaaagtctaataagtgggcctaagaagacttggttgagttgatttgcttgaaagaaaaatcaaatgaagtgttagacaagctaatcatgaagtagaataacaataaaattataaaaatgctattaataaaacatgctttgtgattttaattttatcattattcattactattaaataataaaaaataaaaaataaataaatgcttgataactataacaagtagaaaataaaatttaagtacaaaaacaaaatattaatacatgttttgtgtatcaatatttttattaatttttaatatatagagattacatgtgcaaccatctgacaggtacccaagaattatagtcagctaatatgttgtttggataagtacttatggggttgtatttttagtctacattaacattaagcatgtttctatatactaaatttttcttttttttttttggttcaaaataaaaacaaaatgcacgatttgatcatgtggttgtcttggtagagcaaattaaatatggtttgatcatgatcactaatttcccatcataaaatttattttaaaaaatttgtgaatacaagatttatatatcactatgggtgatatataaacgtcctcgtttcccaacaaattaatgtctagtggagagtcaggagaagacttgtttgacttgcttgagatgctgtgtgggtgaaagaagagagttgtcggatcaacaccgacaccacttctataaaacctgtgagtgtttagctaagttggcaattccggacaaaattcctaagtgctccctaactcggctttcctattcctattcggactacttgactttgaagactaagactttgctaagagaccgaggtatgtagtcgagtttgtggtgattggatgtgaatcaacccggtttttaatctttaaatgtgttagaaagttgggaaaaatggtttttggtgcaaggctttcatttctctgtttctggatcgatccaggtgtaggggtggatctatccaactaatgtttttttttatcaaatctcagccattagattaagggtttctttttacactttaaaaaccaatcttctctcattttctgtgtagagagactactaaaaacgtggggagagcagccacactccaagtgttcttcattttctcatttttgctttcctaatttggggtttttgattgcaaagaaaatccacttctcttaatgttttccaaactagttttcaatggattttcttgagcaataaatgggttgattcattacttcattcacatctcaatctctcattctatttgggtttgtgcaaaaacccattttcttcttgtgtggattcaagaagaggccgagattgaacttggtgtggactccaagtgtgctccaaaaggagaaactgaaaatgaaggtactagtcaagtattccgggaaggattggttggcttgagctaggtaaaaccttgtacttagtttttattcttcatagtggagttttcaatcggtgacaggattgtggtttttgatatcttcggaggttttccacattaaaaatccggtgttcattgtctctttctctcactctatattttgatttatttttgaggggtgttgaagcatttgcatgtgttttgcatttataaattgttgggagggtgttgatgcatacattattgcttgtggatgttttgctttgttggaaagttattggaagaaaaaattcttgacattaagatagtctaaggttaggtaatctttgttgggagaatttttaaattgttctacaacacctattcacccccctctaggtgtagttcattattgagattcacattttcaaaaccatcaactagggcatatatagcaatattaatcgaaaataagaaaaaatggagaggtgttccattaattcttgtagggtgttggtggtttcagtggtattgttataatataacatgctcttgatctcatcacctcttgctgctgcttgattactactcaaaaagtgctatttcataacttgtaattaactcttttaaacacttttgagtagtagttattgccttttaacccaattaacatgttaaggacccttgcaatcaattctaatcaaattgtgttaagttttggtgttttgatagctttttgatcaccaaagcaatccaagaatgagggagagctgtatatagttcatggaaaagcttttggaagcttaaattcatgaagaacaaagctttggagctccatagccctttgccaaagtcgttcaaagtatgcaaggagagaagcaaggagagaggaaaaacagagtgaagaaaacagaggaaagctagctgcagtcttcttgtgcacttttggagcacttcccgaagtccattttgtacattctatataccatttcaaagctcaggaagtcaagaatccaattcttcaaacggtgcacgattcggagttgaaacgaagaagttacagccactgcaagtcaatcactttaaagtgttgcggaatcagccttttgttgcgagaatttcgcagcctttttgcacagtgctttggatttcccttgaagtttcacgccgcgatggaagccaaacaccacaagatgaaagccaacttcgcagcggggcgagttcagcttgttgatgcgaaaatatttcgcagccctcttgagtgtgaaaaagttatgaaagagatacgagtttgtaaggactagaagtggtgtgtataaagatgtaaggaagagcaagagagatagccaatgaagcaagatggtttatcctcgcagacaccatttttcacctgcgaaatgttcctggagcttcccgatatttttgcaccgactcttttagatcttttcttcagatatttttgtataatttccattttctccttgtattcaaccactcatgtaattccttagctagaaaatatccaaggaagggtaaattatcttcctatataaactcccttgcatccactgtaaaatcatcatatatgtaatatcaatcaatatatagaatatacagagccttgctctgtttttccttctcttttatttttcatttctttttatttctagccaaccaaactttgaggatttttcctcaaaggatgagaggctaagctttttttctattggagtaaggaaagccgggtaagtttccacatgcataatttggaagttttgttgttttagtttttaatgaagagaaagtgtgacccgttaatggtttttatctttttagttaacttaaaacgcctttaaatcacctgggccaacacttggtaaggcaagtgatttccaaccatggaaatgcactagtttaccccttgcgagcctttgagaggtggtttgaaggtaggattttctagaatagccaacacttggtaagcttttggactccaagaagacatccattagttatctcttgcgagcttttgacgggtagtccaaggttaacgatcatcttgaatggtaagtgctcgtgagaggcatgaaccattgcaagttgcatcagtgagagggatttagtgtttgaacccattaatgggaagcatctgtacaacaccggttggagaaggaactatatgttaattctctaatgcgaggaaaagaaacaagtgaccggaactccctttttgtatgaggaatctgagcctagtgatctgaactccaagaaacaacttttctttataagtaaaatcagttactatttttggttagtttaaaaccaaaccttttccaactcaagtttatgttttcttttaaagctaaccttgaaatgaaaaggcaccaattcagctttgaattgatatcatttgtgaaatgaaaacccatcccagtgaacgatcctagagccactatactatagtagctttgtctttgctaccctagtatatggtgtaataggttataaattttgttgatcaatccctcaatcaaggagcaccagctggacacgaatcagctgagacaccaattgggcatgaatcaaatggcgccgttgccggggatcgaacctcgaatcaaatggtgccattgccactgccgctgctagggacgaatcactgctacaactgacgcacaagtggaggccgaggccgaggctctccgcaactctactcggtggtggtacatggaaaacactacttctcatcattgcacatgggatgacatcacctacaacagggagggacatgttattcagattacctattcacatcactattgcccacggtgtaagcttagccagttgaagttttcatcatttcccagcctcctctatctcaatcttagccattctttcatctatggtagcatcccatatgagataagtaagcttacaaaactcactcaccttcatatctttggttg

SEQ ID NO: 10468 - DNA, 10677 bp, Vitis vinifera
  Intron number 6 from transcript GSVIVT01020854001 (locus G SVIVG01020854001) derived from phytozome v7.0 (chr-ID chr1 2; pos 1015209 to 1025885)
tccttgattggctttcttcaatatttggatttcaggtagcttcaaatttggaaagcctttttcagcttttctatttcatgcactgtatcatttgttccataggatctgttctactttggagtgggtgtcagtggatgtaggctggctttgacccatcctgtctttttttcttttttggatcagaaacaaatatatttattacattgaatgataaatacagaggaggatgagaaaccctttcaagatgtataattggtgatcagaaagtagaaatgtatattgctccacaagaaaatcctatctgcatagactaaggcaggagaagcaatgcccacacatgacaaaacttgacacacctagagggtacttcaacaaaagaaactgagtgcttttctccttgattgtctaattggtttgcaatatggttacttgagcaaggaaccaagagaaggagcccccacctccagcaatatctataattttgtaaagctaaatattgaactttttaggcaaccaaaaaataacaacagcagcaatatctccttctgcattttggttggatagacacaaagctttagtttgcagtaagccctctagaaatgctaacatctctacccaatagctgaactaacttggtggggtttagagtaagccctcagtactgtacttgaatgatgtctgatccttggatggaggaggtagctgtacccattggtctcaagggccaatttggctttattgacacttcacaacagatattatcctttttgaattgtggtgtcagcctgggagtaagttcattcagaatttaacatgcttctgagcattccttcttcatgtttcagagacattggaatcaagttacactgctttttccccctgaaagtggagacatattgtggatattttactatggagctattattttcttgaaattaactctcttgaactaaaaatctgcaaatgaataagctagagttcactcatcatgcaactggtactcacctgaaatggtttaactttaactgttgagctcaacaatagagacacataattgtgacatagtgaaaattagttgcatataaagcaggtggttatgtgtttacaaataatagatgtcaaattggaactgaatcagaagattcttagtatctgataattcaaatattgcatgttttcaagttagatacaaatgcaaatataagcatatcaaaacataagtttgatcaatttcaaaattgtcctgtaggatccaaatacatcatgggttctcatgaacctgaggcaaaaagtatagtcccttgctggctagggtcaaatagggtgaccagtcttaaagtgttgaaagatagtctgtggttgcaattgtttcaattaatggtacgaaaatgcagtatgactcttacttgacagggttcagatcaacaccactccactctgggattgagatttggattttatttgaggataaatcttaagattctttgtattaggagagagtaaaattgttgaagtgatcattcttggaggataaattaagaaacactctcttgtagataaggacaaagtcttggagttgatgacctttgtatagctttttatcaagagtttatttaccttgagagcatttagttaaacttgttgaggaattttagcacaagtgggttattaaacttccaactccataattattgcttttgatcttagaagagcccttagctttagtattgaagattttaagctcattaacttgctaagcaccttgtatgagattttagctagggtcatccctaagtattttcattaggtactctagggactatctttcctttctaggggactttgttgtggtgaagatgattattgatgcatatttgatagctaatgaaattatgaatgagaagttactttatgtgaatgaggtggtttccatggtaagctttaagaatgattgatgatgcttttttataggtgaaagagagaatatattgacaatgtctaaatgagagtgcaacaaagtatactcggtgtatgcaaagagtgccatcaagcaagtaaaagtaggggagggaaaaaaaaccaacctccctccacttagttttagctccaccaatcaataaagcctatcatagttatggaatggttacctatgtacactctaacccaattagagtacacacatgagtgacctttcaagctttcttcctctccatccccacataataactatgacaactcataagggtctttcttactaaagagtataacctaggtcgcactaaaagagaacaaaatatcaaccatagagttcttgctttggagcaatgtagaagcaaatgatcaactaattcctcttcccttatacacatgtagcacctattcatcaaattctgagttggtcaagtgttaaaatcctaccccataaatcttccaaagcaaaggaactcacccttataggagcccaaggattctacactattcttgaaggaaaagcctcacttcttcccccagataattaagagtagtaggatttaatagagaatttgttgcactttgttttcttccaacccaatctatcctccacatcccttcttattaaggctgattgtagtcttctaaaaagggcctcacttattctaactcccaatcatgcaattgtctgtgaaatggggattccattgaccccctttccttacttgctccgacatttctgcagtccaatcatcttttcaatggctatacaaaaaagtgccaaggaggattcatccgaagaactatctttacaccatttgactttccaaaattttaccctcttttagttacacattcttttagttacacatgatgtagtgatatctacttttaaagttttcccacccatttctgatagcctttgataggctcacctcatagtagtctctcactgatcttgaacaccattccctttcattagtcccaaaattttcaactatgactcatttccaaagggattctctctttgaagctaatctttaactccatttaccaaggagagccttgtttagtgtgtatagatatttgatgctaagaccatcattctttttgtctagttgtgaccatagaccaactcaaccaagtaaggctttttctttgagctctcattttcctcaaaggaagttgtttgaatttgttccaatttaaggcccaccttaatgaggatgaacattagtattagttgtaattaaattaggattagcatttattgcagtcaaattgggaataactaactttgttataagataattagaattagagtcataatatgttattagaattatagtagactttggatttcttagaaaagcctataaataagggtaattgatgtaacccaaagtattgattgataattaataatattacattttcttacatactttgcagttctcagtggtgagattccattgattttgttttaggtgagactcctaggaggctttagtgcgactctaaggttctatcccttcttttccttattttctctctctatattttattttcttttattttgctgccataaactttatcccttgttcctctccttaaactcgaaaagataaaaaccctaacccacctatttgattgtaggcaaccatcttaggtttgtcctacatcactctctctttggaatgataaaaaaaagatacaaaataaatggaaaaacttgacaacgtgctcttgatcaaagtaagtctccctccattagaaagatattgtcattttcacaaagcaagccttctttgaagtttctcttccaccatattgtacaccctcgctgatttgtaagaagctcctaagagtaagcctaagtaggaaatgggaaagacctctaccttgcaccttaacaccaaagaaatatcctccattaaatgcaacttgttctatcggtataagttcacttatctccatatttatttttaagcctagtatttattttcaaaccacatgaaaatccaagatactccatttgttcttgattagcattgcaagaaaataggacgttattagcaaataacaaatgggacacttccatactttccccacctcttccactcatattgaagctaatatgaagcccccatctattgcctttctcaacatccttacttagggcctccatagccaagatgaagaggtagggtgagaaaggatcaccttgcctcaaacccctagatctttggaagaaactagatgggatcctgttaaatagaacaaaggatcaccatagaaatacaccatttactccatctcacccacttttgatgaaatctcattatgtccaatactataaccaaaaagtcctaatttacatgattatatgctttcttaatgtccaacttgcaaataaccccactacactcttttaaccttcaatctaatgtctcatttgcaataagggttgcattcaaaattttcttatcctttacaaatgcatgttgataagttaaaaccacattacctaccactttcttgagcctattagctaggaatttagttagaagcttatatacccccttaactaagataatgggtgtaaaatctttcaagtccttaactctacctttctttgtgatcagaactaaaaaagtgacatataagcttctcttaaaagaactattataaaaaagttccctcaagaagctcatcacctctagttttacaaagtctaaactcatttactgcaatgccatggtaaacctgtctagccttagggttttatgccaactcaaactagacggttgctagaattaccttcttagagaaagaaattgccaaattcctagcctcatcacttcctagcgcttcaaaagacatcctgttaatgctaggtctccaatccttggttttggacaaaagtaactagaaggccttggaaactccctccattatatttgcttccttagacaaacatacaccattcactctcactttggtcatggagtttcttcttcgagtgttggcccttttatggaagaatttgacatttttatatctctctttaaccaaatttctattgatttctatctccacatagtgtcttccaacaaggttacttgttgaattcagtcactgctaatcttcttgcctcaaacttatcaaggaaaggggagcttgtctctccttagagtcccaaaaaccaatcttattaaaggcctcaattattattttttttaatttttattttatttatgacattcctaaagacctcactattccatttttttaagtgttgcttaaggttcttaagtttgttgccaacatatgattgtaggagccattcatgttataacctaaccaccaactcctcactaagtctttaaaagcttctaacttaagccacctaatttcaaatctaaaaggagttttgtgcttccttatcccacctctatcaagaactataggagggtgatatgatattagcttaggtaaaatgctttgaactatgcttgaacatgatcctcccaatcattcaacactaggaaatggttttaacctcaaagtagaatgagaattcatcccatgacgccaagtgaaaggctctctaactagaggaagatcccttaagttcaatttttttttttgataggtaagataccttcaattcaattccttaataatctttgagaaatgcctcgtatcaaaagatggtcttggacaatttctcttctcgaccaagaaattgaccatattaaaattccctcctaagcactagagatatcattccataaacttctaataacacctaattctactcaaaagtcctttctttccctactaaggattgacaataaacatctaaaaacaccgagacaaagccatcttcacaatgtttgaaccaataagggatagagaacactcccacttacattttaagaagctttagcactctattatcccaaaaacctaagatgcctcctatcgaaccactggcttccactacaacctaatctaagaatcttcctactcctagactttttactagctgtccagtcatctattttacctttgtttcttgaggatagactagattaggtccttaagacctaactagtggttttattaacttttgcttcttcccatcatttgcctttttgacatttgagatatgattcctaacttcattaagtggctaagactggctcctcgcttttcttctcatgctccttttctatcccagatgtactcttgtaattaattaaacgttctaatttttggagctctctctcaaagtgggttgtagaagatgatttcttattctctctcaacaatgaaacactgccccctttctagcttccatcatctcctacagggatataatctccttttcaaaaccctcgattaccatccccatgaaactattaaagatagctagtttgtggaagacacccttgggtatctattttttcaaattactctcctaccaccttacctcatcctttgagtatcccgaatcacttggacaaaattccaggaacattgacaatgtgccatcttggaaaataatccttaaaggaccacttgtagccctcatggacttgctagaaatccttttcttcatttggttcaaaatttcccatgctcgacaactataagaactctagttcatgaccttttatcaacattggtaggccttatatcaaaacttacctttggctccttttgagtgtcctcaattaggcaccaaacaaagaatttctcgcttatcctttgaaggacaagaggaagaagagagtctatccccaaaaaaaacacaacagataaaagtcattcttttgaatttggtagctgtggccaataacggttcatttacataggaaagccctccctctaggatttaggtgaccttcgattctcgaggaatgaaaaagttaggcttgcttcccttcctcacactatagagaggaaaactctagaacatcttgtgggctcttttctccttggatttaaatacaaaattgggctttgctctttgactagatagctcccttaaaaaaggggaacatgaagaggtatgaggagcttcaataggcctatccttgcctaggccacaagaatgaactccaccttttaaataaactgccctttgatctcgtagtgggcctcattcaacttagaacccacatcctttgggctaagtaatgctcattccttagcttaaaatgaatttaaaatagaagggccatctaacttcgaccatatttctcctaaggtctactaaagggggatacccacctcactactcccacctatgcgcaaggttaggaaaaagatgtgctcctcactcctataacgaccaatttacatcccttgcaagacacactttcaaccacttttgcacacaactcctcgtcctttcctactttccccaccaacacatgaaggccccctcgctcttcctctaacctccagctagtaagctttgtttcaacctcaatcagccatgacagaatctcccactaaagctgaatggaaaaccacaaaaatcccaccatacttgggaccattaaactaagaatttgggaccactctcccatttgagtaaatgaggatccttgcctattgtaaattaagtcgagacattgtgtctttatccactgccgcaaagtccccgtactggttcctctcatttttaaacaaatcctttcctcatagatgaaaagacaaccttattaatcctaaacatacttcttcagcattagcatcatgcctgaaataaccgacttcctgagaccacctatccagatgcaaacaatttcccttgaaattcctcaacctcatttgcaacaccttttgatccttggtcaaactcaaataaaattagggaaccgctcatcaaatccaaataaatgttccctttcaaccaccaattatacatagctcaattttctaaggagaatagatccgaactattaagtgaagaatcaccctatctacccataaggttctattgaaggtgtgccatatttttgctgattttctcctttcttatttgaattcacattgcttcactcacaccaacacgatcatttgtcaccaactctaccaaataagctatcttacttggggaccctcttttttcccctacatgagaagactaaccccttgtgcttcttgttcaatcctgtgaggagggactaaccctaaattccctgactttgcaatgagaaacttccaccccttagaaaacctctttccttagagaatatcaaagtaaatatcttcttttccattggaaaaacaaagcatagtaggaatctttttgccttgttgcacatttccatcttgaaaatcctttctccttccttccataccttcctataagagtttagtcctacattttcattgcgtgattctaccccatccaataacaaggtaagttctttcttgccaaacttgatataggatgagaatactcgccccctcaaccaacaccttacccaccaccttgcctttaacaatctctactaaaatcgtaaaagattttgagtcaacaccaaactagtatttacctccatttagtggctgtctctacacaatgttaactagggtttgaggattatacccttagttgaaactataagcctgtgagtttaagatttgggtggaagagagaaaaaagaagaaataaaagatagaagaggtttaggtttttgttctgttgacttacctatattcttccttctgttcatgatattgagtcttatttgaaagcatgatatacattaggggtaaaatcccaacattttaagcttttaggtaaattggctgtctaacatagtatcaaaaccacaacatgtttattttcctaatttattaagccatgtgcaagtccaaaaaagattgtccataatttgtttgcctacgttctagtttttttctccatgttcaggtataggaccacatgtgagggagagtattggagagcatgatataccttgtggacattaatgcgaaaactcaaacttttaggaaaattagttgtccaacaagtctgaaataagaaattataatgatacccaaaatatagtattataacaataataaactttaatgcaacaagaataagctctaatggtccccctcaagctagagcatatggatgaaaattacaatgatacccctaatataatataacaataataaactttaatgcaaaaataataagatctaatgcagtccctctcttcaagctggagcatatgtaaacccactatatgtataaagtgccaaaaagtgctctctattatgtttgatttttattatattctaattggacttttactacattagttttgtactttatttaggcttctatttaatattttcttactaggaatatatctaccatgattatggttattgtcctattatatttagtattagaattgactctatgaatgcctagggttgtacacaattattcattaattattcaggcaataaaaatatttgtttaaaattcttgtatttatgacgagaagttttttactcctttctttattccctctttcctatcgttttcgactacatctacaggctttacgaggacagcctcttgtggtagtattgggacatgctatcaattctttggctgatctgtattgagagaaatgacaggatgtctatatataagaggtggtctaatgattactttttgaataatgctcactatttcacctttcttttggtgtcccatactaagatgtgctctggcattcctattagcttgattatattgagttggagagaggtttttggctaccataagtgggatccaaacatcaaggttgaacagttatgtctctctttagcatccccagataaaatttaatggttgtttttttgagtaacctggttctgctaggggttgttagaatgttcaatgaccatagaggtagttggttaaagttttgtctaggccaactggttttggtctaaaccttgaggtaaggatcctagctttgttgtgaggattgatagagcatccttataggaagtctactaccaatatgtggagtgggacttgaatgttgttctctcatgggtatgccatagaaggggaaggccttggaaattaatgcttggattcacaagattatccctcctagaaatctggagtgtgtctgctgacaaggtagtgtactgcatggctaagcaaggagctgccttgtaggaggggttggggaattcttcttcccctgagtttcatttatatgttctgttatcctttgttgttcctctgttattattctcaggccatgagcgttcaccttcgggacaagtagttttgttagggctgctgtttttagctttatttttcattgtttttgttcctatggctttcttgaaggatatttcagtgtttcttgttctattttacttcttaataaatttttcttgttcctatgaaaaagctacagattacagttatatgttagtcaattttctgcatgatatgctttgtatgtggtatcttttctgtgagggatatgctgttgtagtatttctggttaaatttgctgccactaccactgttgcttgttttatccttatcatataaactgctaataaagtcaatagttctgttcatctgatgctgatttttgtctcatgtgtttttgggactgaagaaaggta

SEQ ID NO: 10469 - DNA, 11186 bp, Vitis vinifera
  Intron number 1 from transcript GSVIVT01016318001 (locus G SVIVG01016318001) derived from phytozome v7.0 (chr-ID chr1 3; pos 5153154 to 5164339)
gacgtgatcaattttctgatctatgtgagatttctttaaaacttacttaaaaaatgtgatgacttttaaaatcattttaaaaattgagttattgaaaaaaacattattatctcaaaatttaaaaattttaaaagtaatttttaaataaataatataagtttatatatttacatattgcataaaagactcactcttatttaaaaataaaaaataaaaataggagagttaaaacaaagttatgcatagtaatttcattctcaaaataattctcaaataaattagtcttatccacatgagtgttcatgtcatttaggattaaatttaaaggtacatccaccaactacggtcttatgattaaaaaaatttcaatagttagtaactattgttttatgattaaaacaaaaaacaaaaatcttaacccatatggatatccaagtgactgagatatattaatttgaaaattgttttggtaagatgtttagtttatgggtttttttttttttttttttttggtaatacattgtttttgctcaacttatcattaggttctatgaaaactactattatttatatatttttttttaaaaaataaataataagaggtgtgtccaaacttatcacctaaaattattaggtatttctaaaataggttttgaggttagcaacattttagaaaacatgaaagaactttaaataaaaatataacccttcaaacatccaaagggatccaagataccagaaactagacgagtgccaaaattgtgatatgatatcatatttattaaaatctatgatagtccaaagaatatttgcttgattttctttcaaatatttttcacaatctcccccacaccaccagaccatcttccctgttgaatggaacatggtcaaaccaaagaaccctaaatttccaggggagtagtgggatcgattcatggtcaatcctgtaggtattgcagggactatgaatgggaagaggcagctaatccacccatctcacgctttctggctgtggaatattgcaactcggtgaggccttcgccaccgtgttggcatggcttgagctgcaccccaaagctttcagcagtccccataagctctttcctttcctcttatggccgccaccctttttgccttcttccggcgatgtgaccagcattgatggggtccgtcggctctgcctgttcttgatgtccctcaactccatctctgtggggattctcaccattccaaagaacatctgccattgggattttggtgggtatgtcattatgggcattctggggaatgtaaaatcatacttgtccgcgctctttcttggcgacaacccataattctctgctgctgcgtctggcaaggacttggaagacggggcttgttgaagcttcaggcctttcccgtggctgccatccatactctttgatcgggattctttccctctcttgaatgacttcaatcccctctggagaaggcctcccttcttgggctgttgctgtttcttttcagtcctgtcttcaagcttctgggtgtcctcgcaaactggtaattttttgtaagtaatgagcttcccgcagaagacaatgttctcggccgccgggctggtcgatgcagtgaaatcctcgctgaagaactcgaagaactcctgatcagaagatgaactctgatcatccttgaagctatcatcccaatccccaccaatatccccatacataggaagatcacacaaagacagtgtctccactgattcatccaaatcgctactgtcatcttcccaagttttctggattggatcctcagcaaccatggtgaaaccagaagaaactaggaggaaatctctaatgggtgttgggtgtattccaaattgagaagaagagaccaagtcttgaatatttatacgggaagagctcgggaggaaaatttcttgggacggcttctagaggaagaaaaaaaaaaaaggcaataaaagaaccaaacagagaaggtagagatcctcttttgatcttctagagaggcagccaggcagagaatgatagacagatgggttttctagatggatgatgagttggatttttgaggtggacatatatttgaggacttttttttttttggaaatattcatgcgaacggtccaaaatattcctcacatgagacagtaactgttatgggtttgaaattataaataatatttatatcatttttcattttttttaaaagggtgacgtttggaaagttattagtgtagttttgtaatggggaaggtgggcttgttctgaatgggtcaaatgtgaaggaggcgcactaggattttcatgtgggtctcagttctagaaacagggggtcccctcggaaactcttccagggccaaccattctttgatgatcaataatttaagggcatgaagattataaccatcaccactgccatgagatcttttgaatagtaatattaaatttgtcagatttaataatagtgggtgtttgttttcaatcatttttatgatactcttatagtatataattgtactttttgagtacatattcaaaaatttaccattttactagttttattattttatatccgaatatcttattatttataattatatcttgatctcattcacccacattttaatatcatttatttatatatttattgaatgacgtaaattttattatacacccatgatgtttaaattcaaaaactagtaggtactagattaagaccttaaaattttcataatttttaattttttctataataataaaaataactattttttatatatgattaattttaagattgggcactatggcataaaagtaaatatgatttgacaatttttaaaaaaaatttcataatcttcaaagcaaaaaaatgtttgtacaaacagagactaataaagcaacaacaaagattgacataaaccaaaaagaaactttgtaatcacaaactacataaccgaatgttaaggaatattttaaaaaataatttttaaaaataattcttaattattttataaataaaattttgtttagtgacttaaatatgaaagtcattttttttaatttgttctttacgaaaatacctcttgtttacatacaacataaaaattttaaatcatttttcatattttcaattattgttcagaaatcagaataccctaaaaagacaactaaaaaaatattattttaaaaaatatgcttttaaaacacgtaatggaaaacgcgtcttttgagtcagaaaactggttttgatgaggtaaagagagtcctgattccattcaaaatttgacttagatttggtaaaaaagtaagtgtcatgggtttgaagtattgactaagaggcataggatgaatccaatacaactcaaggtgaaattttctggtcttgtgaccttcaattttcaaagtggagagcgtggagcttgggttatatttggtaaactaagcgtagagccagggcttgaattcccagcccatagggtgcgggaaacgcctccctcacttcaaactgtaaaagctactcatcttcccttctcaaatatgacttttgaattaccaaaaaagattaaaggaaaagggacgccaattagccatcccttttcattttccctttattttttctttccttttttttttttttttttctttcaaaaagacatatgagaaaacacagaacttaataacttaatttaaattgttaaataaattaagtatatttcgtaaaataatttaatgatacgacttaaaatcaaaaaaattttaacacgtcacttaataacttaatttaagttattaaataaattaagtatattaagtatatctggtaaaaataattaatttattcttaaatctgcatcttcatttcacattcctattttcatttacattagttaatttcacaatctcttttactgtttcacatctctactattactcaaccttttttttatcctaattatagtttatgatgataaatatgtcaatttgatattttaaaatatgttttaaattaattttatcaaataaccttaatacttaaagtaagaattaaataaaaaattttaagttaacaattttaatataatttaacttaaagtcaacttaaataattaaataataagtactaagttttatcaaatacctccttagttaatgattattttgtgtttgaaaataaaatgtttcaaaattgaaattttaaaaaaaattgtatatagaatttgaataaaactatgactaaaacataatttaactcaaaattattttaagtcattaaataataaaaaataagtttttaccaaacatcttccaatttgattctcaaaaactttcaagaaaaatataaaagaaagaaaataaggaggaaaaatataatacaagaaaatatgaatgaaaaaaaaaaaaaatttaaactcaataacttatttttatacactactttaaattgattttacttattttaactttttgatataaaaattaaataattttaaaaaagctttttaaaagaaaaattgaatatgagatagcatagtatccatccctcttcacttctttgatgacctaatttatttttagaaacccatggtcgataaaaacccaaacacattaatgtcatatttagtacttgaggatgacaaatcataatagatcttattccttttcttcctcattttcatattttgataatttaaataaaaataaaataaaaaataaatccgatagaaagaaaatcctacctttctcgttcatttatcatatatcgataacttaaatagaaataaaataaaaaataattttaatagaaagaaaatcatattcataaatgggattttaattgatttgcggagagatgtagtgaactagaaaatgttaaaattattattttagccttttattttcattaggtttttataactttttttatggttgatttttatttattgagtaaatagttttcttagccttaataattaataataataaaaactctcaaaagttgttattttaaaatgaaaattttaaataaatgaataaataaaaacattaaacaaaaacaaataaacattctaactttatatttctaaaaacatccaaatataagaatttaaatcatcaaatttatttttatagaaggtaaatatgaataaaaacaaaatattcactcacattctttgattctacgtaccaaagatgatttatgtatcattaattaacttaggttagtagaagtggaaaaatttgacacaattcttcttaaacccaacatatttttcgtaagtttgaattgaatataatcatatttgagtcaaattcatattcatatatgacttattcaataaatctatggtttttgggttaagatatttaaatacaaatttaatttgaattaactcatttaataaatgtattgattgactcaattataattttaaactatttaactcatatttgtttcatttgaaatttgttttcgtgtaaataaattaattagaaacttgtttagttgagacaccaattaacttatacaagttccgactcaatttgattattaaatataaagtatcacatgttatttatttaataattaagtaatatttatgcttttattttttatatgattattatttatgtcgtgtatgggttaatttatataatagaatacttagattttaacacgaaacaaacacaattcaccaacaccaacaccaattaaccccctaattaataggaaaaacccattcaaataccattactataagaaaataaaaaattggtaagaattttgttgagccatattttttttttaatacttgtaaaatatttcttggattgcaagttcccagggttccaatccccaaatgtgctctcaattatgttgattcatttacttctagaagtgggtgtggggtcagaggtcacacttccccagtccttttgtggaatattattatgaatttatgatcactttacccacatggtttgaaacttgctaaaaaaaaaagaaaaaaaaggtcaaaaccaaaaaatcaaccaaaaattccgcgtggaagagatatcaaagaattgtgaaaaaaaaataaaaaaaatagatgacttaaaccatgacttcaatcacgctttaataacatattgaattactaatttttttaaaaacttgaatttaaaggttttggatttaatattctttaacataagaaaaaaatgaaaaaaaattaattaaataattttgtttctttattggagaattcagttaaatagtatatcaaagattttatgttatggctctatttctaaatggtaggattgtgatgatggatatggaagtggttctagaaaatgaaaggtctttgttaaatcttccctagtctctggtttttgagttttggtttgaggctacaacttattcagtcaaaagttgtacgtgttagtccaagatgattgcattttttccttaaaaatgtctttgttttcatgcgtgtggaacatagagaagtagcttactttgacaagaagacccacaaattcgaatcttaaacctcatgtctttgctcaactcttttgacacgtgataaaatcatgataagggatagattcaatgcgtatccagagtagacatttaaggggatttaaaccttttttaatagataaaagagaaatttatttattactaatagattataaatgatttttggtcaatttttgtctccccaaataaaaagttacatgtttacccccaccccccctctcaagtcatttgctgattccatcaccgatcatgactcaccattttctattgactcctacacactattccaattaaacatttacaaagtattttttttttagtttcaattatgcctttgctcaaccattttgacaagtaataaaatcatgatcagggtggatccaatacatatccaaagtggacatttaaggggatttaaaccctttttcatagataaaagagaaatttatttattactattagactataaatgatttttggtcaatttttgcctccccaaataaaaagttacatgtttaccccctcaagtcatttactgactctgtcaccgatcatgactcaccattttctattaactcccacacactattccaactaaatatttacgaagtattttttgttagtttcaattatgtctttgctcaactctttgacacgtaataaaatcatgattagggacagatccagtgcatatccaaagtggacatttaaggggatttaaaccctttttcatagaaaaaagataaatttatttattactattagactataaatgttttttggtcaatttttgcctccccaaataaaaaagttacaggtttacccccctcaagtcatttggtgactccgtcacccatcatgcctcaccattttcattgactcccacacactattccaactaaatatttacaaagtattttttttaggttcaattatatctcaaaatattttgtaaaagccaaccaaaaacatcttatatttattctcaaaataactcatctagaaaacaaattctcaaaaaacttttttctattgaaagtatgtcaaatatgtattttgagttacaaaaggatttaaaaaaaaaaattgtttcaaaagaaacattgctaacatttagaaattttccattagcaaagaagtcgtgtttgttatttacttgaaaacacaaaatctatatttgattggtggtatataatacgagagaagattaaaaatgagacaacatagcatatcctatatttgacatatttgttccgcaataagataaaataagttatccttttatttatcgtatcaaatatgaaattgtattatagatgaaacatattatccggtctacctttttatatccattacataagatgtgatattcataaattgaaacacgagttctatatatcccatgaatcataaatttattattctaaccaatttacttttattttcaattttttatatttttatttatgaaacataaaattttgattgaataaaataaatttatagttttataaaaactaaaaacgtatttataaagtatataataaaataatagtaatctagtatctaatataacatttaacatatatatatataaattgtttttatatttttaataatacaatataatatttttatttataaattttaaagtgaaaagtgggttttggttcactaatatgaaaatgtatatgaaaaaaaacctcaaaatttttaaataaatattattttcatctatttaaaaataatttgaaatacatgcactttttaatgagtcattcaattattccccaaaatacccttttgacttgtcatatcatcaatatcaatgacaactagatttttctacgttgatatttattattattattattattattattattagagtttttttcatctagaaacaaacacccctttaaagtagtttttttttccttctctctatcaacaaacaatccattggagaaatgagttaagtcgtcgcctaaatgaaaaaaattctaaagaggctgtggaaaaaaccataaaccttattcccagcaaaaattaaacttatctatagtccattaaggtttcactacttttaatatccactcttcaaatttcctctatgggatgtttgtttatggagaaaaagaaaagtctctattttcctatgaggtgcttgattttggatggaaaaaattataaataaaataatatatatatctatatatatatataaaattacgttgaggagtctattgaggaataattggatgactcattaaaaaatgcatatatttcaaattatttttaaatagataaagataatactaatttaaaaattttgtgttcttttttttcatatattttcatattagtgaatcaaaactcattttttccaattttaaatattttaattttgaataccattaacaaggaaataaaaattatttactaaattgtaaattatagaacaattttcaaataatattaaatatgtgagaaatttcatatcttttaaatatcaaatatctagatacaatataatttttatttaaaacaaatatcaaatgttgttatttattttgtaaatcaaacataatcatgccataacatatctatcggatataatatctcatgatgtatttcattgcatataatatccaatgatattttattccgaaataatattcaatgatatacatatcttatccatcgagatatgatgttttaaaatatacctattatatcaaatgaaaccaaagtttagttaatattaattttaataataataataataataaaataaggtttaaaataatgatttatcttaaatgtatttaggcaaaaaaagttttcaaagtaacaattataaagacaaattaagccaaagaaaaattaagaaaaagagacctcaaaaagaacattaattaagaccatttctctattaccacatctttgtaaggttgttgaagtaatagtatcatatattttattttttatttaagcacctaaaatcatccaaacgtctaaatcaattttattcttttataaataagatgatttcatgtttttgattaaaaccctaaacctaatatttcttaaacttctttttaaagggtttgtaaagttgaatacaagttatcaaatgtttcaaacctcaaattaaggtcttttatgcactttacaacctcggttgaggtagggaggaactggttgggtttgaacgatcaaggcgcaatttatataaaggatataaatttcaataggatatatcctaaaatatgatgaaccaaacatagctttagggttgttaattgtagggtatcacttagggagttcaacactgcaatatttcttaaggtaaattgtaaggctatgtttgtttcttggaaagtttgaaggaaaatgaaagagaataaaagtagagaggaaatagtaaaaggaaagaaaaatgaaagagaaaaaaaaagatttaaaattaataaattatttttatatactattttaaactttttttttcacttattaaattattctatataataattaaataatttaaatatatatatttaaataattttaattatatttgactttcttttacacttttcatagtaaaaccaaacatgaaaaaacaattttccttaatatttcttttttctttctttaaaacttttcggaaccaaatatagcctaagtgcccattagagcttgtgaatccaagtgtaaagcttaaaggcttatattgatagtctaattagtgaaactctcgtttaattagaaccgaaaagagtgaatgtaggtcttattgtgttcaatcactataaaaatcttgagtttgtattattttttttccgtactctctttactttatataatttttttttcattatgattgttattttttattttaaaaattaattttttatgcaaatataaaaaataaaaatttaccttatattattaaatttttatgattaaatattatttttatttttaatagcacttgaattaaattttattaatattatataaattgaatttataatttttttaccaaatcaaaataggaaaattattattattttttttaatgttttcatttagccaccaaagagacaccattggcaaatgggttgggactgttcccaaacttcttactctttgggcgagctttgaaagaggcccagacgcctattcccagggcccattctgaaactttcgtcaccactcacctggtggatatgggccagaacgtgcccaacaagaaagtagataccgtaccactgaaggcagccaccaaaacgacgtcgtttcaggcactaggattgcgtttccatttcctttttaaaactgaaaaacactttgttcccgcaatatcctctgcgtattcgtccaatcctcggcatcaaaaagcatactaaagcccacatctgacgctccttctcagcgcgtgggagtcatcaatcaaataagtgcaggtattattgtgagtctgtgacaactcgcatttaagcgagtggaagttgatgagcaggagaaggacagtgaggtaattctaaatatgaaaaagggtgtttttagtcaaataggaaaagcagagtctgttctatataaagttcccagtagagaatttcctcaggtgcgactagggttctagcaac

SEQ ID NO: 10470 - DNA, 3236 bp, Vitis vinifera
  Intron number 4 from transcript GSVIVT01014258001 (locus G SVIVG01014258001) derived from phytozome v7.0 (chr-ID chr1 9; pos 2068569 to 2071804)
tgcctcaaggtcctctacctgcacaacctgttccgcctgtacaacctctacagcctatacaacctacacaacctacacaacctgcacaacctgcacaaccagcacaaccagcacaacctgcacaaccagcacaacctgcacaacctgcaccatttgcaccaggtaaattcagtatgctatatgtttaaattttcagaacttccttctaccctccctgtatgtgtgcattctcatttagtcatatatatgtttcatcttatactgctttatatttagccttgtaggctcaattgatgcttctatttgggtattcgattatcatatggtagctgaccgactcaatgtcctttaaaatgacaaaactgtctatgctcgagttagctaattttctcaatttggtggcttaggaattatttgagtctcataaaattgagtattttggggttaacattcagcggtttatatggatatatatatgtttgtcagtctcatacagttctttattttgcccaatgaatgtcaaaatgtacaaagtatcattattttcttatagcttccttctctctcttaattcttttctgtttctttctttgcaagctcttatgcagcttcttccatgcaatccatgaaaaaagagattgatctacaatgtaagatgtttgtgcttgggaaatttgtaaaaacaggcagcaattctgtgtatgtcattgtattagtcatgaaatgcaagtaatcacaaaaatggacatccgtacaattttttgccctaaatatccctaagaaagtggtgaaggaattcttgagagaaaaatccaccatttgggaagaaaatgatacaagacaaaccaaaggctctccttgtggttcagctccaccaccaatgacaccatctctcccatctccatgttcactaccacatcccctgctgctggaactaaccacattctcactgtcttcttcttcatcactaccatcttcagaccgttccatcactgatgtgctctatctccaagcatcatttccagctatggtgaatatgtagggcatcatatatttttgacgattttatcctttagatggtcttccatatactgcaataaaagatactcttccatattatagttatcagcttcaccagaattggtaactaattattgagttactcatccacatactacaattgttagattgtgaaacttcttcgttattaataaattatcaagttactcttccacatactacaattgttagattgtcaaacttctttgttatcaatattctcttggggagttctttttttgcaaaaaagaagtattttccgtaatatgccctctgatcttcattgtttgatacgccaactcatccagagaggggtttggctttcttggaccttaatgataggtcaggatggtttggactactgtttgcttttctctttttcattttctttttgctgttgtgtctctggtttctgccttttctttctcttttcccttgggtattgctggtataagaaattaaaatttattatcatactggcttcactgctgaactgagcaccatagttataaagcctccttatcatccctacatctctgtgggaaccaataatagtccttattatcctccataatttccttatttcaggaacttcctctgagatagatttcttctagatatttgcataaaaatgaatctatagtaaaatattatcactttgtctacaaattattaagtggtggcctgaactttgaggtgtttgcttggtactactgtgcttctcaagatcagttgatttttccttttttttttttttttttttttttgaggccattgactggctgcaagattcatcggccaactacaaagcaatgtccaattatgctgtttgaacagtgctccaaggatggccttatttttctactttctgagttggatattttgctcttttttgggtgattctcttgtgacatggggtggtaaatgttgtatcaatgatcactggtagtgttgaagcagattaaaaagcaatccatatatagattttcttgatgctggttccatgagtatgtttgtggtaattattagtccatttacattgctagtagtcctccttatcaagaaaaaatgtacattactagtaatcttgtgtttcatcaaagaattagaagtaatgggccagggtgataagtactcagatgccatcctggcatgtaaagtataaagaaagtcaaaagtaaaaatctttctaaaattacaagatccaatagaaaatgaaaaaaagtgatagtaaactgatcgaatgctaaacaaacaagctatacatctccctctttctctgaactcaagaagtaaaaatccttccaaagctacaagatctaaccaaaaacagaaaagtgataatacactgcacggatgctaaacaaaaacaagctatacagtttaaggatgccagtaaacaactttagagggtaatgaattccctgcaaaatacaccaactgcgttgcttctcgcctggctaattgatctgcaacctgatttgctaaacagggtgtccaagaagagcatgcaaagtcactagtgatatatacgattggtgtagcccacgtcaaacttccacatacttctttccttcttaaactccaacatcagaactgcagaatccctctccacatatagattgcagaaactcaaaatttggcctattgcaaagctttcaagagtactaaaatcttcccctcaatggtcaagccttctcccacatgtttggaaaaggctctcaacttccaaccactatgttctgggttactcaaagattccttctggagttggattccactcttcttttatttatttatttattttaaataggtaaatttttgttctcattgggacttgaacccccacaaacctgcctaaccttcaacaatatcctcttgaagaatcatggggcttgatttttatttgcgtcatggtccagtaaaagtcaaattgatcactagaataagttttaaactacctggacatagaaacaatgaatcagtttctgcatttttttttatgagaaatggtttatttgatgagtttaaagtggtgaatttgttttattacattttgggaggattaagctgtgtgcggttgctttgtctgagtagaggtgaaaaaaaaaaaaaagataattagaaataaaacataccaaaaatagttttgatgcaaagcctgaaacagtttttag

SEQ ID NO: 10471 - DNA, 4472 bp, Vitis vinifera
  Intron number 1 from transcript GSVIVT01012871001 (locus G SVIVG01012871001) derived from phytozome v7.0 (chr-ID chr1 1; pos 6390505 to 6394976 reverse strand)
gaattcgtgctagctcagcagtcgctcttgaaccggtattttcctctcttcttgtttggttgctgagaaaagctttaacatgtttaaattttagtgtttccctaaaggtttagcatgtcaaatttttgtttttctccatcaatttctgaataatcaaactgccatatttgtttgtattttcgcttaattatagtcgtagggaagttgttggatttgaaaacttattattattattcttttggtttctaagtgaatgaagaaacgaccttatattagatatacttgaataatgatttttgttttattggctatgagataatggaatgcccaaaatttaaaatttgacttcttatttttctcctgcacttttctcatcaaccaaacagagcatttataatgttgatgggcatatcacaattaaagttgggtcacgtctcatttcagaaaagacctttctttcaacctgaaattgatttctttttcatgaacaattttttcatgaaaacatttcctttgagaacagatcaagcactggggtttttgacaattaaagtttagttcagaacctttttgtttctgcacaaattagagggattttctggttgaaattgttgctggatgttcggcaatgtgcatgagtgtgtatttttttggatgaagcccttagggaatggttttatttttgtacacaatttgcaagatattaaagatacttccttggtgttcaatgctggatctttggtgatgtttgttgtgcaaattgttaaaaatatatggactaataagtgtgtaaaataaataaagcaaatagaaattagactcatgaataaggttgattgagactaaagtttgattctatatccttaagacaaatttgtctcatttaagtgcttatgatttagtagcaatcgtctcctaggatacaatggccgctttcttgtgatagtagcacttcaaagcacaaaaaacaacgagtcaaacaatgcattgtcctctctacaaaagcttggatgctataatttgcacacttgcagctcccacttgacttggaatggaattctacacttgggaatggcatggaatggaacactacacttggttcgaatgaaataccatacttgggaatgacttggaaaggaaggaaagatagatgattgttggaaccaatgaaatatcatggagggagtcccctatttataatggtgggtagtgcctattggaatggttgtgtctctaagacactagacacgcctattggaaaggttgtgtcttaagatactaaatgcatattttaaaaaagaatgtcttttatgaaaataggtgtcctgtcaccttgaactcaattttttcattcatttgtaatggttgtaagttatttttcaaaaatcactttccaataatctcccacatgaaggaacttgcaagtgacatgctgacaattcagagagtactatttggaaagaagttgcattaggatggataacaactctttccaaacattgttgattctcacagttgtgtttagtttggccttgaacaactcctagtgttcctgagtgttctagagaattgaagcctcaaaattacttgtagaaactatccttagggctactagatcctataggtgatgagaactttggattactccattcccaagccttggattttgttagatgcatgaaactattcctagggctactagatcctatgcataacaaaaacaaagcattcaaaagctttacaagatctaaattacgggtttagaatatttaactcatatttgaatgttcccaaataaaatccttatggtgaagattgttgtttgatggtgtgataatcggaagtgatctcgtaaacctcctatattatgcccaatgactcctttttgaagctagacactcggatagtggaaataaataaataataaattccaaatttgttacatcatgttatgctttaaagggctctatcataacaataagtgattcctattaagagtatcctgccatactccacatggttattcaagctatagagttcattaaaagcaaagcttgacctagcttgtgctgcaaataacactatttcatcataggaataagaatgagagattatctctatagtgcttgtcttaatcattcataacttagttatctctttgaacctagatttagggatctctagtcaactaggttgggttaccattgtgaagtctctttggttataggctttaattcctttccccttgatgagtagttaacttgatcttttgataaacctttagtaagtagatttgcaaggttatcctatgattcaatataatgaatggaaatttccatttgaaagtaattggctgcccataatctttaacattaccattatatatgctattttgtggcctttcaatagctaattgattatcacaatgtatgcttattttagacataggtttttaaccagcatgttatgccctcgcaaaaagttataaagtcattctacttctcctactttatctagcactacaaattcagatcccatggtggaaatggtaattcacctttattttaaggacttttatgatatgggtcgtcctctcattgtgaatacatgatcattggtggatttaaggttaaaaacaactattttagccgaatgtccccacactttcaagtatctataggagaacctttttcctttcctaacttatatggagttacatttctttccaagaagatttcaaattttcaattatagctacaatttggaagaattcactcaacaccatcttttctacatgtatttcttatagaatgaattgtggctcttggacttcactatgactatcttggaatctatcatcttgaaatcctaaactcttgtgactatgaaattcttcaagctagtattctctatattatatttcttccttaagaactccgatagttccttcgtagtatttattgaactatacacattatatattgtgttgtccaaaccattgaggatgtactttttgcacaggaagttagaatgattcaaagtttccacaacttcctacacttgcttatttatttcaccccctttaacatattgggcatcctcatataagacttgagcaagatttagcgttgttgggtagaacaacatttctttttgttgccacctcttgaagtccattccaatgagcttctctagcttcccaccataggcaacatgccataataatcaaacaataaaaaaatttgtcttaagattgttgtgcaactaattgaaaatatatggtctaataaatgtataaaataaacaaaacaaacataaattaaactcacaaataaggttggctaaggctagagtttgactctatgtccttaagacaaatttgtcccgctcaagtgcttacagtttaataataattgtctcttaagatacaacatcactttcttatgatagtagcacttcaaatcacaaaatacaatgaatcaaacaatgtgttgtactctacaaaagcttggatgctataaaactatacacttgtatctcacatgtgacttggaatggaatatataccatactttggaattgagagagagatggatgattgttgggatcaatgaaatgtcatggtatttgtagttgtaggtagtgccaattggaatggttgtgtctctaagacactagacacaccagttggaaaggttgtatcttaagatactagacacatcttttaagaaagaatgtcttttctaaaaataggtgtcctatgactttgaactcaattttccattcgcctacaaatggctttaagttatatttcaaaaaccattttccagcgatgtttagaatcattgatgcccttaggggtgatttgatgcctgtagggtgcgcaactagtggaattaggcaataaggtgaagttaggtcggtatacagcaatcacttaaacatcatcccccaattcttgtgctcctgagatggtgaatgatgtcagtaaaggattaatatggacttacttgaaaacatttaaaaatctcatattccaaatgaagaatttttttatggactggagggtatagaacagaactgctgtggctgatgccaaatgtctgagataagggactgcagattatgttgtgttccacataccactgcagcatatatgttcaaacaggaagaagtttctatgtgaacccatgaaagtactttccaacattgatcttggtgatccttcttatgtagtttaaggtgtttaaaatccgaaacatccattttttaactgtaattgtaactttgttatgtgctaaggttgcaacacatctgaattgcagtgttaaacaagatttttagctcttatgaacagaggattaagtatcattttattctataattgcttttcaggtttcttcttcttgtttagtagtaaattagtaagagtaaagatctgcattttcaggaatcaagcactcagctgaata

SEQ ID NO: 10472 - DNA, 3936 bp, Vitis vinifera
  Intron number 8 from transcript GSVIVT01011097001 (locus G SVIVG01011097001) derived from phytozome v7.0 (chr-ID chr7 ; pos 1622946 to 1626881)
gaaatgtaagtgaacttcttgctttttatcagctaatgatttctttcaagtattcttcgtaatcccatatttcttatattatattcaaccttgattttgaaatgctaaaatttgataatctttatagtacttcctgcaatgttatttgtatttcattgatgtggcattatattttcttatatattaaagattttgtttctttgtaagaggagccaaccatgtgaatgatgagatgttctagttcaaggtgagagtggagcaggttgaaagaagaggggattggagctaatgaccatcagagagtaatttcttagggagcaaattttttagctctcttaaacaatgaccgttaaagcctatttataggagtttttggataagaattaactagatgacatgacacagactaatgagatagtgccacttgtacatagaccaataaagtgatgtcatatgcttgtgggccaataactgacgccatgcatgcacctgattgattcattggagaaaatgttctcaatttggtcaaaaagggcttagcaatatttaggtcaatcttacctcatgaactttcaattctaatcaccaaaataaaaccctcaaaccatctcatatactggatgatggggcaaaccaaccgtacaaccaaggtccttgagcattgctctttgattcccgtaggcttcaagcatttggatgttatgctatcaagcaccttctagtgaagtataagtgatactcaatgcgatgttactaagctcaagaagtcccattgatgaatgagttagaggcaattgtttggtgattccctcttgacaaggtgaaaagtggttagtaacgccagcatgtaaaagtgaggaagtgatctcccatcacctaacttagcatgttggaaacaactcctctatccattaacaatatttgagtaaatgctttcattttcaaatgtgtaggagacgtcactcaactaccactacaagagggcttctacctagcagtaggtatctagatcaggttgctatcacatgctaacacaataaataaatagatgctaaggcttcaaaaaaacctgaaaaaagtgaagtaatagagaacaccctttagtagctctgctcataagtcataatgtttagtacctctgctcataggtaataatcaatgccctaaccttaagggatgtattttcatcattagcctcatacaccataactgaaacatgacttattcttatacgtccaaatagggaggcaaaattcaggcatcaataatgggatagtcttaatactagtttgacattgaaagagtttattgttggtggagatgctaattaaatgaaaatcaaactcttcacataaaaaaaagaaggaaaatctatacaataaaattatcagtgccttgttttcttttatatcactggtcataacatctactttcgtagcctcaatctataccatttcaggtgtcctcttgtctttattgaaccttccccttgaacccaatcgcttcttgcctcaacattcacttatcttcatttggctttatgccaccgaaaacctgtcactttggaaacatcttaactacagtatttgcttgccattctttccttggaaggtgagaaagtttttgtccaatattttttgtgcaattcaacttgatcaacctctccaaagttgtattaccactaaaacaatttgaagaaagctcttcccatctgaaattctcattagatatgattttgtgggtgtgcactcaactttaacaatagatctatgtacaacactcctttgaagaaacaatgtagtcacaacccttggctaattattgaacttattcaactaattaatggattttttccattcacaagaccattaaccaaaacttagatgtatctatgaggtgctttgatggaagtttttttcatttacttacatattatggaagaatattaatgcattaactagtataattgatgaatttggcattaacattgcactcggaagtaaaatggattttaaggattttttgatagtggaagactttattttagagagatgaggacttcaaagctcttttaatgacgttttttatgatcattaaggggatgaatcatcaacaccaatgttttaaaaagctgttaaagcttacaccttgaggttcacctcaaggttaggctctacgaattagccttgtggctataccttcaattaggataattgaggattaagcctcgccctaacaaggcttacaactttgagggtatatcctcaaggatgttgaggcttaagcttcaaatatccaaagggttttaatgggtttgttgcctttgtgggctttaggtatatattttataagcttaaatctcaatatttaatgagtttttacgagttctatgcttttatgggctttttgatatagattttataagttttgtcttagggtcatggattttattaaaccttttacaaaataaaggcctagcttccaattaagactacctttagctttttaaatcattgatcaacacattggtgggataaggttttgtttagttgatttcttccattattaggcaaagctaaatatgatggttatttctcaataagcaagtaaaggtgctatataaaattttgtattggaaagtggactgagttttttcctttttgtggccattatgatattaagttgtcttaacatcagatccttttctctctttgtccatcactaattcactatgttattacataatgcacaagttctatttagggggtatttggtaaatcaacttaatgatttaatataatttaataacttaatttaagtcattaagtatattaaacttgtttggtaaaataacttaatgacacaacttaaagttaataatgactttaagtaataagtcaaaataattaacttttttgaatcctaaatcttttttatcctatttgcccatatctaatgaaagtgtcttttgcatccacaacttatgttttgcagtaaatatttgtaattattttatctgtctacaatactttaaaaaaattaatgaaggtaaactcttagttttttaatttattagtctcacaacttatttattcttcctccaatcatgaagcaccaagcttaattagtggtcatccacaaccatcttcaactccaatgtttttatgttattctcctattgtatgattagctgaaacttagagcagccttattaccaggcaaaagcttcaatatctgaattctttttatcaaaacgaaaatgaagggggaagatatctcaaatttcttgatttactcttctttagtatctcttatttattcaaaggctggttctaactcttgctagaattgaatgagaaaatgcaagtagctttaaatgcaaaaagagagagtggtatcaaggaatatggtagaacgtggaaggtcatttgacaggaagaggattcatgttgcataaggatgaaaaagaatgaaaaaaacatagcttccaaattactgagggctgcattcaatttccagtttgaaaacatgaaaacattgctgtaagattgccatgccacagctgcgagttgagagaacaatcaaagaaatagttgttaagacattttccaattctctctctctctctctatatatatatatatgcatgtctactcatgtacttccctaaatatctgaatatgcatatatgcattgtgtactagagacaggaggtaatgcatatggataagtgattttatgtccaagcttgggcacactctatttataatcatagattggaaatataaccataaatagaaggtattttttggctttttcagtcccttttcagaaattagaaatgcttttcggtgcattagattataattgaacttttaaatgttgagcatttctgttgcaggaacgttataaaatctttcattcaaggttttcttc

SEQ ID NO: 10473 - DNA, 2001 bp, Vitis vinifera
  Intron number 2 from transcript GSVIVT01032571001 (locus G SVIVG01032571001) derived from phytozome v7.0 (chr-ID chr1 4; pos 28470564 to 28472564)
attgattttcaggtgggaattaaatgtgtttttctgatgtagattttgttactcttttgttctgttttgttggtagtttggtgtacgagtttgaaaaaaggtgtcttttttagttattgatgagtatttcgttttgcgactatttggatcgaaaaatttgaatttggatttgaatctggattctgttaggatatgcagatgctttactgttactggtgtttacctatctgctagtgtgtagaggttttactgttataatttgttagaagtgcttggatgttaggattgacggtgctttagcagaaaaatggtggttcggtttaagggtcgtgtgcccactaattatattggaattctagatttaagctggagcagtcatattcaagagattttatactatggtcttgttttagaagaaacaatgtgttgaaatccaaaagtgtaaaaaaaaaaaaaagaaaaaaaaaaaagagaagagtttccaaatcttaaacagaacactatttcgtagggcctgaaaccctaattcttgcttaggctttgtttctgacattttatactgtattgaattggatctcaattattatgcggtctccttacttgatcatggagtctgaatttggggccttgtttgcagagatatcatttcctaattttcccaattgggtttatcattagtaggctctgtttcttttaagttaaacaaatcatgctcaagatattacagatatttttttctcttggttttttttggaaatttatctcaatttttttcttaaaagcccaccacattgtattcttattatctgatgctctggtacattcaataatggacaacacctgacactggatgaaccattgattaattttctgtgaaggagtagattcactggatatcactgtcttctttctatctcttgtagtgagccttcagagtgaggtgacagtttgtaagttgatgagaattgtctggttctgtttcaataatagagcagatatgaatgataatatattacaaatcatgttgtgtcttgctttgctactttttattagtgtattgattgatgactcagattcattgtgtattgggaagaaaacttcaggaagaatgatcattgtcggctccaagaaaggtttttgcatgcttactttagaagtcaagagtagaataaaaacaaaaatataacataacacatgtcaggatcaatccattgctgggttcaggatttatccttcttttataagcaagaaaacgtcactactcagtaacaaaataaaatattatacagaaataatgtcacaagttcaatgaacatggatttaacttgatttttctccttttgcttctcaattttgaagtctgtatgttggaaccagcaagtagtgatttttccccttttaattgtgtatctattttgtatataaatataaactactccattatgcaaccttttttattgttggaaaaggagaacacaattcagaagtttaactcatttttggcatttatggtcataggaaaccttatagaaaatttcacgagcagaaattttgttagtttcagtgttcttccaatgcaatttctgatttatttcaatagttctcttcatatcaaaaagtaattgtattctttgtttcaattatgtaaacatatcagataaaattacaacttcagataaaattctaccagtaaaaatttcattagtttcagtactcttccgaagcaattactgtatttgtctaagcaagtaattgttcttttcaggccaaaaataaattgcatgctttatttcaattatttaaataatatcagctaaagtctataatgcattgaaccaagtaaaaatgttcactgaggttaatagagcattaaaaccatggatgtcccttgcagtgcctgctctagttcacctttcttggaacttttaagttattaatacagctttgactaatgtttcctttacagaccactgaagcagagacaacatccttaaggcagcg

SEQ ID NO: 10474 - DNA, 22044 bp, Vitis vinifera
  Intron number 2 from transcript GSVIVT01013045001 (locus G SVIVG01013045001) derived from phytozome v7.0 (chr-ID chr2 ; pos 9298180 to 9320223)
agaaggctcagcccctgcgtgttctccctatccatgtatgagattgttgactcttgtgcatgggaatcaatctatggaaatataatgaaggtatgtggcctagtgctatgctacaaactgtatcaatggcatagccaataaaaacccaccatttggccatgatgcgtcaatgaaaattgaaattacttggtgtatgcccagatgggtgaacttcagcaaatagaatgtaatggtggtgggatcattgtaaacgagatatgaacaggcaaaatttcccaatgcataatcaaacatgcatgttcagcaaataaagtagccggttactcagtaaagcttgttatttatgtactaaagcagggttctagttaattttattttgatttggataatgggaaacaaaattccaaggaccataaaaaaatcccaagagagggagcctcgtgtttttcatcctaagcttctttcccgctcttcatatttttaaaccccaatgccaacttattgataagtcattccatgtattgatcgtagttacatccatttttgctgagaaaagtagagttttgagcattcagagaaggcaataaattaatgtttaactagggatttttgacaaaattatcaaacttttaaaaataattttttaaacaacaacatatgaaaaaataattccaattttgtggcattttgtaccatgttggtttcttacgtaaaaaattgtggaaaaggtgtatattgaataaacaccttttgtataaatttaattttgtgaaattgtgaaaggtgttttttaaagaaatgcctttagtataaattcaatatttttttttcattatatgactaatatgaaaatgtgtaaggtgtcacttcgagaagcacctttagtttgtggaattgtggaaaatgtctctttcttgaagagacacctttaatataaatccaatttttcttattgtgtagcatatgaaaattatggaaggtgtctattctttaatataatttcaattttgtgaaattgtagaatgtgtctcttgaagagacactaaatccatttttttttattgggcatatgaaaattataaaaggtgtctctttaagagacatgtttagtataaattcaattttgtgaaattgagggaggtgtcttttgaaaatatatttttagtataaatttaatttttttcactatgtagctaatttgaaaattgtggaaggtgttttttcaagaaatacctttaatataaattcgattttgtggaattgtggaaagtgtctcttcaagagacacttttgacaaaaattcaactttttgatgtgtatggctgataaaaaaattgtagaaatgtgtctcttcaccttttgtataaattcaattttgtaggtataaattcaaattttttcactgtgtgactgatataaaaattgtaggaagtatttcttcaagagacacttttagtattaattcaattttgtggaattgtggaagacatctcttcaaaagacacttaagtataaattcaatttttttaacgtgtatgattgataaaaaaattgtggaaatgtgtcttttgaagagacattcttcgtactcttctccacattctttgtatcctaaaaaattttcattttttaaattttaatatttttttcttcatctcaaataacaataatattgtttattcatactgattaaacctagaattgatgaaaattatcctcaaattgataaaaaaatttaaaaaataaagcacttacaaattggagaaggcatgaagaatgtgaggattcctcgtattctttgtatcctccaatttttttttttttttaaatttgaataattttttcttcatttcatagtaataatattgtttatctatactaattatacttagaattaatggaaattatcctaaaaaaatagaacacttaaaaactggagagggcatgaagaatgtgaagattcttcacattcttcataccctttcccatattctttataccttccaaattttttgtttttttttttatagttttaataatttttttctccacctcaaataacaataatattgtttattaatcatacgaattaaacttagaattaatgaaaattatcctcaaaaccattaaaaaataaaacacttaaaatttggagagggtactaagaatatgaaaaatcctcacattcttcatacccttccctatattctccataccctccaaattttttatttttttagttttaataatttttatccatctcaaatagcaataatattgtttattaatcatactaattaaatttagaattgataaaaattattgtcaaaaaattttaaaaaataaaacacttaaaaattggagagggtgcgaagaatatgagaaatagtataaagaatgtggggaaggatatgaagaatatgagaaacaattcctcataatcctcacattctttgtaccctccaatttatttatttattttttattttatttttattttaaagattttttttttctccacttcaaatagcaataatattttattcatgctaattatacttagaattcactacaaaaagatgagtttttagttggggccattgatctcagctaaaaggaaggcttagtgcaactataggatatggttgaaaacaaaatgggtcacaacaaggagtggctactgacatttgacaagagaatcttggaattccaattgatattttgccacaatcaattttttgggggttgttaaatattacaggaggcacttggattttcttccatatcatgcactaaggcaaccaattacttagtctaatcctaaccaaggcaccatcttcatcatttttcatctcatgcaacacttgctagtcgtattttttgaagtaaaattaaattaaaaccttgtaaagctactggttcagttttaattacactacacaagttacattctgaagaactaagaattatttttaactacttgttcaatttttatccaattctccaagaaagtttccttatgttgtataccaacttatctaagccgatattcactaggctagggccaagataaatatgagattaatttcccgataatcaagtagtacacatcatgctttcccatgcagggcaaccatttggattaactcactctcaacaaccaagatgtccaataaattcaccaaatgaaaagtttattatgtgttcttgttttttccttctcacctagtttacatatttgttacatgaaatctactcaaaagcaacaaaagtcgaagtcttaatgactagttaaatggatttttgtcacgacccaaatttcgggcaacccaaaacttgacccataaccctaggtctaaggtttgaccctaagggtttctcctagtccaagttggcagtcaaccaaaatggcctagaattttttcttttctttttggaaataaatcacaatttaaatcaaaacaaaacttcttccaactgaggttcgaattcaccaatatagaaaccaatactcaagagcaacatgagaaagtaaatatcatcaaggtctttaatccaagtctgaaataaaaatccatagtttaaacaaatttaattaaaataaagtctaggtacaaatatatagtttaatagtctactagtacaagttccaaaataaacaaatataacaacaatattaaaaaccctctaagctgctccaaaatctcctaaggcattttgaagtcctccctattgtatctgttggtccttaggagtaatatctacatctaaaaagtttcaataaaaaaatgatgaacatttccatattgcttaatagggtgccttatgccccagggggttaattagtattactaaggttcaaggatacacaaaataagacatccaaccataaaataaacaacccaagcattttatttgatataattatatcacttcaacaattctcaacgattaaataaaattcatgtgagaatgtgacacatagtcatacaatgcactgttgttctcgggctttcaccgaaggattgcgtccaaacccaaatacatttcttatttggagtcttccaggggtaaacttttgtgtctttcatattagggatctcacttctttcttaattcaccttttatgagcctttactttttatcatcattttttttttttttttttttttttgctttttccatttcatgcaacctttcaataatgtttgtttttcctcacacaaccatgatgcatatgaaatgcaataatttcacatatcattatctacaattattccaagacaatttttattaaatgtagacatgctcaataattccaacactcaacacaagcatttttctacaattaaatcaccaccaacatcaaagaaaattcccaataatccatatatcaaaagaaacacaatttataccacaaccatataaacttcctttattcctaacaaggttgataatcttagacacccaacacaacaatttttttccacaattaaataatcccaacatcacaaaaattccaaagaaaaatccataaatcaccaaataaaatttctcatatcaataatcacattcaaatgccacaaatactacctatttatctcccaacaacaaaatctataattttttccaagaaaaaacattaaatagaggttttaaggttaaaccaccctaccacaaatcgaaaaatctgacattttgaaatcaaaatccaacgtagtatgaatgttcctcatgttgagtagagtgttctaaaaattcacgcaaaactgaggttgtttaacggttgaaatggctaatcgaaggcgagcgacactttcctactccaagtcaaccctaaactcccactttctcctttattttttaattttttaacttttcttttctttctcaattcattttgtttctttaattcattttttttcaacttcacttcactaaataaattttcaaacacaaaccaaaaatattttaattttctataatttattattaattttatattatttaatttttatttattttttcattttttttcttttagtaaatttcgatttccataatcttaaaaaagttcctgctataaagctgacatgacacaaaattcaactcacttggttgaccactaaaatccttcgaattctgccaatccaaaattgacacatgttctcaaattgtttttttatttttcaaccatcaccaattagaagagttttcaaacttgaaattctgacgtgacctaaaaatacctggttattataacttccatttgattttggaattaatccacagctaagtttacattatgacataacatttattttatcatgaggctaaaaaaaaacatctccttctatccatatcttcttaaagcctaatgttgcttttggaatttttaacataatgtcattatcaatatcagatagtataaggtaagataaggaaaaagttgataaaaaacactgcactaaataattctcatttattaattaactagtattttatttgttaatatacaatagtactaaagagagagaaaacgtaggaaaaataaattaaccaacaaactccctaataaataggctaaccagatgcataatttaaaaataagctaacaaactaaattgaactaatttggacatatttgtaacaactcatcaacactcctccttaagctagactgtacaaattgtacattcccagtttgtcaactaatttttcaaacgtcggtttaaagtgacctttcattaattaagagatcggttgtttgctttgaagttggcacatatgttgtgcaaattgttccatcctctattttttccttaatgaagtgttggtcgaccttcacatgtttggtccaattgtgatggattaggttgtgtgatatgttgatggcagccttgttgtcatagaataattttaatggcaattttgcagtcacttttaactcctctagaagttactttagccataacgcctcacatatgccatgtgctaccaaccttagtcccgccttagcactgctttgagctatgactatttgtttcttacttcaccaagtcaccaggtttcccaaaatgaatgaacaatatccagatgtggactttcaatcattgattgagcttgcctaatctgcatctatgaaggcctttattgtatgatttttattttattttatttatttattttaagaataagcctttcctaggcgttcatttcaaatattttatgatccgatgtaccactttcacatggttctctgaaagagcatgcataaatggacttatgcaactgtctgggaatgcaatgtctagtctagtatgtgacaggtagattagtttccctgcaagttgttggtatcttcctttatcaactggatttccaaaattcatcccaagtttaatgttttagattgactggagtgtccactggcttgtagcacatcattccgatttttttttttccagcagatccaagacatattttctctaagacactgaaatccccgttttgtttctggcgactccataccaagaaagtatctcagacatcccaagtgttttatttcaaattttgatgcaaattttctcttcagtctttccatctcctccaaatcatcttcaattagaattatatcatccacatagacaatgagaatggtgattttcctactcttttatctaaaaaatagtgtatgattactatgagcttgtttgtattcttgttgttagttcgttgtggtaaatcaatcaaaccaagttcttggtgatttctttaatccatatagagacttctttaagcaacacacctttccatttttcctattttcatcaaaacttggaggtaaatccataaacacttcttctttaaaatctttatttaggaaggtgttcttgacatccaattgttaaagtggccagtccaagttagcagccaatgataagagaacccagattacattgatctttgctaccggtgcaaaggtttcctaatagttaatcccaaaagtcgacttgtacccattcccaaccaatcgcgccttgtagtgtttaataaacccgttttctttgtacttgattgtaaatacccacttgcatccaaccaatatttttcccctttgtttctatataatctcccaagtttggttttttttcctatgcatgcatatcttctaatatggtcttctttcccattgggtcttgccaagcctcgtgtatagtttttaggatttttgttcttgcaaaattagtaacaagagcttgcactaccttcgattggtgatcatactttacaaatttggatattagatgaattgtacacaatctcacacattttttcactatcacaagtacatctaaatcaactagatcagaaagagttgtggtagtacctaattttgggtcagaattttgataggtaggatttctcatatttgtttcactccttgaatttctcttacaagagcaaatcaagggaaacaattgaattagctgacttagatctcccattgccaattggagctcctgacctttaggaattggtttagccaagtttgttggacttaaggaatttgtgatgctatttggtagaatctttgaaagaattttggtagaggactttgtgggatccagcatgagagtaaggcaaagaaaatcattcaaaatttggatgccattttgagcctgaatattaggagcagaaattgataagggtgatgaagtagaagataaattttggacattattttttgggtcaaacaccaaatataaaacttgatttggggtttgagtttttggagctatagttgaattttgaagagataatggaacctgattttatggagttgcagttgaattttgaaggggaatgttatcttgatgttgtgaagctacaaccaacttttgaataggagattgaccctaattttttgtggttgaattagaattttgaataaggtttggttgggttagttcaaaaatcttagttaaggattgctaatttttaagagttgtaagtatgggctggtcacgcaagagcaaatgtggggaatttgattttgaatttgaggaaattaaaagattaggtggcagctacaattgtagtgagggctcctaaaaatgctcctaatttatgaaaattgaatttgagggctcaatcttgatgtcattagaatttgggctagaaatagcaggacaaaaatcttgatctttttgtggatgccttttgaaaaagagggttgattttcaaaggtgtcattgctagacacaaaatattttcttttgtcaagggaataacgccgataacccttttgtgtagtagaataccctaagaaaacacacttgagagaacgagggtccaatttactatgattttgatcatggacataaacaaacggaaaacacccaaagataagattttgacaaaaaatctaagggcatttggtattgtaaaacttgtgtcaataaacaattgattaaatagcattttatgagaattgcatcccctcaaaaacactttggaccatttgaatgaaacaaaagtgcacgggcaatttgtaacaaatgttttatggcgtgtgaacacaagaactttgatgaataaggccatgttttttaagaaaattgtttaaaatagagttaaagtattccattccattgtcaatacacaaaattttaatgttttcattgtattgctttttaatcatgaaattgaaattttgaaaaacttgacggcctcaatttttttttttaaaaaaaaagatatattcatcaatgaatgtaataaagcatttttcattagaaatattactcacatgagatggaccaaaaatgtcactatgaactaaaaaaaatggtttcgaggcttgatatggttgaggtggtaaataaacatgcttatgtttagctaattgacagacttcacattggaatgaatccttatttcgaaacaaaaaaaggaaataaatatctcaagtacatgaaatttggataacctagcctaaagtgaaagagcataatttgttgttctcaagaaggcgaaaaatcattcacaaacgtttgaacatgaccactcgcagagagagccttctcgaagtaatataatctaaaaaattcctcagtgagaaaataaaggctaattttaataagaaaaacacacaagagggggactaaattaggttttaaaaaatctttttcaaacacaacaaattcaagcaaaggaagcacaaatataaagagataaggttagaggaagcaaactcagattttatagtggttcgacaccctttgcctacatccactctcctcaagctcttatttgagtgaaggtaccactatacttaaagcttcaaccaagcttccaacacctttacacttggattttgacttcaatgagctctgacacaatcccttcaagtctctactcacttgaagcttctaatactcaaataacaaatttaaatatctcaacttagctcaacaatggctcaaatacaactcaaatgctaagatgaatcataaaggtgcattaaagaatatgtaaatggagatttaatgaccaaggaaagaatgagagcttttgagtcaagaacaagtaggtaaacaaataaatccaggtgttctcttgctcataaatgaagtgaagctctcaatttataggtttctagccttgggagccaaaattccaaaaaacaaccttgattggtcgagctggaggtcaactagtttactagccgtttggaaataaatgcacgatagatgattgttaggcctgaaccagaccttggtccgacctcgatcgggaaggcataaccatcaaccaggaatgcaaaaccatcgactgagaatgcaaggctattggaagagagagaaattttttgcatctccgtaccggaccttaatcgagtaggtataactggtcaaccggtaccctaaccagttgagccagttggctagtgcctcgaccaattcactattttttgcccgaaaacctatctttttttttgtttttttcacttcgaacaggtaggcaaggtctttaggtaaattaatatgccaattttgaaacgatttgcctaagtttcatttgataaaactcgggttttgatggaaatgtaactttaatgcataaatcgagtttttaaagatgcatgaaaagatatgaaatcctaagtgcacccatgcattcatcttacatatgtttcctattattaaagggtcttccaattgtcttgatcttgcatccattgtgtcatttgatgaattttcaaactaacacctgaaattctttataattcaaaccaattagaaacttaaccatggtttgttatcatcaaaacgcaattaggagaacccttgggctaacacttagcattgctaatcttctttcccgaagtccaatcctgaaacacacaagtggatggtgtaaatttggtacataaaacatatccttgagaataatattcgaactaatcctcattgtacccatactaacaatagctgaatatgacctatcaatagttcgtactctatgactactgggacatgagatatatgatgaaaaaagatttcacaaccagttatgtaatcagaagcatatgagttaataatccatggttcacctttctccgttaagtcattaaatgtagttaaagagatgcattttttagctaccaaggatgtgcttgaggtctaaggtcttgaaaggattttgtaaagttgttccaatgcctttgttagagtaacatgattgccacattccttcaactttgtaatagtggtgtcttggaacccttttccatcacgttctcaaagtcgattgggaacccaattggtaggtttaccatttatcttctagtaggtttcctttgtatggtaggacctttggcaatggtcacactatgttgattctttttattggtgcatatgtctctacaattgtcagatccatgggcaacaactatagtcgaggccttggttgataaagatggtaattctttaagcatgacccgttttctactatcctctcatttaactttgacaaattcttctttaattggaggtagcaactttgttttaagaatatttccacgaacctcatccaattctctatttggtcttgctagaaagtcatacaccatttctttcgccaacatccttttatgaagagaaacattttcgagatctttccattcatagatatggaatagatccaattcttgccaaagtttcttaaggttattgaaatattgagtaacgttgtgttcaccatgtcttaagttttaagctctattacgtaatttgtatacttgagacatatcttcaaaatccgaataagtcagattcacggtgtcccaaattccctttgcagaaagataaaaaagatatgtgtcaccaatagtgttttccattgaatggatcaactatgccatcattgtgaaattttgaacatcccaagtttggtatgagggatcatcaatactaggttgccaaaaagtgccatccaaatagcctatatttcttttgtcatgataggtcctagtcaaagctagaatataattctcttcgggtaagaataaaccacagagtttggatcaaatctttgctgccttcttattgaatctgatagaatttaaatacataaagttcaaccacttcctacaaataaggaaacaactactcaacatgttgcaaataagtagctataactacatgacccactccttccactcctttgcaaatatgtgaacattgagaacaacttggactaagtctttgacagcacatccatctttccatgcacaatctgtcctccttacatgtaccctggatttttaataggcacacgtgttgatcttcttagcttatcattgtccccttttttcagtcgaaccttgtcctcaaggttcaaattaatatacttgttgtgcagctcctgggtattttcccacgtagcatattcttttggaagctttttccactggataaggctttcttcaacaaaacttgaccatttattaactcgcctagtattcaaaatagctttaggttccataataatctcaccattatcagttaggggtggcaacttagtgctggtggccttagtctcccctacttgccttttaagcagtgaaataggaaaaacatggtgaattcgggaaccttcaggcaacttgagtttgtaagctacctttccaacattttcttcaatttggtatgggccataaaagcgactagctaacttttggtatgccatcctatagatagtttgctggcaataaggatggagtttaaggaataccaaatcccccacttggaattctatgtcccttcttttttaatttgccacttgtttcattcgattaattgttgcatgtaaattgatcttaagttgctgtaaaatggcatttcgagataccaatgtttggtccacctcattcatagaagatgctccaacttgagagtttggaatacttggtggtggcctcccataaagagcttgaaaaggggtcatcccaatagaggagtggtatgtagtgttataccaaattcagcccatggaagaaaagaactccattttcgaggttgttgagaaacaaaatagcgaagatattgctcgacgcacctgttaactacctcagattgaccgtcggtttggggatgataggcagagctcatgtgcagcttagtacccgacattttgaagaattcaccccaaaagtgacttatgaaaatgggatctctgtcactaataattgattttggcaagccatgaagcttgacaatccattccacaattttcaactaccatttttgccgtgtaaggatgtgaaaaagctaaaaaatgagctgatttactcaagcggtccactaccacaaaatagtgcttttgccattagatggtggtaatccctcaataaaatccatggtgacgtcgtctcaaacttggcaagggatgggcaatggttgaagaagaccagctggagataaagtttttgctttattcttttggaaaacagtgcatgaggttacatattgttgaatcaccttatgcattgatggccaatagaattgttgtgtcaatcgcttgtatgttcttaataccctagaatgtcctccatatggtgagtcatggaattcctgcaataactgattgacaagttgggaattaggaggaattactacatggtttttgtaacataccaaaccattttgccacttgtagggtgctccaggatttgtagtggcaagcttgccaattcggaccatgtagggatgctcgttggcttccttcttgattgcattccacaaaaatgtttgagggacaaaaagagtattaaggctggggccgcttgttactcttgacaaagcatcagcagcagaattctcctttcccggtttgtaagtgatctcatagtcataccccagcaatttggattcccacttttgttgttctagcgtcactatgcgttgttccattaaatacttgaggctgcgttggtcagtttggatgtagaattttcggcccaacaagtaaggctgccaagtccgaatagcttgaacaatggcaagcatttctttggcctaggtagaccatgattgcttagtgattcccaaggctcggctcatgaatgctatgggtctcccttgttgagttaacactactccaatgccagcacttgaagcatcagattcaatgacaaatggttcattaaaattaggcatagcaagggtaggaatagaagtcattgcttgcttcaaagccttgaatgcatcctctacttcttccgtccatctaaattgcccattttttaagaggttggtgagtggccaagctataactccataattgcggacgaactttctataataacctataaggcataagaatcctcacaagtcagaaacattagtgagtctaggccaattaagcatagccttaattttcccttggtccaccttgacaccttgtggagttacaatgtgacccaaatattcaacttcttcctggccgaaggcacactttccaagcttgatgaaaaatttatgatgccttaatatttcaaaagcctttttaacatgttcaatatgcatgatccaattggggctataaattagaatatcataaaaaaaaaaaaactaacacaaattctcgaagatatggccgaaatattgagttcatagtagcctaaaaagttgaaggagaattacacaagccaaagggcataataatgaccattgtgtgtacgaaaggcagttttgtgaatgtctaatgggtgtacccatacctggtgataatttgatcggagatcaagtttggtaaagaaggttgccccatatagttcgtcaagcatatcatcaacggttggaataggaaatctatccttgatggttacaacattaagggctttatagtcagtacaaaaacgccaagttccatttttttttttttgtttttactaacagaacaggtgaagagaatgaacttgtgctagaccttatgagccctaattttaacatgtcatgaactttcttttctatttcagctttttgaaagtaggcatacttgtatggccggacattaattggctcagtcccctctttgagattgatgtggtgatctatctccctttctggtggaagctgctttggttcttgataaatgtcctcaaattcttgtaacaactgctgcatttctagttgaattccttgaggcactttttccatggctgcatgtagacagacgacgaatatgaagtttccctgctttatctcttttgaaattgttttgaatttcgtaggctgaattggttggttgtcaattccttctagttgatgacactggtccttccacgaaaactccattgtcattattttcaaatcacaaaccaccgtgcccaattgttcaagccagtggactcctaacaccatatccaacccaatcaatggtaatgaataaagagtacttaaggtaaatggaataccttgcaataggaccaaaacattttcaaatctcccttggcactttagaggatcaccattagccactttcacattaaagggttcagttggcaccattggtaattgcaatagttcaactatcctctcattgataaaattgtgggttgacccacatcaataagaacaatcaattcatagggtcccactttagccgagactcgcatggttctagctgttgaccacctagtgagagcatgaagtgaaatttcaggttctcctcgaaggtgggtgtgagctcccgcttcgtcattttcctcttcgtcgtagtttccttcaagcaagagtagctgcggtcctttacatttgtgccttggtgcaaatttctcattgcaattaaaacaaaggccttgagcatgcctcctctgcatctcagcccaagtgagtcgtttcattggtgaaagggtctttattttcgttggagaagagccaatagtggtcctactgaatggacgtgtagccgtcttatgactgttcaactgctcatctcgcatactagacaaattgatggcttccttcaaggattttggcttaaacatccgaatcccatatgctatttcagctttaagacctcccataaatgtgccaatcaatgccttttgagtctacccttgaactctattccccaatttctcaagttctctttggtactcatgcaaggatcctgtttgtcttattttttataaagactcgtcaaagtcttcgcaatctgttggaccaaagcgagaccataattcctctacaaaaatgtcccacgtcacctccttcctttcctcatgataagccctgcgtaaccactgccaccattgatttgcctcccattccaaatgaaaggaagccaaagacaccttttgtgtttccaaagtgccttggtattcaaagaattggtcgacacgcgtaaaccattctgttgggtcatcaccagaatacttgggaaattcaagcttggccaacttagaggaaaacattggtcgccgtccttctgtgttttcacgagaacgaccataagaagactgcccgctgcgttcattgacgttgctagaggttgggtcttgccttgtactcaaaacttcagagatcttactgatagcattctctagttgatgtagtttgtcattaacacccaactccattctgctcaaattagcttgaagccccccaagacccacttcctaaattctcgattctttctttgttggtggccatgatgtatggctttgataccaatgataggtcccagtcaaagctagaatataattctcttcgggtgagaataaaccacagagtttggatcaaatctttgttgccttcttattgaatctgatagaatttaaatacataaagttcaaccacttcctacaaataaggaaacaactactcaacatgttgcaaataagtaattataactgcatgacccactccttccactcctttgcaaatatgtgaacattgagaacaacttggactaagtctttgacagcacatccatcttcccatgcacagtctgtcctccttacacgtaccttggatttctaataggcacacgtgttgatcttcttagcttatcatgtcatgaatcaccaactgtatagaccaagaccattgaagaaagttttttccattcaacttatgtatttttatttgaagggacgcgtgttttgatgtcgcagtgggaccatttttaggggttggtttagaggttccagaggtaacctctaagccatcgcccctactttctccaatcatggccatttggaccattgtctccctcaactcgcgttaaattcaaggatgctttgataacataaaagctaacgtaaggaatgagtcgataaaaaaaactacattgaataattctcattaattaattgactagtacattatttgataatatacaagattactaaagcaaaagaaaacgtaggaaaaataaactaaccaacaagcttcctaataaataggctaaccgatgcataattcaaaaataagctaacaaactaaattgaactaatttggacatatttgtagcaactcatcaacaaatagattatcaggttttcaaagtaatcttctatcatatgctacttcttcccatttgttatcccataactcataataagataagggctggaaaatacacttcaatctattccattcaagggcccaaatttctaaatttgtagccaacctaatatcttgattcttgaatattgaacttgcctttggaccaaagactagaatgaacagaccctaaaaaccatgattgatgttctggccctaacttgtagttttctaattttgcagtaatagaattgatgtggaatccttcaaaatagcttttgtcattggccacaacatttgagaaatgaacaaccttgattggactagttggacaacttaaagggctttgaaggacaaaaggattttgattttttttttctttttctttttctcctttggcttttgttgtatatgtaaatctgggaaactccttttgcttttccattcttaagttatttaatttctactactagtttctctttagtttcaactagttggtatgactcgagatcaagatacaccatcattttcctaaatttgttggagcttcaattaatgagaaataaaattctaagaaccgttacattatttagtaacaaattaccaaatacactattcttttgaaattttagattaaatagacaaaagcctggcagatgtgggtagtcaatttggttcaagcatgggtcactcagagaaagaaagagagttcctcttattctaagagtaccaaggcataaagaagaaaatccttcaaaatccatgacctttaattggaaatctgagctactttgggttgggatggtgatacaccattctcttagaaatcatataaagtaatgggaaaatgagacacccataatcctagatactacacaattcctcaaaaaactatatttggaggaatcaatatcaaaacaacaccctaagagtacagacaattctcaacctccaagtacaaccaaggtttcatataatcagaagttggatacatgttgttagtaatatctctgcaaggtactagtatcctacatcatacagttttttgaacaagcatttgatactaaacgcataaaaagaggtgaactaaaaattaaaaaatcccaaaacaagtttgaacaatacgcataattgcaagacgatcggttatgacaaaagcaatatttagttgatggagaagtcataactaaaagccataatcctttgcttgaaaccctaacaatttaaaaccctagaaaaccctatggtaggtgagaagcgagaaaccagagagttaaataaaaaaaataataataataaaatgatatttggtagaaagaacaatgagtgaatcaaaagaaaataccaagcaagcaaaaatgtagagttcttaatctcgcattggcactagcaatggttttggcaagcaagtagaaatgggtttggtagtggggtaagcgaaagaaaaatgcaagttaagaagtatacctagtgatgttatgacaacaggtccactaagccatatatagtagtagccacctttctcctacttcaaaagtggattttataactgcttctaatcacttccacaaccatagtccatgtcattacctgcaactcaattaatcccataactgtaggcccgacaagatattcatctcacaagcataggtctcacaagaaattcttttcactatgacttaattattcttgcagatataggactcacaccacatttcattagttaggactcaaattattatacaactatatatactctttcattgtgaattttactgacctctcctaaaactacgtgaccatatcttactttttgtgtagtgattgagggtgattattctaaaaaatattaaaaaatgaaacacttaaaaactagagtaatcctctcattcttcgaacctttccccacattctttgtatcttccaaatttttcattttttttaatcttaataatattttctctctaccttaaataacaataacattgcttattcatacttattacacttagaattgatggaaattatcctcaaaaaattaaacaaataatatacttgaaaattgaagaggatgtgaagaatgtgaggaagggtatgaaatatgtgagctccaaattttacatttcctttttttttttttttttttaattttaagattttttttctgcacctcaaatatcaataatattgtttattcatactaattatacttagaattgatggaaattattgtcaaaaaagttcaaaaaataaaacacttaaaaattagagagggtaattcatcacattcttcataaacttcctcacattcttcataccctccaaaattttcaatttttaaattttaagaattttttcccccacctcaaatagctataatattgtttattcatactaattatacttataattgatgtaaatagttccaaaaaaaaaaaaattaaactcaaaaattggagagaatatgaaagatgtaaggaatgtgagaaagagtacgaagaatgtgtatgaggattcctcatattcttcgtactctctacatttttcattttttaaaatttaaattttttttcctctacttcaaatagcaatactattgtttattcatatcaaatatatttagaattaataaaaaatatcataaaaaataataaataaaacacttgaaaattaaagaggataccaaaaatgtgaggaatgacatgaagaataagaggaatcctccaaaattttcattttctttaaattttaaaaagtttttttcgacttcaaatagcaataatattgtttattcatactaattatacttagaattaatggaaattatcttcaaaaaattaaaaaactaaaacacttaaaaattggagaaatctttacattcttcgtacccttccccacatttttcacaccctccaaaattttcattttttgtcttaataattttttctccacctcaaatagcaatgatattatttttttcatactaattacacttataatggataaaaattatccccaaaaaataagatggtacaaagaataaaaagaaggtatgaaaaatgcgagtctcacattcttcgtaccactccacatattctttgtattctctaaatttttcatattttaatttcaagaatttttttctccacctcaaatgaataatattgtttattcatattacttacacttaaaattaatgaaaattatcctaaaattaatttaaaagatgaagtagttagaaattgaggaaaatatgaaaaatgtgagaaatggtatgaggaatgtgaagaatcttcacattgaggttgattaggttagacatggatttattaggtcgatcagattatatgattcaaatttcatccacatattctatttaataaaatttaatatattaatatataaaatattttctaaaaaaaaatgatattttttaaattaaaaaacaaatattattatataggataatatacattataaatatcataaaaatattaaattaaatttggattagggttagattgtccgaatcttggccctactccaacccaaacccaactcaacttgaaaaaatttaaacttattccaagtattgaaaatgattaatcaagtgacctcaaacgttgagttgagtaacccaacctaattaagttgcatccctagtcatctaacaattaaaagctgtcatcggccatgggttgatcatgttacatttcagtgcatcaaaggggtgttgaagtgatttcataaatccaagatatcttttaagtatacttattaggtacctaccgtaatattttccttttttaaaaaaagaaaaaaaaaatatactttgtagacggtcccttttgaccgttcctctttttgggtttgccttcttttagatgaaatggatcaaccagcattcagccaacccaacttttttgtgcagggaacccacttcatcaataaaaaattgttgttgaatatctttggacaataaatttcacttttacatgctttccagagtggaatcccatctctacaattatattaatggattattaccttctatttaaatgatagtgcgacttttctatgcagatcattaattagtgaagcatgctaactagggcggctacttttatttccaaaagaaacgtatccggaaattaatagatcaaaccatagggaaagaaataggcagttttatatttgtgtgcttgtcatgtttgtagtctaaaaaaaggtcttgattttataattattgagaaatcatgtcattgtgtgatgttcaacagctccaggggaacaaatagagttgttcatctcttgacctggacctcaatttaaactttccccgtagggagaggcgcggagactgatggacttgttcagctgtttgttatgtcttcttgtggcctgggcctcaatttacatcgttgtttcagctagaagacgcaaatctggtgctggcaagcttccgcctggacctgtcccgtttccaatcattggaaaccttttaaaccttggaaacaaaccccatgaatccctcgccaaccttgccaaaattcacggccccgtgatgactctcgagcttggctgtgtaaccacagtagtcatcacatctgcaaccatggccaaagaagtcctccaaaagaaggaccagtccttctgcaaccgaactattcctgatgccctccgagcccataaccacaaccagctctccgtggtatggttgcccgcttccacaaagtggagaacccttcggaagatgggcgttggagtctagtttttgactggtgaatatgtgtgaattgccaagctggtgatgtagtagatattggcctagaagctttcagaactactcttaacttgttatcaaacaccattttctctgtggatctggtagaaccaagttctgatactgtgcaggagtttaaagagttagtacggaatatgatggaagaggctgccaaacccaata

SEQ ID NO: 10475 - DNA, 1613 bp, Vitis vinifera
  Intron number 16 from transcript GSVIVT01020735001 (locus GSVIVG01020735001) derived from phytozome v7.0 (chr-ID chr 12; pos 2514223 to 2515835)
cctttcttcctaaggaaattggtaagattcttataatttttgtctactttataggttatcataatttttggctttcaatcgtaatgaaatagttgagtaattgataaattatagttccaaaaataatattgatatatttggtagattggattgttgaattattatgaccatgaataataactaaaataggaatgatacaactttaacttattctctttattttgatataaaattcattttaattaaataaatcattttacaatttaaaaattagttttatttttttaattccctattttttttttctttttttgaatgaattcaagtaaacacaattatagtaatggtaatgattttttattctaatttttagaatgaacaataccaaatacaaatcagaataaacatacacaacggtaataaaaagtttcaattgacagagtatttttctttttaagttataacattaaataatttatttatagtgatatcttacaattgatagataatttcaaatatagaaaattttgatccaacaaattatattataaaaaagtcaacataatttaatgtaatatattatacattaaaatgtaataaaatatttaatagatatcaaataatttcatctatacacacacatacacacacacacacatatatatatatatatatatatataatatttatttgtgataaacaatagtggataatttttttgttaacattcccaataaaaaaaaaatatcaattatttattatattctatctaatactcaacatttgtgttaagtgtatagttaatttcacaaattattattataaattaagaaacatcattgtacacacaattcaaaccatcgtataggttccaaattgtattccatcaaaccaaaatgcactacccttaaatgcttggaactatcaatatgtggttcatgataagttttcctcaatattagtgtcacttgcaaatgttatcatcatgtttgattccgtgaaagtactaagaaaaaaatattgaaagaaattattttcttatatttgattttactataaaaatatgaaaaaaatcaaatataattaaaattaatctatttttaaatagaaaatttaaaacaagtgaaaggagcctgattatgtttggttcccaaaaagttttagtgacaatacaagggaaaaaaaataaagagtttctttgaagaaaagaaaaagtgaaaacaataaaataaataaataaatttgaagttaataaattatttttatatgatcattcacattcatttaaaattaaaaaaaaagatttaaatttaataaattaattttatatgtttcttcatatttatttacttattttaattcttccatacgaagatatactaatttgaaaataaataaaattctaattaattttaattctcttttattttctttcgtattttctacataaaaccaacaataagaaaattattttcctttaatattttcttttctttctttaatactcttctcaacctaacatagtttttatgttcataataataataatattttagatattttttcattttattttaggtaagtgcaaggagcttcaacagttgaatttattc

SEQ ID NO: 10476 - DNA, 6783 bp, Vitis vinifera
  Intron number 3 from transcript GSVIVT01017251001 (locus G SVIVG01017251001) derived from phytozome v7.0 (chr-ID chr9 ; pos 5905339 to 5912121)
gctttagtaaacaaggtatggatttttcatccctgatcctgaaattgaacatatttcttgatcttgccaatgaggttctaaaaactgcatatggtttaggaagactacatttgttctagatatatggtgttacagatatatttatgctgatcatggcgccttgttggatgtgtgagtttggagtgaaggactcacctctgggttacagtacttctgattgtgtgcactgcatttcatcttattccaaatacatattttatagctttcttaatttctcataagtttctcatcattgatttcttttagaacttaaagcttgtgtcttggggcagatgccttttgctgcctgtagtcctgtgctgtctcatgattttaccttttagattagtggcaatctctgtttcagtggtgctgctccatttcatgttgatgaatctctcgtgtattataactgatagattgagggaacttggctacttagtataattagaatgatagtgctttcctgtgccaacacaagtgcaacctccaaatattcacaatcagataagtttctaaaagttaggttctgtagaaacttgcatgggcatgttttttttttttgataagcaagcacaattcattaaagaggctaaaaaaccccaacgtatacaggacgtataccaggcaacaaaggccaaaaacaaacaaaaaaaccaaaaaacaaaccacccctcaactggaggcaatccactccaggaaatctaaaagggaatgcggctccacttccatatacaatttagcccaaccccaaatattacaaacaaaagaatatttaaacctctgaattgctaagaccccccccctaaaggctaatctattcctttccttccaaaccatccaaaaaatgaataacggaatggaattccagaattttttctttttttttccccacaaaagaacccccccaactatataaaacctcctttacaatattagggaacacccacttgaccccaactaagcccaacactaaatcccaaagctctctagccactgtacaatgaataagtaagtgatccacgctttctgcttcgcaagcacacaaaaaacacctattcgggagctgccaacctcttttttggagcctatcaagagtcaagatctttccctaagtcgcttctcacgtgaaaaacatgattttagttgggactcttcccacccaaatcttgtttttcggaaagttgacctccatagacctatccagccagctgtacgcatctttcactctaaactgcccacttccccctcctttccaaaaaacagaatcatcctcccaagttatcctaactcctctcaacgcttggagcaactcacctaccaactccacctcccaatcattgaaatcccttataaaacacaaattccagcctccttccccaacattctggtcccacaagtcttcaacctttgcatttctgttggctgccaagatatagagatgcgggaacctttgggacagcgctgaatccccgcaccacacatcagtccagaagctgattttattacctttccccaccttgaaccctattttgtcccagcaccagccaacttcctttaagatctccttccacacccccacaccacacgcacccacaacctttttggtcctccaaccataatcctcctgaccatacttagcttccagcacatgcttccaaagggcctccttatccgaagcgaatctccaagtccacttgccaagaagcgctttattcatgatagtaaacttccttattcccaaccccccattctccttatccccacacaccacatcccacttaaccagatgagttttcctctccatgagacccccctccccccccataagaagtctctttgcaatttttctaatcttctagccacagaaatgggcatacggaataacgacatctggtatactggcatactacccatagtgcttttaattagagtgattctcccaccctttgagatatattggctcttccaaagagcaagcctccttctcattttctcttctaccccatcccatccatatgcagccttattaggcacccccagcggcagccccaaatacacagacagaagctgccccaccctacaacctaactccacagccatctcctctatcctttgcacctcccctactggaataacctcgcttttagccaagttaattctcaacccggacgcggcttcaaaccagaacaagatctaacttaaattcgttaagtactccttcttcgcctcgcaaaagataatagtgtcatcggcgaagagcagatgagcaatgtggacagcctgtcctctatcacgctgaattttgcaccctgagatgaaacccccctccatagcccttctgattaggacgcttagcacctccatccccatgacaaaaaggtaaggggacaggggatctccttgacgcagccctttagaactcgaaaagaatccagctggcgttccgttcaccataactgaaaatttggctgtggagatacaccaccacatccacctcagccacttagcgccaaatcccattttttccattactttcaagaggaattgccaattaatgctatcataggccttctctatatctaacttgcagataacccccttgtcccccttcttattccagttgtcaatcacttcatttgctattagagaagcgtcaagaatctgcctacccttaacaaacgcgttctgatcatgggaaactaccttatctataactttcttaagcctgttggccaacacctttgccagcagcttatagaggccccccaataggttgatgggcctgaaatctccaaaatcctcgacccctccttttttaggaatcagcaccagaaaggtgttgttaatactcttgaggaacgtattctggtcatggaactccttaaatatctccagaatttcctccttgacgaaatcccaacagcattgccaaaagaaaacagagaacccgtcaggacttggggctttatccccattcatttccatcagggccgactggacttcaccctcagagaagggagcctccagcatctctgcctcttgcacacaaatttgattaaaagaaagacttccaatgtctgccttccaccccgaactttcggaaaattgttgcttaaaagcatttactaccccctctctgatttcccgctcctctgtcagtctgatcccattaattttaattctatccatgtgattaactctcctatgggcagacgccattcggtggaaatacctcatattcctatcgcctgccttaaaccaaagttccctagacgcctgcctccagtgagtttcttccagatcaacccacttggcataatcctccttggcatccttcttacaagctaattcctccattgacaagctcctttcatcctctactctgtcccaatactccacttgctgaatcgcagcctccttgttactttccagattaccaaactcctccctattccaaactttcagcttctgcttcagctccttcaatttcgccgataatctaaaactggcacttccccttacctctatatcctgccaccaactccggattaaatccttaaacccctcgactttgaaccacatattttcgaatctgaagggggcagaccctctcctccaactacccccctcaagtaatactggaaagtggtccgaaatcggcctgggaagcctccgctgactcaccctactgaactgatcaagccagcaaggagagaccagaaatctatctagacgagcccttgacatgttattcagacccccagtccacgtgaatgcacccctttgcaattgaaggtccacaaggcctagatcatctacaacttccgcaaacctcctcatagctgaagttattctcccttgcctgcttctctcaccttgagccagagtaatgttgaaatcaccacctagacaccaaggcccctcccagattcctctgattgcccctacttcttcccacaaccactccctttcaagtctagtgaacgggccgtaaacccccgtaaaagcccaaatcaccccattctccattgtcctgaatctgcaggataaagataactgacccacctcccactccagcaactccagagctcttttatcctagcagatcaggatacccccagccgagccacacgcattcaggaccttccaatctaaaaatctacccgtccctaaacttctcaccaccttatcagtcataatctgaatttttgtctcctggatgcaaaagagatccaccttctgcttcctaaaaaccgacttaataaccttccttttcgtacttttgttcaccccccttacattccaacttaacaatttgagattcattaaacaaccaccatctgcacccctttgccctgaatagggcccttctttttgccatccccctcataattcactgagcattccaacctctttagcttcctttcaaaccttgatttttccaataatcctttaccatgaatcttttcccttcttttcctgattttagtcagaaaatttaaaatctccttctccagcccatcagtcaaaaaacccaggaaatggctaaatcttgctaggctactttcttgccaatccaggtcctcttcccccctttcatcttgaatctcattctgtgaagaccccccctcctgctcccttgccgttgctagggatcctttgaattcaaccagctcccaacaatcactaccattcgccctagtaccatctgcctcttgcccttgagaagctctgtcattttggcagatctccctaaattccccagaatggtcaaagaactccccctctggagtccgaccaagagtaagcatagaagaagaagaagaattcccggatacccataaaccccctaaggatgataaggcctcatacctcataacttcattctggagggcactgtccaccaactcctcgagtgtattggccttctgagcgatctcagtttccatctcccttactcttaggaattctaactcgatgttggcatcaacaagcagcccagactgagccaaggcctccaacgggcctgaattaggcttgctcaccttcgggcttgttctctatggcggcccacctcgctgtgcccccttctcctgtagcccgctcgaagacggcccactgtacactctttggtccatagatgacccagatcgtggcccatatctctcctctaagactttctctttgccttttgggcctttcggtctgcccttcggcccaagcccaccactgctaactacttttgacgcacctgatccagatattggaattgggctaggccccccgtccctcctaaggctaaggctcacattggatccattaggcccactcgggttcgacccctcatccgccccatcctctaactcccggagcaaagacccgaattggatccggccccccgacaagaccctacccttcccatccggctgcccatccatcacatcatctgaccgaagcagagcctcgaggcctgcgctgccccactcctccactcgccggccagcgcgtgcgcctccgtcgtccccttcctcaccaccttctgcactccgacagtcctccgtcttctttctgatcaatggcgttgcttgggcatgttatttgattcatttgcctgcttacccttttctaaactgctgtatctaaaatggctcagccaataggtgtcttagccattttaatttaatgatgtgtataaaaaacttatccaaaaggaaaaatttggacttggtttgagaatcacactagtgccccttttaactagaaggtggttggactagattaaaggagcaactgcttgtcctgtttgttttcacctttaaccattaaatcaaaccatattagtggaaacttaatattatttgggatcaaaagcttgcttttcagtcaatatcaccaactagtccccataccagtttagatgtagcatcagtgaatgagttccagttttaagtttctgtgctgtggcaaggaaacagaacactgtaaataaacctttttagtatgattctcatcttcttttttatccaacatctgaagtatcatcttaggtatgtgaaactgaatgtgaaggtttttggaacgggagttggctcctttcagtgagatatttcctcaaaattcagatgcttactgaaatcttcagtatcaaaagaggggttacattttcaacttagtagatcaatatgtaaggcaatgtaatggttaactatttgtgaaaatgttttctcaaaatgttttctcaaaatgtttttatgcagaggagcatataatgagataattattgaatcccatgctcctaaaaagctgagtagcattctttacactggagatttgattaaaatttagtatgggaagaacagaaactcatctgataagcatcagattagtttttatactgttgttccactgaccaggacctttcaaacattgggttgtggttgcttttttatttttatctttcatttttattttttattttggtgcaagaatgtaatggtgcccatttgaattcacatcctgtttcatattgagaggaaaccaaatctcattagtttacaatatgttgtctatcaaaaaaagaaaaagaaaaaagtttacaatatgaaattatgggtaatattttgttctcttggtgctttacttgttaggctgataatatttccacttcggttttcattaatgcttgtaattacatatgattggctagggtgggggaagatcttcagacttggggggtttctt

SEQ ID NO: 10477 - DNA, 1837 bp, Vitis vinifera
  Intron number 2 from transcript GSVIVT01038271001 (locus G SVIVG01038271001) derived from phytozome v7.0 (chr-ID chr5 ; pos 24866073 to 24867909)
ttcctccccaattcacggggttcccgtactctgctgcccatctccatgtttgagctgcagggttaattgaattttttcctcttgtacaattcagttctactgttgtcagtcttcatctcctccctgttttgaaggttaattgaatttgagaatcaacttaatgtcctttgtaagaagttgaatatggtatttatctaattctgaggagtagatcatgttactgctgctaccgggttccagcacaccgatgccatgcctctaggattgaaaagtaagttccgccgctagtttgaataatctcattttgattttggttttaaatttgtttctatttttttaaacgtccaagcatcctcatgatacatggtggaggtattaggcaggtatctaatatgagaaacattactaagaggcgaagaccaaaaactttgctcataaaaaccaacactgaagttctgacttctgagctgtaggcttttttaactttgggcatatctaagacttttaggctatgtttggttcccggaaagtataaaggaaagaaaaaaaatgctaaggaaaatgattttcttatgtttggttgtcctatgaaaaacatcaaagaaaatcaaatataattaaaactaattaaaaacttatgtatttttaaattatttaatctttatattgatgagttaaaataaataaaatgagtttgaagtaacaaaaaaaataatttatcaacttttaatctatttttttatttttcttcactttttctttccttctacttttcatttgtattttctttccctcgtattttcccccaaattttccgggaaccaaacatagccataggtaaaaatggcttttttttttctctctgttgtcctatcatgggcatgtaggattgtaggtgccatgcggctccgaaagagacaccttctcagcttattattttcaactcaggcctgagttgctctatactctatagggcttctaatataactaaagtctaaatggtaaatacattctatcctttttctaaaattatatttttaaagagaaataaaaataataaaaatattagggtctacagattgaactatcattaaattaatcatgaaaattatgacctcctaccttaataatttaatataacaattatcaaaacataaaacataatttcaattgtttttattcaaacatggagaatagcctttttgcgccttatattctctatgaaggtaacatactcttaaaaaataaaaaataatctattttaaaaataatttttttaatttttgtttttgtttttgttgtgtatgcggaaaggaatagaaacttacctttaaaaacgtattcaaatcataatagtgcctaattgctcaacgcttgtaatacgatgatataaaatggtggacatatgggaggagcatggttgatttggtgcgctactgcagtggcggtcgttggtggatgggagttggcggttgtttgcttgagaacagtgatgagtgaggacaggggggaaggagcaagccttgtataagaattaagaaagggggggggggggaacagggacagaagccgttgattgaaatttaagagattgggggtgtcaggaatgaaggtaattgagaagatccgggaagcagcggaagtggggaaggcggtgttctctttggagttctttccgccagagacagaggacggagttgacaacctgttggagaggatggacagaatggtgtcccacaacccagcattctgcgacattacctggctcaagtagtctcattggaccctgaagatgcctctttcttgttgatgcaggcgaagcatatctgagccagat

SEQ ID NO: 10478 - DNA, 6950 bp, Vitis vinifera
  Intron number 3 from transcript GSVIVT01014852001 (locus G SVIVG01014852001) derived from phytozome v7.0 (chr-ID chr1 9; pos 10608797 to 10615746)
aactgaaatctgcagctggtatttatcttactctaactgggtttgttaagatatgtatttatatttatgtgtatatatgcatgtgctgtttattgatttgtatctatgtgtatatgtaaactgaccctatctgatgatcctcatcttcttatcgattcttttaactaaaaaaaaaaaaaaaatctgattgtgcttagtttaccctttttctcaaaaaatttctggtttctctgaataaaatattagttttctctatcctctgataaacattttgatttgattgttttcaagttatccttacagagttttgtttatctacttactgaattgagggtagaaaatagttgcttttgcacctattttttttgttgatagggaaataagaatagattcattaaaaaaacatctaatgaaaatgagggtgcaaccttagtactcagaaaggtatacaaggcttgtcaaggccacaaaagagaacagggaaagagcctcactgaactgccttggattacccattgcatgaactaccgacaaaatctatcatggagcaattggtatcccccccaaaacaatttttcacgcaagtaaaaactctaagaaacgttgtacgttcctctccttgaaagtttcttctattcctttccattcaaattgtctagaatgaacaaagactggcatcttcgatggcatctttttactttgacctatgaactatcatacaactcagctaaacctttaacaactttccatggaagaacctaggccactctgaaacaagaacgaccataggatagaagaccattcacattgaaggaaatatggttagttgactctttttgttgcttactaagacaatacttgtcatcctctaacctctcctcattaggtgagaattttccctcaaagttcctctaaatgaagaagcaagcaaatattggacagcaccttagaagtccaaatctttctgaccaaaaaggacagactttttcctgacacaaataattgtagtaggatttgattgaaaagatacccttctaggatgctgtccataccaacttatttttggaattaacatggagagacactgaatgtaaaagttgcaaaaaatgctccaccatctccatctcccaatcaaagaaaatttgattggaaaatgggtccaccaccattttccctacattttttctaaggacagacttacaccactgaatgtaagagttctaagaactatatcttgatcgctacatgggtccaccactctagcatctttttgcattgctacatttaacaagattggaaaatgatccctgaaagacatctaatttcaccatatgtagtccatacttatgtccatgaatcatttaccaatggaaatgctattgttcatgccaaagtatctcactctttgcttatgggtttccaaaggcctttctactaaccctatatcatcaaacatttgtcgtctctccaaagtttacaaaatgatgtgcatctatgatggaaaataacattcagcaacaataatttagcaattttagcatttcaattttttaattggacctattttttattttattaaaataggttgttgaatttctatctgttttaatttctagtttgattagaaaaggaagttatattcctatttggaaacatagtcttgttctgattatgagaatgagttccatgggtgtatataaacccacatagtctttcaatttaaataaatatgtttttcaagaatttaatagcttttgtttgctctcttgctttttgctcacctgttggagctatttatataaatcatgtgtacttttgtgtacccttattcaggtgcatgtaatatattttcctgttttgcctataaaaaaaaagaaaaaaagaaattgaggatttagtagtaatggaacttcttaaaggtgtgatttctaggaaccttggtatgattgtgagggatttatgttgtttttttccttttcacttaattgtgattgccaatgatatattcttttttcttttatatgttttttgtcttctttgaactctcataccattatataacactaagtttttaaaggtgaaaagcataaaataaggtgtttttgtgcccttgaggcaaggtgtaagcttcgagacttttgaggcataagccttggaactttgactttcataattaataaatatttaaaaatagtttataaaaaaatttaaaataaaatatatgatatacttcataataagtcaatttaaattacatataaaataattgaattaaataatttttttcttacattaaaaatggaaaaattaaattgcataaactttttgctacaagcatatgaaaaaaaatgatttttttttttgtaagttttttgttacatgaaaaagataaattgcataaatttttgctatatgaaaaacaagaataattaaattgtataaaatttttgctacatgaaaaaaacacagaaatcagtggagttaaaaaaaaaattgcataaatgatatacaatgagagtgacataaataactaacaacctcaataaaaacaaacaaaacatataaattgaagtaatagaaaaaaacctaaatgttggactgaggtgcgtgcgtgagaagagaagttatgtgaatgcattgagaagaagtgggacttaaaaatctaaatgaaaaaaaaaaaaaaaaaaaatctgaaacatggctgtgtcagaagcatgcctcacatatgccctgacctcttaaggtgtacgcacctttgggggttctttgcttttcttttgtgtgttttgggttcacatcatgctgaagcgtgctccaaggtgtgcccctgaagcacacctttgaaaacactaatatagcaaaaatcaacttttacagtgctggagtttttatagtcctgcatcactccacaaactattcttctcactagtgtatctctacaaccttttcttaatcaatgccttgttcaacattgagaggttctaattgccaaccattctctacacttttagagaatactacattgccattgattatatggatcttactatcagaaggcccacttctccacagaaactctccttgaacttttttcaagtttaagttgaactttcctaggaaaaactatgcgtgacaataggtaactgtgggtgtgggtgacaataagaaaattaggaaagtaaatggagttcttttcaacattgtaagcttgactccttttggaaggttttaaacctcttgcatgaagacaatcttttctttgaaactcttctctactgaatcccaaacagcgatgcattcaaaggaagccccaagaagtaaacctaacacttgataggcagttgccctgaaaactagaggctggatgcccttgcctcaactatctccagctccaaaagagtctggttgcagttcactaactagcataataaagtgaattgttgaaatgttagacataatttgaccaatccatttttctccaaaaccgatgctacctaacaatgaaaacaaaaactcctaacactcatagcactaaattctttcataaaatgacaaatgctcataggaggaattttttagccaagattaagttaaatggttgctagctttctgaggacgaggagataaaggaggggctaacttagccctttcgtagacttttatccatttctagtgattggagaccaagtattggaggattgtcattggggagcttgagtagaactgttgttgaggctatggaggttccgtttttcgaggaggttttgtttgctctctagtcgatgcatgtggataaggtgttagggcttgacgctttctgtatggtgttttggctacattgttgggattttgtaaagcatgaagtgatgagttctttcaaagagtcctatgattatggttctttgaaagaagtttaaaatgccatagtgttggtgttgattccaaagaaggaatgggtagaggacttgaaagacttttggcctattagtttggtgggaggtttctacaagtggattgctaaacaatctttcatgtatatttggtaggaatgggtcagagtgtctataggtgattgctctttgtccatgatgggctttgtagtgttgttcaactctaagtaaggcgtggttgttgttttttatgcatccctcgccttggttttttggctggttggcatccttgtatgcatcggatatacttttgtgtacttttcattgagccatttaatacaatcaatatttacctataaaaaagaattattggtaatccgttatttgtgtcctatctagaatttagtaagtcttctttgctaataagtcattatacttttaaactcttctttgttttctaaatgatgattattttatggaaatctctagtttctaaaagtttctacattttaaaaagtttatattttctgaaagtattcacttatttattttttaatcctattgttcgaaaagttttgtactttaggaaagagctaagagtgataataagttaccttataggttaggttttgttcttagtggtttgtttggttttttgaattttttcaaagcctataaatagggttacctgatgaaaccaagagaacaataaataaaatgtcgaatgatatcaatttttgtttactttgctaaagaatcaatggtgtgattctctctctctctctctctctcttctagcagagactcccaaaagggcttatttaaattccaagtctttcctatctttcccttttttatcttttgtttacttttcttttttcttttgcttgatgccataagcttacttccctgtttttaagcattcacacatggttgctttttgaatctaaaagtgcagaacttgacctgatctggcctgaacagggatcaaatctaacggcattccaatgttcttagtagatgggaacagttctcaccctgcctctggtttggtctgagaatggagtactttggctgtgggggtacggttgggataggggcaatctgccccgttgacatccctagtttgaaccactttcctttctcctttatttcaccaaagaacggctttccaatttccttgtagcagctattttagcaatcactccaagtctttctactcacttttaaccaccttgaataacttttgcctcttcctatatcttgcttcaaatcttcctattgcctttcctgaatctatttcaaaatttttttgcatccactgccataagcttttaaggatgcaaccaccacatggtctctctgtatcagcttccttgtgaatcttgctcgcttgatgccaagatagatgatatgaaccatgtttggaataacaattttattttattttttataattttattattattttaaacaagaattgtttttggaatagttttttgcttttggctttcactagaaaatgaagttgaagctgaatttatcattttaagtcttattaaacatgaaagagcatctggcataagctaaaaaggattttctgaagaaacaactttggttttactttcatgttaaacctcttttttgagcaagaagctcatttagttgtagttttaaaaggcgcaagccacacctaaggtatgaaagtctcttgagacttaggtgcatggcgcaacacaagatgcacacttgagcgaagtgaaacacggtataggctgcatgataattttataaaatatgatccaaaatccaatccaagtaacaaaaaatttaagattccaaacatttaaaaagaagcatgtaacaaaaaaataataaaattatatgaatttcaatatataattacaaattccaaaaataaaagtgtttaaaaagaaaaagcaaagtagatgaggctgtgcctgtgcaccaaggtgcataagcaaggcactataactaggagtggttgcgcctttggcttaggcgcactttaagtgcacctttaacaactatgcatttagtatacaaaagcagtttttaggtttaaggagtttttgtcttccaaaaaagttgatccaaatagggccacatgcgtagaatatgcaactttgctcttcatattgcatttcccttgtttgtatgtctttatgtatgatagtatgggtgtgaagtgtatgcatgtatgatagtatgggtgtgaagtgtatgcatgtatgcatgtgctatgcaagttcatgcatgcatgaatgtaatatggggcaataactgtgtgctaacattggacctgcatagatcaacgcctatttgcacttgttctgaaacaaatgtaatgagaaaagagaggaaggaatcttgaattcttttacttggtttatcatggaaaatatgaagaaaagtgaaatgtaatgagagttatttaaaaatcattaggaacttatacaatgttatatgcatcattctctatataaaagagaaaagaaattggaaaaacatgatatagaaaaattattgagtttaaacttttgtttccttttttcctccttattttctttcttttctccttcctttatattctctgtttggactgccttgatcaactcctatttgcaccttttctgaaacaaatgtaaatacttgggctccttttggatcttggaaaataccaaggaaaaagaaaggagaggaaggaatcttgaattctttcacttagtttatcatggaaaatatgaagaaaagtgaaatgtaatgagaattatatacaaatatttaagaacttatacaatgttatatgcttcattctctacataaaagagaattaattggaaaaacataatatagaaaaattatcgagtttaaactttgtttttttcttctccactttttcttcctttctccttcccttatattttctgtgatccaaatgaagtcttgataaacttatgttgatggatgaatgtttgcctaaattttggtattcattgatgttgccttgcagaattacctttgtacctgatattaggt

SEQ ID NO: 10479 - DNA, 8056 bp, Vitis vinifera
  Intron number 9 from transcript GSVIVT01026142001 (locus G SVIVG01026142001) derived from phytozome v7.0 (chr-ID chr1 0; pos 12876037 to 12884092 reverse strand)
ttttgacgcgggtatgttggctattcttttcagctacagcacttctcctattcatcaattgtcctgtaataaacataggctactttttttttggttaggattggatgcctgcattataaaaggttttcccaaaattctcacaagcattatctgtcagtaaatgaattgtcataatttgttttctttgttcattctctataatttttattcctttcaaaaggctgcttcatgatttagaattttgatgagttgtgtcatttcaggacttgaatagatatgccttgaatttttttctttccccttttttttttagatattgatgtttttgtgttgttttagtaacatataatgtaccttataataatgactacatgcaatactattatcagaatttgattttaattttaatttttttcaagggtttatttcattcaaatcccctgaagttggggctaaatacacctagccaccatgagtttgaaatctgatcaaatatctcccctccccttttcattgttattttcactcaccatcccttttatttaaaataacagaggtatttgatgaaattttaaacttatggttgttaagtatatttcgcttaaacctcaagtaagtgagtgaaatttactctttttttttaattatcacaaaaagtacataaaaaatgaaaaataacagaactgagtttgagtttggacatgtggccttggttctacttttgagttatatccaagttgctcctggactccccttaaaagactgaagcaataaggtggcctaccttggctatgagatgggacacttagccagtccagtcagtccttgcttttgctatcacgccaacaacctgaagccaatctcaatggattgaggttgtctgtcacagaaccacaaccaagaaaacttgctatcatgtctagaagattttaggacttctcagtcattgcagtagatctgggcaggcatcaagcagtggtgtaaggataaagaggttgttggccacattgtataccttgtacctagtgggcacacttattccatgcatggtgtctgataggccccactttaatagctttgctaattgaactgcaagctcatatttctatgtcgcttctcattttctttattgccgcgtgtcagttattgccacatggcggatagcctattgacattagtcatctgaatgcatggatttttcaccaaggtcggcgcatttatcattgagtatacacagctttgaaaagtggcttgtttatagcatcagtcattttaacatcaagtacccataggcttgtttatcagcaacattcattcgcacattaagtacccaaaatgttgcttttttttcttggactgatactgtgagttcttgtattgtttacgcttatgagttgattttaatgcccttttagaggttctttgtacatatatgagcaggttaattcacttctcctttttgagttttttgtttctatagaggatggctctattagtcttgtttgtatttgtaatccttttttgacaggaaaacaaaattatatcaacaacactgataaaataaaggcacaacaaaatacaggggacatgaggtatacaaggacatcaaaacggcgaaaaaagaagaaagaaacaaaaaatcttccctcctttatatggatcctaactagtcaactagatctagaatagaaatggagcttgcatccatggacttctcagtgaacaatagaggagcatatgaaaacaacattttgagggcttgattgaactgtccctgatttttaaaagacgtgctattcccatcttcccataaggaccaaaataagcacagtggggctgcctccacacttccctctgggtttttccccacaaaccttccttggtaatacccattccacttcaaaaggcaaaaatagcaggttccacaagacctttgacgcaatgaaggagggtgtgattagttgtttcttcttccatttgtggagatcaacgatttgccaaagaccattctctccttttcaacctatctaaggtcaaaatactccttcacacagcctcccatgcaaagaatgccattttcataggaaccctagaattccagaccacttccataaggaaatcaccttcttcctctggcttaagaaaagtgtagaaaattttcacaaaattttccttccttttgagttatttcaaatcaacctttcctcactgttttgcatcactggatgcttttggatccttaagaaatctccaaccacctctaactccaaatcatggaactctctttagaaacaaggaccctaatgatcatccccctcaaagtcctcttgtacctctgccgcccaagtgtcctttgaattggtcaaggcatacgaagtggggaatgcatcattcaaggcaaagtccccgcaccaaaaatcctttcaaaacttgacttttttttttccatcacctactactaatagccttcaacaagcctaccatgtagtcttcccacacaacactgcaacaccaagcgccacttcttccctatactgtcctataacctgcctccacaagtactccctttcagtagcaaacctccacttccatttacctagcaacaatttattgagcatggataagtccccaataccgaaccctcctttcttcttttccatgtagacaattgaccttcaccaagtggggctttttcgcaagggctccccccttccaaaataagtctctttggatctttcaagcctcaaaatcgacttttttggaaggaggaaaaagacaaagtaaatttagtaagcttgggaaattacttttgatcaatttaagcctcctaccttggaaaggtattgacgcatcctgatagtgagccttttgtggaaccttttttctaccacatcctaagttgccactaacttaaaagaggccctcagtagaagtctaagttaggttgttgggagtttccccaccctacatcccaaaaaagctgccaatccctttatagtaggcactttccctacaagaattaacacgctcttctccaaaataatcttcaaccagatgttgtgatgaggatggatctctaagatatacatcaagaaagagaatttgtattagttgcaattaaagtaggattaatattacttgaaattaaattaggattagtattagtattagttagaattaaattactattaatatccatagttttaaaaggctcaaggcgtaccaaggcgcaaagtagtcctggagcctgaggcgcaaggcgcatctaaggcgcgggctttagtgaagtgaggcgcaccctaatttacatatatatttttatataatataatcaaatttaacaatcatttatttgtcctaaacacataaattatcaaatatcatccaaaacttcaatttaataaacaaaaaacataaaaataaagaactccaagcataaaaacaaatccaaatccatattgctaattgcctaatacatatccaaatccaaagtttccaaacctaaaggtccaaaacatgaaatttgtccacaattcaaaaacatcattaaaaaacacttaaatcacaaatttgtccacaacaagcaatcatcactcctcctctaaatcaacaaaatcatcatcatcatcatttccatcaccacatttgtagccttccccatcttcttcatctgctgaatcaaccatgtctccatcttcatcttcatctattagtgaataagaaggcaaagttctagaacttgaagctatcccccttgttggtggtattatgcttgagcttgctctagctctagctctagtatcaaacctggcctcctcagctccagcagctctagcaacatcaccccatgtcaaattgtcatcatcaaatacaaaatcatcttgtgcacctccatgagaatcctcatcttccattctccctatcaaccattcattgctatcatctatatctttcaaggaaattgggtcaatggtgttacgttcattgtatcttctcttcaaggctcgattatacttgatgtacaccaaatcattcaagcgttgatgatctaacctatttctcctcttgctatgaatctgcaaaaattcataagctcataaatatattttaaaattttaatttttaagttacattcaagactctattagactattacttgtaattattttggatttggtcactcacattttcaaagatgctccaattccgttcacaacctgatgcactgcatgttaagttgaggactttcattgcaaacttttgcaaatttggagctgaagctccatatgcagcccaccattcagctgtagtatagatattaacaatttagtgaaacaattcacctattttagcaaaaatacaatctaatcatttaaataaacaaaactaaataactaacctggtgctctagtctttcttgtcctaacagctaactcattcccgaatagtccttgggcatttgtgaacaaactcacttcggccacaactttttcttgcttagcagggtctcttgttagccttaagatgcatttatacaaatcactcataatctcggcatcatgctctatttctggcttatcatagaagaattctgggttcaaaaagtaccctgctgcatgcaaaggccgatgaagttgaatctcccacctcttatcaatgatgttgaagatttctttgtacttctcttcatttccattaaaacttctcacaattgcatccttagctctattcatggcctcatagatgtatcccataggagcttttttttcaccatcaaccaaacgaagcacacgaactaggggactcgaaacctttaagcaaaacacaatagtgttccaaaatgaaggcattagaactatgttggctatagttttcctcttctgctcttttgcccatttactatctgaccaatctgagcttgtaaacatcttcctcaaattgtttttttgttcatgcaatcgcgataatgtgatgaaagcagttgcaaaccgagtcttagcaggcctaagcaattccctttatccagtaaaccgcctcatcatgttgagtagccctgagcgattataaatatacccatttagtgatatagccctctccaatgtcctcttgatgtttggtagctttccaatatcttccaacatcaagtcaaggcaatgtgcagcacatggtgtccaatacaaatgtggacgctttaattctaacaacctccctatatgaaattgtagataataaatttacataagttctcaagataaataattcaaattttaaaagtaaataaaaattcaagaaatagtatttattacctgccatcacataacttgagtgattatctgttataacttgaataacattctcttcaccaacttgctctacccatttgtcaagtaactcaaacatcttttctcccgtcttaatcattgaagaagcatcaatggattgcatgaacatggttccctttgaacaattaaccaaaaagttcaccaaagttctctctttcctatcggtccatccatccgacataattgaacatccatttttcccccattccaccatatgatctttcatcaaatcttttgtgagagccaattctttcttaaggttagtaactcttacctcatgaaaagttggtcccttcatacccacaccatattggccaatagcctcaatcattggttggaaacttggatatgtgactgcattaaatggaatagcagcctcatacatccatcttgtgataagcgtgcaagctctttctcttgcttcctttttgtaggcatcattgatggtagtttgattcatctttccactcctttgattttgaacaaccatctctgcattaggagtgaaaaaatgatccataggacctttttgtcttggtttttttgaagaaaacgtcctaccaccacttcctcctcggttactacctccactagaaatgttggtgacattcgttctactattaatctcctcaccaatatcttcatcttccaaaccaaacaaatcttcattaacatattcgcaccccatattcatttgctctttttgatttttcttggaactcatatactcttccatttcttctctaacatgttccggacattttctacactttttagcatttctatatccaccaacaagatgttgtttgtgtctatagatgcctcctttggttactttatcacaaaaaatgcatatgatggtgttcaaatttttttcattaaccaaacgaccatatttccaccccggatctcttcttccacttgcactagagtccacttgagtttcactctcattatccatcttgcaaacaaattatctatactccacaataaaataattataattaaattaagaaaaaaaattgaaaaaaaaatgcatatcacattatcaaatatcacattaacaacaaatatgcatgagtgctttttatttatttatttttattttgtaaaattttcatgtcaaaaactcaaaatataatatttatatttaaaaaaaaaaattaccaatgagagttatgaggtaagaatggaaaaaaatacagaaaagtgaagaaaaaagaaaaataccgaggtccggaaggtacgtgactatttcccctttattttgtcctatttttcccctatttttcttcttctttttcttcttcttcttcacttctccagcacggaagaggctagggcaaaaaatggcagtggtctcgagttgagaaagaccagaaaagggggttggatggaaggagttttttttttttaaagaacagggtccaaaacgacgtcgttttggtccctgttcacttaagtgcatagtgtccaaaacggcgtcgttttgggcccagaaaataaaaataaaaactagggctgctgccccgtctctgcaacccgactggaggaggaagaagaagaagaagaagaagaagaagaagaattcgtttctgatcaaaaaaaaaaaaaaaaaaaaaaaaaaaaaagaagaagaagcagaaggagaaggagaaggaggagcgcgtacctggtcaggccgtcggaggcgactcgggcgaccgcctcgcgccttgctggaggtgagcgccttgcgcgcctaagcggcgccttcgtgaaggggcgtcgcctctcttcaggcgaggcgccggagggtggcgtcgcgccgccccgagcctaggcgcgcctttcagaactatgttaatatctgttggagttaaattaggattagctaactaggttataagacaattagaattagaatcataatgagttattagaatcctagtagactttgaattttttagataattttataaataaggctaatcaatgtaaatcaaatgaatgaattgattaatgttaataatattatgttgttttattgcaagtgttgtaatcctcaatggtgagattccattgattttcttctagatgagactcctagaaggccttggtaagactcaaggtttccatctcatctttgtcatttcgtctttttctctattttgtttttttgtttttttctttctctatcataaactttattccttgttcctcaccttacactgtaaaaataaaaactctagccgacctatttgagtgtaggcaaccatcctagggttgtcttacatcatgctgcttcaaaccatatgaatgaccagctcaagtacttcaattgctcctcacaggtatcacaaaaaatagagtgttgtctgcaaacaagaggtggggtacctctatccccttaccacccctccctcccaccttaaagcttgaaatgaaactgccttcctctactctttttaaaatacaactgagtgtcttcaatgccaggacaaataaggtgacaaagggtcaccttaaacgtagatgctgttgtgttcgtatttgtagtgatgatgttagtttatcattttcctttggatcagcttgaagaattgctcattgttcgatctttgtgttcctttccttttccagtgaatttaaattgtcatgcataaatccctgatgcaaaattttaattatttttaccagggaagaatacctttaataggctgtgggggcattag

SEQ ID NO: 10480 - DNA, 4037 bp, Vitis vinifera
  Intron number 16 from transcript GSVIVT01009948001 (locus GSVIVG01009948001) derived from phytozome v7.0 (chr-ID chr 18; pos 12734649 to 12738685 reverse strand)
ttcttccaaggtgtttgaacctaaagtccttctaagtttataacaataactcattttcttactcttactacctaacactaacctagtagtgtcagttggaggaccaaaaagcatagtatttctagaagagaattcctagtacatagtcaacaagaactataacctaagctataatatcaactatgacaacctacccttgcagatgtcatccatgtaagatagtgtctcttctctagtccaaaaactaaggtagggatactattttacaaaaggaaaataaattgtaactatatatgctgttcaaccacaatcaccaacccttcaactaccctagtcatgacctcggttttcttttatgaataatattttttaatttttccttgttaatcaccttcttgcttgtcatttaccatgcaactaagcataaggtgttgaaagcatgcaaccaaacataaggtgtcgaaaagcatataagcaagcatgaggtttcaagaagcatgcaaccaatcatgaggtatcaaaagcatgtaaccaaacatgaggtgttgaaaagcatacaaccaagtatgaggtgtttaaaaacatgcaaccaagcatgaggtatcgcaatgcatagaactaaaaggacactaagccactttcatcatgtgatacctaactaagcatggtgactcataaacctccttcacctactaaggatcaagcacgtcatcacatgtcatctccatgcattaagaaatacactaatctttttcccttgatcaacaccttgataagtcatgcgatgggtcacctaaaagctcacttgttttaggtttccacccacccctataaataggaatgttcatagttcaccttccaataaaggaaagaagaaaagtgtgaagaagtttttatagcattattatttcaaagttggatctttaagccataacggaagtgctgctccaattctagtttgtaattctaattgtgaacaatcatatagtgcatgattttaattggttttagaattatatatctcatgcatataatgttatatgtatgcattattttctaaatatcatgagatatgcttcgaaaatgtgtacggtttagggaagttctatataaggagactggattttaagtgggactattgtgacccatccagtcttttatgagaacttacctaatatgtactattatcaatgatactaatactagaattattattgcgctttacattaaaataatgtactataagatcacttacaattagaattacaaactcaaattgtaacaacacttccattatgacgacttaaaaatccaacttcaaaataatggcactataagagtttctccatactttttgtctttcttagtaggttaacactcctaaggatgagtgggaacctaaagcaagtgagtttataggtgacttattgcatgacttacctaggtgtcgactaagggaaaaaaaaaatagtgtttttcttatttcatggagatgatatgtagtgacatgtttcatctttgtagctgctcaagtatgtgaagtagtttcatgagtcaccttgtccggttaggtgccacgtgatgaaagcgattaggtgttcttttggttgcatgcatttcaccacatgacgcttgattcatgcattgtgacacctcatgcttggttgcatgttttttaacaccttatacttggttgtatgctttttaacacctcatgcttgattacatgcttttaacaactcatgcttgattgcatgctttcaacacctcatgctttgttgtatggttttgacactttatgtttggttgcatggtaaaggacaagcaagaaagtgatgaacaaggaacttcaaaaatattatttataaaagaaaactaatatcattacaatcttaccccccttcccttcaacaaatttcgtccttagatttcctatagttctacataaacaagtgggggttatcactcccccatctcattctctttttcccaagtagcctcttcaataagatgattgcgccataaagacttttactaatggtactaccttgttgtgtaggatcttctcccgatgatctaaaatattgacatgttttcctcatacgacagttcatcgcttaattctaccctatttctggtgtgttagtgtttaccacaagatctaaggatgtcaattgacatccttgtctcattaaccgatttgcctggattgctgagatcaaacaaggtggtcccaatactccttagtacataattccaaactcaggtaatcctagtatcctaaacattactctttttttaaaatagtcaatcgatgcatgataagctaaccaatccattccgaggatagcatcaaagtcttgaatgtccattagtaccaagttcactagcagctcccttctacctatagtcaccacacaccccctatacactgtgtccacaattactacaactcccatagggttcctaatgctcaactcacaatctaatagacttgccaccacaagtaaattttctataaaggcaaaggtaacaaaggaattggttgagctaggattaattaaaaccttagctcatttaccacaaatagtaaagatacttgctatgactgatggtgtagcctcaaggtcctattgagtgaaaacaaagatccttccatgtgcctgactacttgtcctttgggtacaacccctcatgtagaaggactattgagtagttaaagggttagtgactatggttgaacaagaagtccagttacaatatatttttcctttcataggatagtatctctgcctcgatttttggactagagaggagacattgtcttccttggatgacacctacaagggtggtatgtttttcggtcctccaactaacactatcaggttattgtcaggtagtgagagtaagagttgagttatgggttatgaatttaataggactttgggttcaaacaccttggaagaaggaaaactcgagatacgtcccttagtaacaagccataccctcagtaaaaattgaaaagaacttaaagctttctttagcctttttggtgattttcttcaaaaccatcatgagaatataacatatatatatatatacacacgcacatgtatgtatgtgtatgatcttatggcatttactataggatttctataatccatacttaggccacgtttggattggcttttgagaagccaaaagctttttctaaatatgaaccttttaataatgtttgggaagttttgattatagggcttgtttgattttaaaacagcttaacatagaagcaaggataaggtggcttcttccaaaagatgtttagaaaaatttttgtaaggaaactctatacactttaatgaaacttttataataccacctttgccgctttacttatcaaaaaaaaaaaaaaaaaaaacctttgccgctttattttaaaaggaaaaattgaaatttcaaatatatcctcttttaatcctaaactataattgtcaaaggcacaattaaaatgcgcctaggctcaagtcacaactgctccctggttatagcgccttgttggagaggcgcacttagtctactttaattttcctttttagaacacttttattcttaaaatttctaactgaatattaaaatttatataattttattacatttttattgaatgcttcttttaaatgtttggaattttaaattttcttttgttgattgaattggattttagatcatattttataaaattggtatgtgtcataagtagcatttcacttcgcttaggtatgccccttatattgtgtcttgtacctaaaccataggtgactatttcaccttaggtgcaccttgcaccttttaaaatgtcctaaactattcaatctgtctaaatttttatttctgtttatttattctttgacatgaaataatactgattctaatttatttattttttctatttatacttttgcagaaacttattttatggcctcatggcaggggacttaggcttttttagttcaaattctaactacatatatatttga

SEQ ID NO: 10481 - DNA, 11964 bp, Vitis vinifera
  Intron number 4 from transcript GSVIVT01029474001 (locus G SVIVG01029474001) derived from phytozome v7.0 (chr-ID chr9 ; pos 22446732 to 22458695 reverse strand)
gttggaggtaattacctcaacatatcgaagttctcttttcaatgggcggaaagagacccaacacctcttcaccgagcagcaaagctcttgatcaattctcaaatggaagatggagattttccccagtaggtgtttcattatttcatttggacacattaatctgttaattattgcatttttatattgttatagacatcattttttcgtaaggaaaagaaaatttagaagtctacagttaagatctaaaataacttgaaaaatcaacttcttatttctatgtccaataaatttgcagcataaaacacaagaacaaatttacaaaaatcacatatcacaatatgtgattttctatgaagcaaccattctagagggaaaggaaaaagtgacactcttacacaatcaacaaattgttatgcttgaatttttgttggcccaatcattgattactcatttattacacgtaatatgtttacatgctaaaaaccatttatgggtgaatgataaattgaactcaaagtcacatatacagttatggaaaatttggtggaagaaagtagtcccacatttgaagattactagttggaacaagattttataagcattttgcaagcttaaaagaaatacgggcttggacataggctcatatatgtggggtcaactagctaggcatggacttgggcttgacctaggcccacatgctagtagacttaataaaaaagcccactagcataaagtgatgtcttttccaaacaacttttccatttaagacaaaccttatttgaaaaacacatcagacatgtctcttctaaacaagtgcaacccttcccgtggaaacatctctttttgggggggcacatctacaaaaaaggaccccctctatcatattttatcattccaacaatcatccgcctctcattcatttccaagtcatttccaagtgtggtattcaattctaacaaagtgtggtattccattctaagtttagtgtgagttgcaagtacataatttcaaagtatctaagcttttgtagaggttataaacattgtttgattcaccatttcttatgatttgaagtgctattgactgctcccaacactacttgtgacaagcttttagcaggagtaaaaatctgtcattaaagagatttattggacatggctagcactagaccatatctaaagaggctaagatgtgttttaggcgtatgtgtttccttgcctatggatataaactctaccaagcccgctcctaaaaggcccatatataaatttagaaaaaaaacgtgccaattcctaatgtcaagccatctcttaccattgccacctcgtagtgcattttcacacaaatgacaccttcaaggcctagggttttagttgttgtcttttcaattccatcacccaatactagaggcttagggtttctagttgagatgcaacacctctctccccttagtcctctttgcttctcatcccaagtactctcatcttctctctatatgatctgaatttttgaaatcctaggtattaatctatacattttattattatttttattttattttaaatcattctataattcattgtaattttagagggtttgtttgtttttttttttttcatatttcaccttgattgggattttttctttttcaaattgcctaatggatgatgatattttatgttcaaaattttttttttctcatttttttcttgcttggttgagggaccatattggtgatgtaaattaattttttttttagatttgaatttcataacttactggtttaagccctgttagtgcctatttatttgaatttcataattttttttttcataacttatttgaatttcattttttcctttctgttcatcttcacccaactatcactctaaattagttagggttatttaggctatgctaatattatttacatcacaaattccaaggaacccctctgcatccaagaatgttttaatttgtatttaattgttcacatttatgaggtgttttcataaaaaaaacattacatggttaaaataccaagtctcaaactgttatatatatatatatatatatatataacttgcagatcataggatttttatactatatatttgaagagtatttttgtcttagatatattaattatatagaaatattaaatatttgctttgtttttggagcaaatatttcataaatgttgcacatgagaatataaacttggaacactaattagtgttttttttataatcttttattgtttattacaaaaattgtgtctttcactctctctattcatttggcacctccaaccttatggtggagagaaatttagtggcagttctctcttgagtggtgaatgggcaaagagggtcatggatgtacaaacattgggagtggaggattttgagtcttgttacagttgtgggtttttcattctcttgtaagtttagatcgaaaaattacaaagcctatacgttcacaaagaagtcatctctctgtttgattctattggtgttttatgtccttcaatggtttttatttttttgaaaattttgttttctttctaactttctaatggtttttttttttttatatatataattttttttttctggaggaccttttgtctttcctgtaaacatttctgttacttaaatacaatttctagcatttttgtatgaaagaaatggccataaagcattggataaggtttttgcttatagacagttaatgatggctaggtcttcagagattagggtttaagaagggaaaggtggaattaggttttattgatttaataaggttcagataggctatggttttaggaggcttgtggattggaatttaagggaaaaacttgaagtaccttagagcataataagacactctagaagatttatttagaagataaattaatgttgtgccaccattaaaagagtgtaaaatctgctaaaaagtcttattcatagacaatggaatcttatcattccaagagcaaaatttgcagaggacctttttggtttccctatttctatgacttatatagaaacaaaaagtttccataaggcctagtttccatcaggtaataaaaatgaaaagtccactagatactatccctccactgtaaaatttgaagtgatcttccttccttcctgtcaggtactattctattacagaaatttttttagtaaattatggcccaaatttctatagaaaagggaaatcaaagatgcaaacttctgaatttgagcttaaggtatttaataaataaaatggtatgaaattgacttaaatcaaacaaaagatcatttgataagtgttatctttcatgtttaatttgattggtgaatttgatctatatatatttttctttgccttgaaccaaaatgcataactcaaatgtttagagtttcatatgtagaaaatgtcttcggtttatgtattcaatttgacagagatctacatcattatagacttacaatttacaaattagggtgaacacaatttgtttacaaattgtgctcctatatgcatgcatgaaaccatagactttccgttcaagtatcattgtgtgacaaaaatatattttcttatatgtcaaagacatttaagttgtcaaagtgtggaaatagttttattaatgaaccaatttcaagttgacaacttctcgatttgtctagcatgtggttaaggtttttttgtctacaaatgatacttgaattgtctgattgaacagtattggaaaacataatatctatgaagttgctcttttatacttgatttattgtttagaaattttaaaagttgttccttttgttctttgggtgcatatttggacaaggttaaataatataccttacttattttgtgtacttggagaactatgaggaaatgatgctaaaaattttctaaaatgaaacaaagcatataagtagttaactcatagagattatgtattcctatatgggataggaattatcacctaaattaagaagttggcgatatgttaacatgctcaaattaattttcatgtagttgtaggaaatcccaatagacaaaagttggatgtaaaagtcaagaatgagcctagagtatgtaattaagtttttggaatttaccttcaacaatgcacctgaaagtgataggttaccttgtccttatgttcattgcaacaattctctaatgcaagatagataagttatgtacaatcatttgcaacactttgggtttctttgggtaatgcatggtgagtacgagtttagtgactcaatcgatactataaatgactttgagaatcaataagatgatatgcatgtatcattacatgatgaacttggggttccaaagtgatatattggaacaaaaggacacttcacatattgatcctagccctaaacaaccaaatgaggaagcaaaatttttttataagttgttagggaatgcaaaataggaattgtatcgtggttgtaccaaactcactaatccatcatttgctataaggttgattcacatgaaatgtcttaatcgatggagcaacaagtcattaacaatgttattagaactattgcaggagacagttcttgaaagtgagaatgtactcgctaattactatgaaacaatactttatgatcttgggcttgattacaaaaaaaaaataaaaatagatgcatgtccactctattgcatattgcatacaaaggaatatgcaaataattatataagatgtggcatctctagatggaagaattttgggagtaattctgatgatggttcagtaaaaaattcaaaggacaagaaaattcccactaaggtttgtgacactttcctctaataccaaggctttagagattgtttatgtattaaaaaacaacttcccacataaaatgacatctacaaggtcatggtacaaatgggctaatgagagatcccatagacttttttcttagaaaaagtttgatatgttgtaacctgcatttgcattagagtctcgcaatgttaggcttgggttgtctattaatggtttcaattcatttagcaacatgtctattgcctatagcacatggccaattgtactcatcctatatgacttaccactatggatgtgcatgaagcaatcatttttcatgtcattgttgcttattcttggattaacagcttagggaaatgacattgatatatacttacaacccttaataaatgagttacaagaactatgggagcatggggttgatacatatgatgttgcaactaaacaaaatttttgcatgtgtgcaactatattatggatgatacatgcatatgcaaacattttagggtggaaaactaaagggcaatatgcttgtccttgttgtaataaagaaacttgcttttatcgattgtaacatgagagaaaattttgcaacatgggccactgtcgattttttccaattaatcatagatttagatgtgataagaggtattttaatggcaaggaggaattaggacttgcacctacacaattattagacattgatgtgttgcaataattagaacaatttgaaccaatgatgttggggaagtcacaaaagactaacatggcaactaaaaggataagggaaaatgctacacatcatcataattgttagaaaaagagtattttcttctagttggtatattagaaaacacttattttacgtcataatttagatgtaatgcatattgagaaaaatgtgtgtgatagtataattgggacattattgagtattgaaggaaaaaacaaggacaacctaaatagttgtcttgatttacaagctctaggtattagaaatgagcttcacctaatagaaagtgggaacaaatttatttttcctgcaacatgctactcactcactttaattgagaggaaggaattttgcaagtttttgaaatcaattatttaggaaaaggaacaaattggtaacatttgacttcatcaaacaacgtgaccatagtaggccaccatatgaagctcacctcccactaaatgaggttatgatatcataaagaaaaaaaaaatgaaaaaaagagatatattggagatactactattgggtgattttaggcattctcaccctaaaaattagcttaaaggatgagattttccctcacactgataaggagtcacctaattccttctacaagagatatgggaaaacccaacaatattcccctcatacactaggtcctaggttgagagaccataaactagattgtcgaatatgagaggtgataccaattccaaaactgagttttgataccatgttgaacaactaatttcctatgtggacatcccaaaaaatatctctccattgcatctcccgattcaaaagaatcccttataatatggactctcaaaggctaatcctatacctaaactttgtcacccaattttctccttgataaagatattgatttaggaaaagtggtgaacatactaattgtagccttttctcttatattttcatatcttcaagaatcacctcattttgatagatgtagccaaagttatgcccaaaataccaaaacctatttagcatgtgatgggaaagcttagccgaagtttgtcatgaaatttactccttgataaagattgataaaggaaaagttttcaatatatcaattgtatccctttgctttccactgcttcaagaatcacctcattccagtagctatagtgaaagttattcccaaactaccaaaacctcttcattatgtgatgggaaagctctcctactctctctcaacctctccaaagaaagtctcaatctgatatgcagccctatatgtccctctccatctctccaaaaatttgatgagtctcttaagacccctactcaatctaaaaaaaatccaaactcaatctctaagcataagccatgtaagatgatgtgaaatgttatcctaaaatgcatctagataaactatcctaaaatgcacctagatgaactaaattaaagtgtacttaaatgtagtaaactaagtatgcaatctaggagtattatctcaaagtgcacctaaatggaatgaactaaagtgcaactaagatgaactaccctaaagtgcacctaagccaaagtggactaagtatgcatctaaatgaactatcctaaagtgcacctaaacaaaagtgaactaaatatacatttaaattaactatcttaaagggcatttaaactaaaatgaattagaaaaatcctaaaatgcaactaagagaattaaattatgtgaactaagctagagtataacttagtgagttgaaatgagctaagggccactaagtgaactaaaactaagctaaggtgtgactacttgagctaaagtgtgactaggtgagctaaagtgtgactaggtgagctgaagtgtaactaagtgagctgaaactgagctagagtgtgactaagtgagtttaatttgagctaaaatgtgactaagtgagctaatactaaattgtaactaagtctaagtaaattgaacctaaaaatgcatctaaaatatcaagaatcaaatatgtactcaaaaatcaaaatcaatcatgcaataaaatcacaatcaatcacaggcaataaaatcaaaaccaatcatatgcagcaaagtaaaaaataaaataaattaaattatacaccgaaaataaaaaataataaatcaaagttcatataacctaagaacatacaataaaaacagaaaatcaaacgtaatgcactaaaaacaaaaactaaataaaatgactcactagaaaatagactcctaatctaaaactagaaccactaaaaaaacatcacactaaggatccatataatctctataagatataaacatcacacagtggaccaccaatgaagacataataaaagcttagaaatggatcttaagtgtacaatgagggattgaaaggtgaaggaagacaaacactagataacatatgccaacaagacaaaatggagggtctatatgcaaatataggctttatgccttatcctaatcgtagatcacacaaagttttctccactttgaagctccaaaggcatttgctcgctatgtcagagctttactttggttgacatcccgttctaactagtgtctacttctttgcttattgcaatttcaacaaaccctaacctctcgcgaaataaagtattttagtacgtttctatctcacacattctccatctctaaaatcaggtttttcctttttgtttaatttcattttctctcaatagaaaatctccttcattttcttgatagtttccataattctagtttttttttatatgtttgggttgggtttgggttttgttagggatttggactgattttctatttggttgttgagaaaatgttggaaattgagggaattaagtcttagaaggttcggtttcgatgctaaggggttgagaagcaaataaagtgaacaacttaacaaaccaatcaaacactatactatgaagaccaaagcctaaggcaaatggggattcgacaccaagtgaaggttattgattatctcttgtctcactctcttcattcttttgcatttattttttaatattttgaattcttcaattttcttttcaagagatagtcattggagatgagagaattttctagctttgtatttctcctatagtcagttgcatggagcaaattcactatttaatgattatatcaaattggtttttaatgattatacaaaattagttttttttttatttaaaatttatcataatttattataatatttttaattattagaacaatggagtaaaatttggaaagaaatggatttaattacaatgttggttggccaaattgtatattttttattttgtagatttttttataaatgttgttgcttgatttattccaaattttaaaattgaaaataataaattagccaaacttcttgattttctttaattttccccaagaactaaacaatcacattctagcatatttaatttttagccatttgttataacgaaattactattccgtgtgcataatgagtgtgtttatgatttaaacctagggattaaactagttgaaggaaatagattgaatgacaagcttgatataaagttgtgggctccttaagattcaatttgatttctaagattcatatgataagcacttctgttgaacttgatatactctataaacttaatgtaacatgttttttatttgaacattatgtgtatgtttaaataagatattatttattagtttaatgtaggaatggggagaggtgttcaagctactattgtaagaagaagaaaatttagggacttggatcaagttagaggcagagggttttattgaagaacaaaggaagagttatttcattagattattttgaaaaccagattgtttgaagatgccataatgaatttgcaaatttgaagaataaaagagagaattgtttttggttttttttttttttttttcttatttgaagtttttgcaatatttatacacctaagtttctgcaaatttttgaattgtttaataaaatttataaaacacttttaaaaagttaaaaaattacttataatacttctactttgaatagaaatattatcatatacattcttagaatgaattatttgatcaaaagcctaactttgaaaaaaagatccatgttcaccctaattataactgatggcaacaacacaaaaggtcatttatttctttttgttttttcttttggctttgattgagactttagttggatgtgtaagggaaaaattggtaaaacgtggcttactcataactacatatgctaatatgctaatattcctacacgtaatgtggtagtacaatctaatttaaatgctatatacctaattgatgtatcatggactgcggaatatattagaaaccaatttaatatcatccatgaattttggaaaaaaaagaatttaatgtgtttggtctactcactgatcgaaactcgaaagtgaccgtttttaatggtctaaccgtttttaaaaatacttgaaagtccaaaaatgttcactctacactaacttccacaaactgaagcgactggggttagtgactgaccactctactcaggtgctcttgatctaattgtctgttcttttctgttccatgaagctcttgatttcctgttatctgatttgtacaggtgttaaatatgctttgctgctggattgaagatccaaactcagaggcctttaagttgccatttatagtgtttgtatccattcatagtggcgtgttgcaaaggcagattttgtatttttaaattatattgatataaaataaaaatgaagatgatattaaataatacattatttttttattataaactatatatttaaataatataaaatattattacttaacttctattacaaaattattaacctccaaaattcaatacaaatacaattttacttagttattgatggaaaaaaaaaagcctccaacaagaaattgacaacaagtttttttcttcttcgtttgtacactgcaaatcaaatgtcacaattaaatatataaatccaagagtcaaaaatctaactttggtacactggaccacaaaattctccttagaaccattctccattttatgtgttaagttttgttttaaaaacccaatcggactagccgatctgaccaccactgctcttcccagctcctgctgccgccccctcttccccttttctttagcagctcttctccctattttcatattttaaaatttgtgattttaatataaattaatgaaaacattatgattttaaataaatatctaaaaactgtgtcccttagattttaaatgaatttcttattttaaaataagtttatgatttaaaaataaaatttaaaatttctaattttaaattaagattatgattttaattaaaatttatgatttgaaactaattttctgttttttaaataatttatgattttaaaataatatataaattattattttaatttttgtaactatttttaattttaataatatattagttatataattatgacatcatcaattcgactatagtttgactgtcagtctgatgaataaaccatgaattgataatttttctaattgaatgattggtgaaaatattggtgttaagggacataacaactttgaaaggtacattgatctctctaaagtttatatccttcctatcaattatatgatttgaaaggatgtttgactcattatgaacaaattggtgaaaagtcacttaaacataaatgctcaccatgtgctagttaatacaatttaaatgctatataactaattgatgtatcatttctttatgtatgtcttaaaaaatattaattttatgatcgactagactgatatctatcagagactgatatctatcaactatatgaacaagtggtggcaacaacacagaaggtcaattatttccttttctttcttttttttttttgtttttttctttgcaaaactggaatttttcacatgtccaccatctaaattaattttttttgctttgattgcgactttaattggacgtgttggggaaaaattggtgaaacgtcacttaaacataactaattgatgtaccagggactgtatgtcttaaaccatattaattttatgattgaatgactgatatctgtcagggaatgtccctgacagatatcagtcatggggttggtgattgacttggtgttgtgcttctatattaatgagcgattccctcctggaactcgccattccaagtttctgaagtttctctcctctctgcccacccagcacctatctctctgtccttggtctgtatcattttaacttaattttactgcaaagaaaagcttgtcttaccttcctggtgatttcatgatcagcaggtgttttcggaagggagacacacatatctgtaaacttagatacatatagaaatatatctcgtctgtttggtgagttagaaa

SEQ ID NO: 10482 - DNA, 17004 bp, Vitis vinifera
  Intron number 9 from transcript GSVIVT01012274001 (locus G SVIVG01012274001) derived from phytozome v7.0 (chr-ID chr3 ; pos 12893095 to 12910098 reverse strand)
gaaaggaaattcatcgacctgctttctttttggaggtaagtccttcattataaaacctatgttccctcctattctttttttgtctattattaccaggatgtgtttgatgattgaatgcaactttcaaaggccatatgactggtgttggttttggattgttattggatttatcatagtttgtgtttcttctattgctttctgtttatattaaagaatgatctgactttgttagttccattgtaatatctagaagttccttcttctttcttccatattcaagcctgttgaaagtgcatgtacgatacatggctttgaatgattgcccatctacgtgattcccttccccatgccatccttttgctatattttatcgcctttgttcatggtttgtgggtcgggttgcaagaacgtcttatcgtttgcaatgattagcacccgagccatcctcatctggttgatcaatgtcactagggaagtccttggagagcggttgctgctattgatattacaggtggtatggtggtatttgtgtgttttgttgagggtatttgggttcagatcaaaactgcccatctgaggtcctggatgaaagaatcaatcttgtgtcaatttgataaggcaaaatcctctcctgattgattctttccttgatcttagattatttgttattatgtatatttatcttttcctagtttgtaggatcttccaactatatatatactctatataatgagaaacaattacctcaataattattgaggatttcaaccatattttacacgggttctcaaatctttatatggtatcagagtaggttctaattttattttatttttatcctcttcatggttgcatcgtcgtcctcattatcttcacttccactcaacacgatggtgcatatgctcaccatcaaactaacctcctctaattatttgttatggagaaattagtttatccctctgttgacaagccaagatcttcttggatttctggatggtagtgtcccagctccttctccaaaggttattggttttaacggcaccacctaggtgaatctagcctacatctcttggttgactactgatcagactctcctcagtcttctctattattctcttacagaggggtctatgagtgaggtacttggtcttagtcatgcacatgaggcctggaccactcttgaagcctctttttctcacagatccaagactcgagaactccaactcaaggatgatcttcaattgatgtagtgaggcttgaaatccgtagcagaatttttttgactcttaaaagggctctgcgatcaactggcggtaattggtcgtcgcattgacgacttggataaagtccactggttcttgagagccttaggtcccaattataaaattttctcaactacaatgctttcccagcttccattaccttcttttgtagatatcattccaaacgctttgagtcatgagatctttgaacgatcgatgcaccaacaatctatcaactcaacgttctacgctcaacgaaacaattccaccagaccaaaaagcaccaagagcgggaagcccaaaccttccactgcctctacctcaaaatcgccccctcttctcctatttattgtaaaatttgcgacaaagagggccacctggctaaacattgttggacgttccttaatctcaagaaaaagcaatctaccaaccttgctgaggctttcgtagcttgctcaattccggactccaacgaatttgaatggtatccggattctggtgcaacctctcacctgacaaataatcccaagggtgtagatgttcctgctgtctactctggtaatgaacgggtgatggttggtaatggtcagtccctttccatttctcacactgtttccctttccactcttgttccccaaagctctttatttttatgcaatgttttagttgttcctagcattaagaaaaagcttatttccatcagtcaacttgcaaaggataaaaattgttgtgtcattttttctccctctggttttaccatacaggatcgggtcacaagagtagtgttaggggtcggcagatgtgagaatggcttgtatgtgctccatcaaaatcatcatgcccttgcttccatcgtttcttcaaataagtcgtgtgtctctgttcccttgtggcatgctcgactaggccaccctagtttttgtaccattaactctctttctaagtctggttttatttcttttagtaataaattgatgggtttagattcaagtttatgtgttggatgtaaccttggcaatagccattgtttacccttttcacttaataataatcattgtcattttttgtttgattgcttgcactatgatttatggtgcccttcacttgtttgttctcttactagttttcattattatgtagtgttcattgatgattataccagattcagttgacttttcccattaaaacacaaatctggttttttttattcctttatcaattttcaacattatattgagactcaattttcttctaaaattaagtccttccaatgtgatggtggaattgaatttaaaaataataaatttcgctctcaccttacgtcatgtggtattgtgctacgcattgcttgcccctatacatcgagtcaaaatgggattgctgaacataaacaccaacatgtcactgaaacaggtcttaccattatgtttcatgcttgtgttctgttatttctttgggttgaggccttctcaacaactgtttatctcatcaaccgactcccatcacaaactcttgatggcaaaactccctatgagctcctgttcggtaaacaaccaaactactctatgcttcatacttttggatgtttatggtttccttatttatgagattattctcctaacaaattgtctcccaaatcctcatcttgtgtctttttaggttatagccctattcacaagggttttcgctgttttgatcgtaagacacaatgtctttatgtctctcgacatgtccaattttatgaaactatctttccttatgcgggtgatgatatgcaacaaattcataattcaacaccttatattactttctctgattctttcgagtctaacgataatatgtctcttgatttgttgttatcttctcctatttcgaatcctaattgtttgccatgtagtgatgaccttcatgcttcctcccatgcatctctggtcatctctaccattccttcttctagtcctctgtcaccatctgtttccatatcgacgacttctaccaacactaacccaatggttactagaggaaaagctagtatatttaaacctaaggcttatcatgcgttgacactttcacctttgtctcagttttttcaggtcattcttgccatacgagagcctcggggtttcaagtctgcagccaaacaccctaaatggctctcagctatggatgatgaaatacaagctttgaagaagaatgatacttgggatcttgtaccttgccctgtcaatcataatgtggttggttgttgttggatctttaagaccaagctccatgctaatggttccattgagcgtcataaggctcgtctcgtggccaagggcttctcttaaattcatggtcttgattttagagatacattcaatcctgtggtgcgtcctgctactattcggattattctatccattgcagtcacttctggatggcccttacatctattagatgttaagaatgcctttcttcatggtcatctttctgaagaagtatacatggaacaaccacctggctacactgatccacaatttccacaacatgtgtgccgtttgaaacgtgctctctatggactcaaacaaggccctcatgcttggttccaacgattcagctcttttttttttttatgaaacttggttttattctcagtcaggctgattcatctctctttgtccatcataccacagcaggcacaacttatcttttgttctatttgacaatatggtgcttactggcaccagtcctgctttgatcaagactcttatcactcggttatccaaagaatttgcaatgaaagatttgggttctctacactattttcttggtgttgaagtccaacataactctcaaggcttatttcttagccaaaccaagtatgctcttgatttactacaacgtgttgacatgattgaggccaaacccatttctactccttttgttgttggttaacatctctccactacagggaagctattttcggtctcttgcaggagccttgcaatatttgaccatcactcgacctgatctctctttcaatgtcaattctatttgctagtacatgcatgctccaattgaagatcattttcgagcactcaaacgcatattgcgttatgttaaaggcacagtccatcatggtcttcaacttcactgcacctcctctcatgagttgcttgcttattctgacactgattgggctggttgtcctgatacacaacaatctaccagtggctatcttatattctttggccctaatcttgtctcttggtgctctaagaaacaatctactatttctcgctctagtgctgaagctgagtatagatccttagccattactactgctgaagttgcttagattgttcagctccttgatgatctatgtcttctcttgccttcccctccgaagatattatgagacaacagaagtgctctttttatggcggtcaatccaatcactcggtctcgatctaagcacattgcgattaattatcattttgttcgtgaattgatagcaaatggttctttaaaagtcgcatttacttcctcccatcttcaacttgccgattcttttaccaatggcgtctccaagcctcagttcctactttttcgtaacaagcttcatgttattccttctaccacactcaacttgcagggtggtgataaggcagaatcttctcctaattgattcttttcttgatcttagattatttgttattatgtatatttatcttttccttgatcttgtaggatcttccaactatatatacactctatataatgagaaacaattacctcaataattgttgaggatttcagccatatttatatggtcgtctgtctcagttatctataagatagacaagtgtccttattagcaacaggtgaaagaatgggtatgcagatagatccaagccaagttggagagtggtgtcggacacgcgcttgatgaaggaaacattgaggttcttggatataaacacgggtcctaccatcagatctgatgtgacaaccagtatgttgtgtcacaaggaagaaatatttgaaccaatacttctctgcatgaccatgtgaattccaagcatatatactcctcgactgggacgacgttcataatgttgaccacgtgcgaactactttttgaaggtgggaattttgtgaattcatttcagcggccaattttgtgtgtatttgatcagactttgagctatcagttggaatccagcatgactttagttatcggccgctcattcatgatgtgctgggtttgaagcttaataggttggagtatggggcagacctctagcactgctaggtttgcctgacacaggtggacagattgtttatatgctggatcaagtgtgtgccttggaaaatgagatgcttcttaagatacaaaagcaaggacttgatgtcattcctaaaattctcatagttacccgtcttatacctgatgcaaaggggaccacacgcaatcagagacttgaaagaatcagtggtacagaacatacacatattttttgagtgccttttagaacagaaaatagcattctgcggaatcttgttgtatggccatatctggaaacccttgtagaggatgtatcaaatgaaattgctgccgagctacagggagttccagatctgatcattggcaactatagtgatgggaatcttgttgcatctttattatcttataagctgggaattacgcagtgcaatattgctcatgcattggagaaaacaaaatatccagagtctgatatatattggagaaaatttgaggataagtaccatttctcaagccaatttactgctgatctaattgcaatgaacaatgcagattctataatcaccagtacataccaagagattgccggaagcaagaatcatgttggacagtatgagagccacacagccttcactcttccagggctgcactgagttgttcatggcattgatttttttatcccaagtttaatatcatatctccagaagcaggcatgcccatatacttctcatactcagaaaaggaaatggttgacagtcacatgcagaaactcgtccatatggagaacttgaaaatatgcacatattcctttttgatccttgctgccagttttcactcaaccactgaccctttaatttcaaaattcatttcgacaactttaggatatctgtaaaaaatttccaaaacttgtatgactttcttcacttcttgaacttgaatttaaagtttcttttgagttagaaaaccattctggaatagaagatataaacaagtctttaggggggctccattttcacccagttctggacacccgagttctttttgaaaaaataaaataccagacgattttttaaatttgattcaatatttttcctcaattataggcttcttgaaattgatctcagggatataaaatattaaaaaatattccttttttagggagaaatgattttttaaattcgtcactactgtgcatgctggagtctgtacatctgattagatttagtgttttaaaaatatttttgagtattatacgactctaaatttattttttatgtgatatagacactttgaaatatatgtgtcattttttttatgattttatgtgatcatgtattatttttaaaaaatttattcatgcatgtcacttttccttatctaatctggactttgtagaatctttaggtgtctttgtttgtaatctgtcctttgaatgagtgtttggcttttagtatgttgatctagatgtgtaggaattgtctcttgaaattttttcataattaaattccactctaagacatttttttagaaattgttttatgatgcttccttttctaactacatgctgatggttttatactttactcgaaattgttattatttttgaagtcatttgatttatcttagctcaattttggctttgacactgtatattagacataatggatattttatataatttattcttgccctaaccactctagtattttttgaggaattttataaaatatacttgctattcaggtacgttctttatcctctaattccaaaattctatgaaaatgcatgttatcatgagctatatccatgttttgatttaatcattgggtgcttagatgtatgtttgacttgcttggataaaacgcatgttgtgtgctatatctctatactaactttgatgtctcatgatagtgcttgagaggtagtccaggtacgtaccctaactctcctttattgtgatttgatcttgtttggcatgttactttttggaatcacctagcctacttaggtacctataattaaccaattaattaccacatttccctcaacttagttagtagagacctttataaggtttagaggggtgctaccttttagaggtaccttccccataggtaacctgatactcggacctagactcgggttttttcaaagatacgttttttccaaaaattatggagtcactttttaaggttttctttcttgttttatttttcctttaaaataaaaataaaataagtggcaactttgacttttccaaaaattattttttcacaaataaaagcaagtctcgccgatcgagtgggggcacacgtgaaaaatgcgggtccacaccatgcatgcaataagtcgatccaaagatagacatattgttggcaaaatttgttattaatatttattaactacatttttataatagtaccttttatgaatttttatttttatccaaagtctaaatatcaatgttgtgttaggtatatcaaaagagcccattttattacttttatgccatgtgtatacatgtagttaattttatttacaccatacatgcttaaagaaaatggcattgttgtttattgtgagcttattatttattttgcatacaatcaatgcttctgttatatctgccaacataaacaacattccagtgcttaatggcactaactttggaaaatggaaagaacatattgccattttacttgggtgtatggatctagactatgtgatttggattgaacgacctcccactctttactaatgatagtattgtggagcaaaggattaactttgaaaaatgagagcactctaaccgcatgagtcttatgatcatcaagcactttattctagatatcattaggggtgcaatgcttgaggaggaaaatgttaagagtttcctaagctaaatagcagaccgatttgttggataaaaaaaggttgaaatgagcaccactttgtctaagctcgtttcaatgcaatataaaggcaaagggaacataaggaagtacattatggaaatgtctaatcttgttactcaactgagggcactaaagttggagttgtctaatgacattcttatgcatctggtcttgatctctctccctacttgtaagataagttatgatacttagaaggaaaaatggactcttaatgagctcattgctcagtgtgtgtaagaggaaaaaagattaaaataagaaaaaatagaaagtgctcacctagctaccacctctcatgacaatgttgccaataggaaaagaaaaataaataataatagtaaagaaaaagaagcttccgacaatgagacctcacaacctaagatgtaacagaaacaagataaggtcattacttgtttcttttgcaagaaaggtggacatgtgaagaaaaattgtcttaagtatgcaaaatggttcataaaaaaagggtaaacttctcaaccttgtttgttctaaagttaacttagctttaataccaaatcacactaggtggatagatacaggtgcaactactcacataagtgtgacaatgcaggattgtctaaggggccaagtaccaactaatgttgaaagattcatctatatgggaaataacaacaaagctcctgttgaggcgattggtttatttagattgcaattagaatctagttgttatttagatttggatgagatttggacaaatttggttactcttgttcatttggaaatggagaaattagtctttttcaatattcaaatatgattagtataagtcctttggttggtaatctatataaattagatatttatgtctcacatattaatgaatccttacatacaagtaattgtggtataaagcttaaattaactcatgagaattcttccatgttgtggcataaacgtttaggacatatttctaaacaaaggattcaaaggcttgtgtcataaggaattttttattcccttaacttttcaaatttgaaaatatgcattgaattcattaaaggaaaacaaacaaatgttagaaaagttggtgccagtaggacttcgagtgtcttggaattaatacatactaatatttgtggttcactccctatagcttcttggaatggtcaaaagtattttattactttcatagacgattattctcattatgggtacctatacttgattcatgagaagtctcaattgttggacgttttcaaatcctataaagctaaagttgaaaatcaacttggaaagaaaattaaagccattaaatttgatcatggtaatgagtactatggtagatatgatagataaggggaataaggtccaagaccttttgcgagatactcgcaggaatttgacatcgttccttagtacaccatgccaagaactccaaggcaaaatggtgtagctaagagacgaaattgaaccctgaagaatatggtaaaaagtatgacaaatcattattcattaccaaaatgacttagggagaagccttaaagactaaaatttacatatttaatagagtttcaagcaaagtagtagctaaaaccccatatgagttatggactgaaaagaagcttagtattaggcattttcatgtttggggttgtctagctagggttaggccatataggcttaatgaaagaaaattagactcaagaacaatatgttgctactttgttgggtactcagaaaggtcaaggggtttcaagttttataatccctcaaacaagtccttttgaaagacgggtaatgctaaattcattgaggatgttgaatatggtgggagtattggacttaggagctttctctttgaagaggaatatgttattattcctatagttgcaactgaaaatgattaggtagctatgtttaacattattcgggatgcaaatctagaaaatctagatactcctgacttacctcctactcaaactgaagaatccactactgttcatgaggaggaacactaacaacctcaattggaaatgccattaaggaatccactaaagagaggagaacaacgattctagatgattatatcgcgtatctccaagaacatgagtttgatatgtgactagaagatgatccaatatcttttaatcaagccaaacaaagtgtaaactctcataaatggattgaagccatgaaagatgaaataaaatcaatggaacacaatgatgtttgggatcttgtcgaattgcttgaaatagaaaaatcaattggttgtaaatggatttataaaactaagcaggattcaaaaggcaatgttgaaataaatgcgtcatgtctagtcaccaaaggtttcactcaaaaggaagacattgattataaagaaactttctctctaatttcatttaaagactcttttagaatcattatggcacttgtagcccattatgatttggagttacatcaaattgatatgaagaccatgtttctcaaaggtgaaattgaagaaaccatatacatggtgcaaccagagaattttgaaaccaaagaattaacacatttagtatgcaaattaaagaaattcatttatggtttaaagcaagcatctcattaatggtatcggaagtttgatcaagtgattatctcttttggttttaaggaaaacactgtagataaatgtatttatcataaaatcagtgggagtaaatttattcttttggtgttatatgtcaatgatattctactactaagtagtgatatatgcttgttgcatgaaactaagagatttctttcaaacaattttgaaatgaaagatcttggtaatgcatcctttatgttgggcatacaaatttatcgaaatcgttttcatggtattcttagcttatcacaaaaggcatatatttataaagtgcttagtagatttgacatgaaggattgtgcaccaagagatatgcccattgctaagggtgataaattctatttgcttcaatgtccaaggaacgaaattaagaacaaagatatggaaaacatcccttatgcattagcaatagggagtcttatgtatgctcaattttgtaagcgttcgaatgttgcgtacatagttggtatgctttgcagatatttaagtaacctaggaatggttcattggaaggcaacaaaatgggttatgcggtattcacaaagaacaaaatatttcatgctcacatatcagagatctgaatcatttagagatcatagggtatttcgactctaattttgctagtttccatgatagcagatatctagttctggctatgtttttatgttggctaaagaagttgtctcatggaagaatgttaagcaatcactcatagctacttccaccatggaagtggagtttactgcttgttatgaggcatcgaaccaagcaatgtggttgcgaaattttatcattgaattgtgcattgttgatggcattgagagaccattaaggataaattgtgataacaaagctatagaattatattctaagaacaacaaaagcttgtcaaaatcaaagcatattgacttgaagtttctggttgttaagcagagagttcaaagttttcaggtgtctattgaacatactagtataaacttcatgattgcggatccacttaccaaaggtgtaccacctaaagtgtttcatgagcatgtggctcatatgtgtgtggttcatcttggtgatacatatgtatagtgggagtttgttaattgatgtttatttgttaatgacatttttttttatcaaacttaagtattatttttgttttgtttagtgaaaactctgaaataaagttatattctttcaattgcagttttgcatgacgtttgaaagtgtgttgaactcttttgagttataaagttgaaccggttggaaatagacatgatatgggatcacactacatgaaatttctatactacacatccatacttgatttatgtcattgattgtattaatgtagtgatcattgatgggtctagttacaaaatatgtaacgaagatcggattgattctatattggtataattgatggaccaatttattttgagatgcctacagttaagataacaaatcttgagctcactgtttttgtaatgtacaattgtttaaagacatatgtggcccaagtgggagattgttgggtattttggtaattgtgggcttgcatattaactttgtatgttaagctatcttattttagcctaattaaatgtgatcaattaaattaatgatgagcctttaaagtatcatcactctaataaaattataatccaaagctaaaactatcatcactctaataaaataaatccttgtttggtaggcaaaagtctcgaaataatctatatttttcttttatttgtatcatttagtaatcaaccttatcttgtattttgtataaacccatgaattttcaaatttagaccaattcaaatgcccacttgctttgatatgcattctattttttttttttttttagtttaacctattgtactttattttataacgggtttgagctcaagatagtttcggatttagtattcttttgttacaatctttattttttgatattttattataaatatataaataaacatttactagggccattatgagatttctcatatctttcaatagaaatattataaatattgtttggattaagatggtatttcatacctttgaaccacataggtaagcattttgatatgaaatgtaatataattcaaaatatataaattcaataaaataataatatttggattttgtcatgatttggaataaagaaatctcaagtcttcatcaaattgtgttaaaagaaaagatataatcaaaggtataattatatactgtaagaaccaaaatgttaacctcttttccataaaactatgtggggactagttgtgtttgttttctttatgtgtccacttggttagacttcaatctttactttctaattgagtaggattaatgtgttaggacttcacatgtaagttaaactatttttggtcaaattaaattttcgttgttttatgctaattaaaaaaataacaaaaaaagtgaacttatgtttaatatattaataaactatcttttgattctaaagtgaaggcactaacaatgattttgtattaaagaaagtatcctcacttgcactacttttggggtcattgataaataatgaagtatacatagactccaaaagaaaaatctgatcaaagacttcggatggaaaaaaaaatattattcagtccattatttttttcatataattaatgttaaatagtaattattaatttaatcatgactataaatatagaaaatgattattatttagatggcctgaaatggtctccaaatccttatttgaaagaagcctcaccaaattcttttcatacaaattaacatctaatcgtttcaactacaaatatgaaaaagataatcatagcaaattttaaagaagcaaaaagactctcattcatgtatcattaagaccaaaacagtaaaattcaattgatgaaaaataatatcaaaaagaaaaagaaaaaagaaaaaagaaaaagaatatgaaaattcattcatgtatcatgccaaatttacacattttttatatacatacaaaagaaaaagaatatgaaaataaataaaattttaactaatattgtattttttatttatttttatgtatcttccaagataaatataacatgagattttggattcctccatgcttattttcattttaatagaaagttctaccatccaagcaggacttaaatgatatctacacaatatataagacttagaacactaatcatttaggtcttcccatttcatacacgagcaagtctcagattttcacatagaagtgtctcagacttgcttggcaagtagccaaaaaaaattcaagacagtggaagcctgtttgggaatttcctcagaattctgtgaaagaggggatcatcctgaacatatacaggatttctctaagccaaataaatcttttctgattcttatttcttatttacaaatcaattatctgataggccttcaaaaatgtatagaagattttaatttcattaagacctctacattctcagtatatggtgggggtaatttctgatgaaatattacgaaaagctttggtcatgcatgacagtcacagattgatcctcgaacattaggtatcatccacagagctagtactctaaatgctgcaattaactactccatacaacatggaatgtttggccaaagaaaaataaggctatatatatatatatataatactaatcatcattgtcaaaatatgtctagcttaaaagtagagtgcaacttagccgggttgacccaatacaataaggttaattctcataaaacattatcataatttataaaataatatgcaattataaaaaattaaatattaaaaaaaatcatatggttatttcgagtacaacaaattttgagtgcctaaatattaaaaataatatgaaagataaactaacataccattttataagcattacatcattatccattgattcacatttcaaattttagaatttatgaccaatccttttatattataattaaaacataattttagaactttggatgcaacatatatatatatatatcaagtaggtggcacatgcaacttaatcacatagcataaatttcttttatccaatttcatctccttgtacctcaatcctacaaggatatttttggaattacaataaaatcatatccttaaactcaattatatatttttgcccaccttttggattgaatttcacaccttttatggacttgaggcctattatcttctttagctatcctaaagcacaattctcccatgatagaaaggagtgactaatcatattattgcacacttgtgcatggtgtattagtggttaatgaaaatttcttaaattgattttagtggaaatgctatcaacttttggaattctatttttacccttatttttagaacttccacctaagaaatcaaggacttgactaggaaatagagtgcttgactacaatgaacttcccctttcactttaaagatttgattattaaaattaaaaaaaaattgcttttatctaaaccaaaaggcaaacgtaactttttggtttaatatgagtagggacgaaaatatcacgatatatcgtcgatatattgtgtatcggaaggttttgacacgatatatcctggtaatatatcagagagaagaaatttcggtaaatattaccaaaaaatcgtcgatatatcgattggaggcgataaatcatcgatttttttcattaatttgttgtcacgacaaaaaatcgtcaatatttctctaatttattgctgattttttggtgataattttggggaaaaaaaaaataaaacgccctccctctgccccagactacttgccccaataacctatccctttgcccaggctcccccttccacagtcaaatccccaatcacctgctcgggctccattccttgctttgcccatatataagacctcctacaacctatgtccactagggcaattatgccctttgttaatttgtaccaaacgtgtgtatatatatattaaaagtcgacacaaaagaataattttaaaaacaaattaattataattattacaaaaatataaaaattatcatcataatttttttcatagtatttttaatatcattaatagattaattaaatattaaaaattatacacatattatcatttattttatatcatttaatataattaaattaaatggatcataaatttaatattaaatatattttaaaattacatatattataattaaatattataatattattatgaaataatatgtgatataatttaataataaatgtaaacttataaaatacatattttttatcgatgcacataatattattatcaaatataataatcatatatacatatattaaattctttaataaagtaactttaaaatatttattatacttctaattatatttcaatgagatttttttagattttcatgaattttaatcaattttaggtttatcaatatatttttttcaaaatatccgtcgatatatctctgatatatccttaaaattgaagtatcgatatatccatgattactgatattttcatccttcgttatgataaattttagcaagaaaagttgtagcatgcaagttccctttgaaaggacaccacaattaatgtgatggaatttggaacaagaaaagtcttctttgggtttccaagaagttttccagagtgaatcatttgcatataaattggtgtgtactcatcaccatttctctcatctctccactctcaattgctttaggaagaatgatgtctaaatcgctcctcctcttctcttctcttttcttcatctcctgttttccgcttctttcctcctctttctctttctctaattcaaccaaactgtgcccgtatcaccaaacccttgctttgctccaccttaagcaatcattctctatcaacaattctagttcttcgga

SEQ ID NO: 10483 - DNA, 1243 bp, Vitis vinifera
  Intron number 3 from transcript GSVIVT01004849001 (locus G SVIVG01004849001) derived from phytozome v7.0 (chr-ID chr7 _random; pos 35291 to 36533 reverse strand)
gacaagttgtgttgctttaattctcaggtgaggaaatactacacccttcttgcggtgtttaatttatttatcttttttgtttcttgcttagtcttatttttttggggttgtgcaaatttgcccccgtttagagatgggtcaattttgcatagttgctgttttgaagccccttctccttctgggcgtgtttgataagagggattttgggtgtggataggggattctgggctcctgaaacttctttcctttgcttgactgggaaacaataaaaagtgaaattgaatttaagggcttcaatggccaaaatccttgcttcatatttccagtgtattaggtttccacacgtcttcgtgcaatttccagcagttccactatgaccaaccctgccaccaccacaacgacctccatcccctcactgctgccgtagccatttcatcatcaccatgacataccaatacaacctctattgacagcattgctgcaggtacctgttgcaattgttcgacgtgtactcatccaaatagtgaagtcccaatttggtggatttgtcattctgcggttatctgatcttcaactcctctgaacaaattcttaacacttattgagttgggtgtaggaagtgaacttctatttaggttgaagcaaacatttggtgttctgatgaaagctgttaaatttgggggctggtcttttgattattattattattattattattattattattattttgagttctacgtggatttctaggcaccttagttcattgcttcagaatgacgtagatttttggggggtttatctgctaattctatatcattgttgattgggctctcaaaagaaattgtctttctctgtgggagtcaagtttcaaaagcctctatccccagtcaactggtgatatactaatggccacactgtggttgcatccattattgcctcagacaaaataacaaagcaaaatttttatctttttgttttctggttttcccatttttcctcggtagatttaggtggtcgctttcattttggacttttagtaataaaaagtgtgtttccatatccattgcacgcctttcatatcctagcgtacataggttgtgcctcccttttgttaaactcttatctggatactaacacttgcatatcaaaaaatgaaattttgaatctgtttttgtgccatctagtttcatgaactgtgtgagatttttacaatattaaatgtatttttttcttcttcagc

SEQ ID NO: 10484 - DNA, 1948 bp, Vitis vinifera
  Intron number 15 from transcript GSVIVT01035727001 (locus GSVIVG01035727001) derived from phytozome v7.0 (chr-ID chr 4; pos 3710090 to 3712037 reverse strand)
tggaggtggcctcacttcgtggaacaatacagagggtaagttgtcatatggactttcttgactttattgtttaaagatcatcttcttattctcccctgcctcccatttgccctcacattcagaacaaccacaatgaaaaagtaaaacaagatcttaggaggaaaagaaagcaatgcctactgatttggggattggtttgagtagggcatggtgttcaaagtctaactcacattgtctgaggctggatattatagcttgctgtaattatttttgcattatacttcagcccaaaacttaattgatgaaattgtaaataattttttcctggacgctgaaaatagattatggtgacttggtgatttgggttcaccacttactattaattatatgttgtttacagttgaacccaagctcctaattcaagggttttcaattagtggcatggtttgggaatattgggtgttgacaaccataagtataactgaaaacattagggatcttgaaaaagtattcagttgctttgaaaaggggagttaatttgagataaaggcattaaagggtaaagagaaaggatgctaatgatatggatagaatttatagttagtgtgaaaggtttctaagttttatagtctgtactttacctaatgcatggtttatgactggttgagtggtaagagacagagacgatggaccttttgggaccactgttccacaagttcaataagtgccttttttttgggtgtccctatttcttttttgtgatgacataaatgattcaggttctcagagaagtggtgtagaagtgtgtaccctagtcaaagggtggtcacatttttacaaagtaacatttagagaaataagatccaaagaatgcaccatgaagaatttcttcacatgactaccaaaaagaaagtgaacagacttaaatctagcacttactccaagaagcctcatgaatctggaaaatgtgattctagttttctttctgaatagatcacagtataattgaatttaaaataacacttaaactgaatcacaatctgatggttaagtgaatagcaatagaattgcaatctgatggttaagtgtaatttgtctgaagtggctatcctaactgttagatgaccaattttcctaaaaacttgtttttttgataggtaatttttttgtccccattgggacttgaacctggaatgtcccgcacaattttcctaaaaaattttaacttgtaggatttgggtccacaatgtataccatattctttaacacttgccttcacgtgcaaccctatatccacatgtggagagagacatatgtccgtaagcaaacaaatacaattatgggcttacatgcgggctcaataaattagggaaataaatattatacagtgaggcttgagcacatgaccacttgccaaacaaggctttgataccatgttagacaaccaattttcctaaaagcttgagtttgtagaatttgggtccacaatgtatatcatgctctttgatgctaacaaacaaatcaacttcaaatggagctgaagatctccaaataacaagtacaaagggccttctctgtggactggaagccctcttgagattccttgttccttggtgcttatcagagaaaaaactgaaccaagttttgtgaactaagccatcatccttcctcacctcctgtgacggcttcaatctatagcagtttctattgtgcacattctgttaatgctaagatgtttctgctctttactttatcatatgtgattaatcactcattacataaaggttatttaacactgcagatgtaatatattttaagccttatgatggtctcttatgtttaatagttggtgattgtctatggtggtttaaattttaaatttactcaggtgatagttgcttgtttactttcaggcagaacttcaactgaacattcagaaaagaagggg

SEQ ID NO: 10485 - DNA, 8172 bp, Vitis vinifera
  Intron number 6 from transcript GSVIVT01032444001 (locus G SVIVG01032444001) derived from phytozome v7.0 (chr-ID chr1 4; pos 27464337 to 27472508)
acgcctttgctgctgcactgagggcattccttctagtaggtcttttgcattgtaaatcatttgattttcttatgttgtgtatggttcaaaatgtgttatttcctttaacacgtagttggaatgattgctattctcaacaaatatttgtttgattgttgttcaagaagtggaccatcttatctgtggaaagtgaaaataattaggtctgatttatttttgctgaatataccattatttatatatatatttatgattcatacaccagctaaaagtgaaggggaaagtaaaggaaactttaacgggttttaaaatttctaaaaagaaacaatatctttgagcatgcattcagcacttgttgactcactgagcatcaattttacatggcaaactaatctatcagttccccatagcatgagattagtaactgcagaattactaaacccaccaaaaaataagttgaaaagacttatgagcacccaaggtcctgcaaaaaaataaaataaaatcggcataaacacctccaagattgaaatcattctataatcatatctttattgagactagttggtctgggaagcgtatggccagttatgctgcattacttagaaattcattgccctgaaatattcttaaattattatattgtaccatttccttaggtgcttttttcctattcacagggatgtttggtattgatttcttattaatgtcaagaacattggttgttttgaactgactataattttagttttgtagaagatatcttcctttgtttggagaatgttatgttgttggttgagtttctatttgttaaaacagcaagtatattattgtttttacaatgcaaaacagttatagtagatttgtggctgccagcccacaattactcacaaattattatggtacagaacaacattgaagtagtagcattgtttcatatttatgttcatttgatgccttttagtccccaatgtaaaaaaattcatttcattttttgaacatagaaaccctgttagttgtatgttgttatgttcatgagttcatcctatagggtatgatttaagtctatccaagatcctcattcacggttgtcaaaatgagtattgcgttattgatgtctatatttcttgtattgtttcatatcaataagatacacctaatatttcagtaaagagaaaaacaaaatgcttttctcctattcacagggatgtttgatattgattgcttattaatgtcaagaacattggttattttgaattgactataattttagttttgtagaagacatcttcctttgtttggagaatgttatgttgttggttgtgtttctatttatttaaatggcaattatatcattgtttttacaatgcaaaacagttatagtagatttgtggctaccagccaacaattattcacaaattattatggtgcagaacaacattgaagtagtagcattgtttcatatttatgttcatttgatgctttttagtccccaaggtaaaaaaattcatttcattttttgaacatagaaaacctgttagttgtatgttgttatgttcatgagttcatcccgtagggtacaatttaagtctatccaagacccttattcacaattgtcaaaatgagtagtgcattatttgtgtctctatttcttgtattgtttcatatcaataagatacacatgttttagtaaagagaaaaacaaaataagaagatacattgaacatatgtaaatgagtttagaggatgacacatagcaacttgtaaccacttacaggaaacatttagtgattgagatgtttatatttaatactgaagaatttctgaattcctttattgataatttaggtacacaccatacacatatatatacacaaatgactgaataagaaaatatcaatctagcttgattctctcctaaaattaggaaactgaatcatcctaaatgatctctccttttttattcctataaaactttcctaaattaaaacccctaactttgaatgccaaatttcaacactccccctcaagctggagaatatatatcatataatcccagcttgcaagttaagtcttcgaagttaggcctaggtaaagctttggtgaggatgtctgcggtttggtgcttggtaggaacatagttcaatttaaccgtctcactagtcaccttctctgtgatgaagtgtctgtcaatctcaacatgcttagtcctgtcatgatgcacggggttctttgctatgcttatagctgcctgattatcacacatcatcagaattggagatgaactcgtttgtcccagttcactaagaaccctttttatccaaatccattcacagattccctgtgcaagagctctgtactcagcttctgcactacttctggctacaactgattgcttcttactcctctaggtaacaagatttccccagacaaaagaacaatatccagaagtggaccgcctgtcaatgatgtttcctgcccaatccgcatctgagtatacttcagtgtcacggttctctgtctttctgaagaatagacctttccctggtgtcatttttaaatatctaagaatcctgtagactgcttccatgtgttcctcagtggggctgtgcatgaattgacttacagcactcactgcaaagccaatatctggccgagtgtgtgagagataaatcaagcgcccgacaagccgctgatatctccccttgtctacaggtgtactttctttctcgataccaagtttcttctgactatccataggagtatcaattggtttgcatccaagcataccggtctccttaagaagatcgagtatgtattttctttgagagactacaattcccttccttgatctagccacttccataccaaggaaatatttcaaatttccaaggtctttaacttcaaactcttctgacaaatacttcttcaacttctgtaattcctccatagcattcccagatagaataatatcatcgacatagactatcaatatggccattttcccggcatgagacttcttgacaaatagagtatgatcagcctgaccttgtttgtagcccagcttcaggactgcttttgtgaatctatcaaaccaggcttggggagattgtttaaggccgtacaaggatttttggagtttgcaaacctgattctttgccatactttcttcgaaaccaggtggtatttccatgtagacttcctcttctaggtcaccatttagaaacgcattttttatgtccagttgttgcaagcaccaatcttgattgacagccaatgagagaagaatcctgatagtgttcagttttgcaacaggagcaaaaatctcctgatagtctatcccataggattgtgtaaaccctctagctaccaaacgagccttgaatctctcgactgatccatctgctttgtattttatggtgaaaatccacttgcaccccacgggcctcttcccaaccggcaaatctgtgatagtccacgtcccattcttctcaagtgcatcaatctcatcttgtactgccttcttccattttgaaattttgaatgcctcttgtattgtgttgggaacctgagtatcatcaagagaagtagcaaatgctctgtaagatggtgatagcccttcatacgtaacataattcccaattggatgatctgtacatctcctaacacccttcctcaatgcaatcggcagagtagaatcatcaatgctgggaattaacacctcttcagccctatcctcacctatgttctcttcaggaagacttgaattggagtcaatatattggccacatgttgactgtgatccgtgctctaattcctgtcttttcctcctcctgatgtaaacttgtaagttctcattagcaagttgtggggctatagcttgaataggcatgggagactggatggtcatgggagaaggaacatttgtgtgttgggctggctggactgatgacggcatgggtgtggacaactcagtgggcgcgaattgggaaggatttggtgactttgagtgaaaagaaggtacaccctcaagaagagactcccaaacttgatgttcattcatgctctccccctgaacatgagatttgggatagaagaagacatgttcaaagaaagagacgtccatggtggtgtaaaatcttttgttggttggagaatagcatttgtaccctttttgggttggaaaataccctaggaaaatgcacttatttgctcgaggagcaaatttgctacgattttgaggatacacatgaacgaatgccgtgcaaccaaatactttgagtggtaaatcagaagaggctgcacgggtgtgaggaaattgttcaagaaaagttgacgtggggattgaaaggtaagcactctggatggcatacggtcaatcaaataggtagctgtgagaatagcttccccccagaaatagtttggaacattagaggaaaatataaggcaccgggcaacctccaagagatgtctattcttgcgttcagccaccccattttgttgtggggtgtcaacgcaagaacttatgtggataatgccgtgattttgaagataagtactgagactactagtaaagtattcctttgcattatctgacttgaggacttgaattttggaattgaattgattttgaaccataagattgaaggtttgaaaaatgtgcccgacctctgacttttctttcataaggaaaacccatgttacccgtgtatgatcatcaacgaatgtcacaaaccatcgagtgccagacatattttttatccgagagggaccccacacatcactatgtaccagagagaaaacagtcgaaggtttgtatgggatttgaggatatactgttcgagtatgctttgcaagctgacaaatttcacagtgataagatgctggatttttattgataaataatttgggaaacaatttttcaaggtaaacaaagctaggatgaccaaggcgatagtgtaacattataatctcactatctttattgaccttagaatttgacacagaattgaaagactctaacatactctgagactgtacgcaacttgcttgagagacttggtttgagaattggccacatgagaggaggtagagcccggaacacagttcagcactgccaatcatcttccccgatttcaagtcctgaaaaacacacgagtttggatagaatttagtaacacattggagatcacggaccaatttgctaatggacaaaagattacaatccaagtttggaacatggaggacagagtcaagatataagtctttagtaagttttatagaacctgtcccgacaatttttgactttgaaccattagcaatatggacggatgaatgaccattacttggcttgtaattttgaagaatggcagcatctcctgtcatgtgatcagaagcacctgtgtccactatccacgggttcattcctcctcgattagcagtgagggttatcctggtagtactgccactgccaacttggcttaatagtttctgtagcatctccatctgctctttgttgaatggactcggctcgggaacagatgtgctctcagagttggcagccacgtgtgctctgccatctctgtcagactgtggctttggtttccagtcagccggtttgccatgaagcttccagcaagcctccttataatggcctggtttcttacaataatcacaccaaggcctatcccgtttctgacgatctccaccactactattaaatgaccgagcagcaagggcagaggcattcaatgttggggcaggttgctctttggatcccatcatcactttctttctactttcttcacgcctaacctctgaaaaagcctccctgagacttggaaggggtttaatgcccatgattcggcctctaacatcatccaattccctgtttagtcctaggaaaaacttgaacagtctcttttgttccacaattttcctgtatgttgctgcatcatccgaacatttccatgagtgagtctcgaataagtcaagttgctgccaataccttgtgagtgtgttgtaatactgagtaactgactgctctccttggcggaagtcatgtaaggctgattcaatctgaaaaagttctgaagtattttcagaacttgagtaagtttctttggctgcatcccagatgtcctttgcagtcctaaacagcaaaaatttttcacctatgtcattgttcatggaattgataagccatgacatgatcatgctgttttcaatcttccacttcctgaaacccggttctgtagtttctggcatggctgcttctccagtgaggtactcatcctttcctttaccgcaaatgaacagcaacacagattgtgaccattgtaaatagttatggccatttaatttgtgtcctgtgatgagaataggagaggaatcactgccactaaggtttggaatttcagatctgccccctgattctggtgacgtgacgctggatacttgtgatgatgccattccgtattttgtcatggaccggaaaggtagaagaacacttcccaaggcacgtgcagggattggagttgagaaaaaatagccggaggacgccggaaaaactgatcggagggcccgcggaggcaaaagaaccccaaaagaggcacgtgcagggctcggatggcagaaacaggtaagaagggtggccggtcggcgtcaggcgagcctggaggaggaagcgtgtccccggaaagtggctcacgcgccctcatgcgccggcgcgtgagatgcagtcgcaggccggaaaattgcgcgtggtcggcgtgtggatggttttctggctccggtgctttgggaaaaattggagatctcctccaggcggtccttgcggtgtagaaaaaatcgtcgccggcggtgaatattatctgacgacgattcaaccgaccggaaaacgttttctcccttggctctgagaacagggactgataaccggaatgagagatgaccagagagagatggtcggattgagagatggccagagagatttggccggaatgaatgatggcctgaataagaggtggccagaagggattagggtttcagaaacctggctctgataccatgaagaatttctgaattcctttattgataatttaggtacacaccatacacatatatatacacaaatgactgaataagaaaatatcaatctagcttgattctctcctaaaattaggaaactgaatcatcctaaatgatctctccttttttgttcctataaaactttcctaaattaaaaaccctaactttgaatgccaaatttcaacaaataccaataaacaaagtgaaggttagtcgaggttaacattttgctgcattgatttgtaactgtagacaaactagaaatgtcataaaataatgatttgttctcaataaaaaatgaaccatgtctaagtagaattgccaattttcatagctctactctataatttttataatgcattaaatgttgattaagtttcaagttccaacttttaagttcattaaatttcatcatcaatgtcaaagtccaggtaggttcaactttttaaaggaaaatctttcctcggttgtcatgtagagagaattttgaaatcttgcatcattgaaatatggtgtaaagaaaagttttttttccccttatgtatttatattgataatatgaaaacaagatgcaaaagaagatatcttgataattgtcaccaaaaatctgaaacaacgtgtagatttttaattttggaaagaagttttcaattgctttccctcaacccccctctctaaaactgttaaaatagtcaaaattatgaacatattgttttaacctacttatcatgtacagcaaacaaaagaaaaatctttgaaaactttctccagaggtggatctaaagcaacatgtagctttctttactgaaagaaactttagattggttatatcatattatgtggagtgtgttactcaaagaaaaagatatgttcatgtgaagtgtatcattttatgccaatatgttatagtattgcatgatttgtatcatatttattctgtgtgatattagcaactacttttataaattttattgatttcttcatgcaagtccttgtggggagggctgtgcgattgccaggcaatgcctttttgctcttacattattgaagtggttttcctcctttgatcaggattatcaggcc

SEQ ID NO: 10486 - DNA, 1205 bp, Vitis vinifera
  Intron number 1 from transcript GSVIVT01005935001 (locus G SVIVG01005935001) derived from phytozome v7.0 (chr-ID chrU n; pos 22847803 to 22849007)
cctcgaagtttcagaaattgaaggacaaagtcaaggtttcgatttcactcacatttcattcttcttgtaaattgttgctggaattatagcttttgtagttgaggactggtaattggagtggttcgaactgattttgtttattgataacaatgtggctcgattgtcttgtgcccttcggtgataattggattgaaatttatcatagtcttcaaaattttgggaaaatgtcccgacattgtgatttgagatggtcggcggaaggttagtacttgagattgtaacttatgtgaaggtaattgtggtgcgagctgaagatgttatcgatgatctagtatgtttgaatttaaattaaaaggttggtttaaaaacatttccagattttatacataaagagtaggagagttcacaattttccatgtctatactgtcatggtaactgcttggattctgataaaaaaaaagtggtaactggttggctgtgtggaaatggaaaaatacatgattcaatgggagcaccaatttttaatttttttaattataaaatttgatttctttatggtggaattgaggtttagttgcataaattatgaatggttaaattttgtgcttttttccaaaaatctgttgatgatcagcctcaaataaaaatagggctatatttgctttctgacagtcttcttgatgcataaattagtacttgttcacactgaataaataactattctatgaaattgcactgaaaacacacttgagaaattaactattgctttattattgtcatggtaaaatggaacttgttagggcaagatttgaaggacatgttaaaaaaattgcaatctgaatgaagagagtgtttatgtaaacacaaatatacaggagaaaaaaatgagggcatagaaaaataagtgagttttctggcctgtctttagcaagttttctggccttcatcaagggcatttcctagggttggactggaattacttgtatgatgagtaacgaagatttcatgtttcttataactctgatatcttgttatgtagttcaagaaccaagtggtaaaagtgtcttttgaagatctaattctggtttctttaagaaaagtcattttatctggtttaattgccaaatggatatggttatcacattatcctgttattttatgtcatacagcttgctagagaagattatttggagttgagacaaga

SEQ ID NO: 10487 - DNA, 3654 bp, Vitis vinifera
  Intron number 1 from transcript GSVIVT01033150001 (locus G SVIVG01033150001) derived from phytozome v7.0 (chr-ID chr4 ; pos 8478266 to 8481919 reverse strand)
caataggaaaattgatttctttttatttttcttttgtacaacacaaattgacctctaaataataaacatggaattgagaagtcaatgcctttgaattctagtattgtggtgcagcaagaatatttgaataagaagtccagatgatggagcatatggtcttccaaacatacgaatttgagataactggaggcaaagccacggcatgacgtctggaattgaatttgaattcctttctcaagaagaaattgaacagaagcttaatttagtgttggaaggaagttgcaggtctcatattatgagatgcaggggcattgactcattgttagagtataaatcaatacttagcttagttaattttaacctaaaaaagtataggaaaatgaaggaagaggatgatgggcaattttctttctattttttttcttttcatgtttttgcaggaaagtggaggaaattttgagaaaaatatgtttttgcaggtctcttctctttcttctcatttccctttttcttttagtttttcttcccattttggtggtcggtcccattttttttagctccattttttttctttcccactcaccacacctcagagagcacacaccaaccgacccttttttttttctccattttcttctcccaaccgctcttcctctttttcctccacattgccccacaaccttctctccctcttatcttctcccattatttttgcgcacatttctactcttccttttctttttcttttttatttatttatttaatttttgttttccaaaaatctatcactccttattgccactgacaggaccaccgaccaatcatcttcgtccagccactactagccggtgaccatctccctcatctcccacttttctcccattttctttttttcctacaacactcaaatcggctctaaaacgcgagttaaaatttttatttttattattgtttgatttagtggtttggatgttttaagtttgcttaatttatttagttatttatttattaaattgtatttgattttaattgtaaattgggattagtataaatcaggttttattttgattgtggatttaaatttgcatattaaattaggttggaattatgggatattaagtttaggcctaatgaaattgattttaatttatcatattttgggtttgattaattgaacttatactttggttattaatttgaaaattttgaatagggctatgacatatgagatatttttgttggagtatatattgataatttggactcattttgattaatgaaatttattagattaatttgaagtttgaatttggacttgaatatttgttttgaactttgtgtaattctggatatttacatttggactatttttgtttttgtatggacccattctataattttattggctgagtatggattcatgacatgtgaagtatgacatgtggagtatgaaatttcatgaaagaaagtaagactcgaaaaattgtaggaagatattaagattgttgtaagcttattgggtatacattttatttcctactactattttgttttatttttattggtttctataaatatttgtttatatatacttacttgttgtgtacataattgaatatcgaacaaataagaaattttatttgaataagaggaacaattcagtaaacatgttttaacaaaataatagtttagaaaatattattcttaataaaataaagttttttattaataaaaatttagaaaaattcttttagaaaaatcgaaaaaaattgtttttaatagaatttgaaattttattttttaataataattgtccaaaattttctttgtttaataaaaattgtccaaaaatcgttttgtaaataaagttgtcccaaaaattaatttttaataaaattgtcaaaaaaaatgtttttttttaaaataaattattttttcttaattaaaatgggattaaaagtaatttttaaaaataggggatttaattttttctttttaattattattattattagtattattattattttgcaaataaagtttttttttaatttgtataagtcacttttcttaaatgaaaataaatcaaaataccttttaaataaaattgtaaaaatttattcatttttagtaaaagtaagtaaaaataatttttatgcccaaattgaaattttgtaataaattcttttcatacaataagtgtaaataacttttttgaaaattgaatacaaataaaattgagaaaataaattgactctttttggtaaataaataaattgaaatcattaattcaaaattgtttttaataaaatcctttaaaatttctcgagaactaattcttttgaattttttattttattttatttagttcaataaatcattttgcatcattctcttgtcatttattttgtgaattcttgtaattagattttatcccaatttttgtgtattaatttgttcttttaatcttaatatacattattaattaattaattgtcacaattctcttgattcgtttagtagagatagtaggtatacaagtttagaggggtgctacagctcaccattatattttctcaataggtaacctgactccaaattcagacttgatttttgcagacatgttttttttcaaataagaagtcacacagagtttttttttcttattttattttcactttaaaaaataaaacaaaaataaatggtgactccaagtttttttctaaaaatcaaaatttcacaaataaataaaaaacgagtttcgtcatcgagtggggatgcataagaaaaatgcgggtctacaaatatatttaaaaaataaaacaaaaataatggtgactccaagtctttttctaaaaatcaaaatttcacaaataaataaaaaacgagtttcgtcatcgagtggggatgcataagaaaaatgcgggtctacaaatatatatatgatggtgtctatgtgtgtgatatgatctatttaattaatctcgctttccaatgtatgtttattcaacattataatgagatttgcaagtaataagtcttaaaaatgttaaaaacgttttttaaaatcactttcaaatacactcttaataataatagtgtgaaaaaatagttattaaaagatttattaaaatcatcattttgtttcctaaatgtttttttttcaccactatgtgggttttatacacattgaggttcatatttttaagtaacaatacacttggatgagatgtaaagcaattcatattaaatccatctattaatatatctggtcttaaatacaatatgatcaagttcaggaaaggaatttccaagtcatgtcaaatccacatagaagagtttttatgggttaaaaaataaaaagagtaaatgaaatgattattttaataccataaaatataaattatattacaaagtaagaagttaattaaaaactaaatatctctcaaaacatagaatatatcgacagcagtttccttgcatgctgtcgataaagagacgagagtccagttgggcgtccttctcaagttgactgcagagtagtcctgattccagctggcttctggtttcaaaattcaaaattctaagtcctataaataatctcttagtttctctccaatattatgactaccatagcttccaacgagttcaaag

SEQ ID NO: 10488 - DNA, 2207 bp, Vitis vinifera
  Intron number 4 from transcript GSVIVT01010755001 (locus G SVIVG01010755001) derived from phytozome v7.0 (chr-ID chr5 ; pos 22213832 to 22216038)
cagataatcttctctctctgcttcaggaccaggtatgaggtgcctcttgtttcattagtgccccttttctgaaaatcattgcaatgaaaatgaattgttatattttgtatgttacatttaagtgaagtttgaattttcaaccaagaaatggatggtcctaaaattgatttatggactgatctaagatttgtatagaaaaataaaatttgagggggcgggggggtgggggtggtttggtttgtgtggtttgcgtagaggtgtctgagattgaagttgtctgggcagttgagaaagagggatgtttgttgatggcgggttatccacatgatacaggtgattaggaaggaaacttgtaaatctcattcatacgaaggcttggaatagtttatggttaataatgcaagtcttaattgtcaagatatgttctatgatgatattctataaccggaaacaggcatacaagcaggtcagctggtcacgtcacttctttggtctgctctggtcaggaacacaatcaaaggaagaggcaaaaagctcgagtacggtcgctggtctattgtatgtagtgaacagggcccagcgcaagcaagctattttataacctctctcttgtccagcaagcaatcgccatctcctactgaaagaactggattgtactagtattgataagtagattcgggatgggaatagagaatgcattttttcccttagagcacatcgttactttagagtctgttttatgaactgccaaatgtgtggataatcatgctcaaatgaaggcatgtaggtggttgatgctttgaagcagagtggctaagtgatcaagtgctagacagctagagtgctagtgtgccagattagaattccataaaactgctgcagcttagaattcagaaggaactgttagcatggacacattattattttacaatcaaaataagagtatgaactgacctttacttgacctataaccatagtgtgagcatgaagttatagaataaatctgatattatattcaatagcaattcagacaaccaatttagttggacaaatatgatagttattggaacacaaataccatgaacaaatgtcttgctcctttttctcatgttcttaaagaattctgattgcaatgtgaagcacaagttgtggtaaagcacagaagatatgagaataggtggcatcaaaaaatcacaggaggtttagaacttgaagaatggcatgttatgacactgcacaaatctgcagctgttcatatgtgattccaatataatcttgagctcttatcacatgagatacatatcatgttttgatggttgttgtcttaacttttctttctctttattgattcttagatattccactggcaatcctaattgagaacttgatctttggcagagttggagacttatctctcctaagttaatttcatgataaaacataatctctcttgagtcttaagaatttgatttggagtttgtttcatgcttaatgacttgatctggaaatgaaaatttatagttttctggactatcattctgcatttttaaaaatttgttagggatactttgtttaagaaaagttgtaccccaatttaccttttaatattagtatcgattgtacaaaaaaaaaaaaaaaaccttgtttgtttgattgatatgattgttttgacttattttttccgtttttatgtacttactttttaatctttatttgaagtatttagtgcatgtttttgcttgtcgtagttaacctgacactgagactttaacgagacgcgtcctgttatgtaaaatcattgttaaagctttattatcatcttaattaatagattatttctgttctaatgcattagatggaatgctttcagtttttttaatgactaaagctgctagataacctttcatggaaaatttgtaaaccaagagttgaatttagaattttcttgacataattttcgtgcactgcttaggtgtagcatgtggcacccactaattattatttaaataaggatgattctttgcctaacatcttgttcttttatagaatgaatggctttttctgataccggaatttgtcctcagaaacattttgcttgtagcatgctgtcctacggataggccaatttgataattttctttcttcctgttgctcttttgttctttacatatttattcaatcaatgaatttctatatattttaggcaa

SEQ ID NO: 10489 - DNA, 3519 bp, Vitis vinifera
  Intron number 1 from transcript GSVIVT01035890001 (locus G SVIVG01035890001) derived from phytozome v7.0 (chr-ID chr4 ; pos 5386868 to 5390386 reverse strand)
cggcttctgtcgacgaacttctcccgctgcttgacgtaagccctaatctttttggtttttctggattttttgtttgatgtggtggtggcgggttggcacgtcgatggttcgtgattggtggtttttatctcgttgattgtttttcctccaggggtttgccaaatctttagcattgaatcttgtgacgtgggggttcctttaatcgtgtttttgtgcattgcatgctgtttctataataggtgtttgcatgttctcatatgctgggtctcgccggtgttttggttttctaatttttttttacctgagtgagtcaacaatggccaatttccgagtttcgaagaattactttttatgacgagatcttgtgatttatccataatatgtgtttggacagagtgttttggaacttaattttagcggtttgttttttctcccttgataagtgtgcattgctgcaggtttttatatgaacgtttttggtgtttggatcagctgggaaattgtccatgttcttagaaagagttcactcttctcggaaatgcatttttttatgttacttttaaaatgatacctcttttgcatgagatgatatccctcatctttctacaattattaaatttaaatgttgttcagaaatgattcatattgatgatttttaatttagtaactgatttgacaattagcggcgaagactatatttcaaaatgagttaactttgatatccattgatattgtgttggaaactgtggattcgggaggaaagaaagcatgttgaattttggatttcaccatctcctgttttgatcaggcaaacgtatgggggaaaaggaaatgggaataggagaggctttcatgaaggagacttttctctcctagatgattcataggatatgacattgttgtaacagaaagtttcttgctttacacattgttttcactgcagacagtggcagaatgtgttatttcgcatatttctgccttgattttttttatattcatttccagacatggacaaaagtaaacaaagttatttattttccgtatgttatcttatatcttatttaattttttctttcataatcatagttgcaaataaaggttaggaaaacacttaattgaaaagggcttgcaatgatttcatgctttaaaaggctattgaggcttacgcctcgaggcgtgtctcaaggcaagactccacaaattagccttgaggctatagcctcagttagggtaattaaggcttaaaccttacctagtcgaggcttatagctttgaggctatcgcctcaaggctattgaggcctaagcctcaaatatccaaagggttttcagcctttatatgcttttggtatatattttataagagtcttaagtctcaatattcaatgagttttaacgggttctatcatctattgcttttgttaacttcttatataaatttcatgaattttgtattagatcccttctttgttaaaccttttacaaaataagggctcacttagcctgctagggtagcctagttggtcaggacgaatgttgggaggtgtggtcctaataagaggcacatggtcccaggttcaaatcctgctattgatgataccttgatttatctggtgttggttgttgtgggtgtggttagcaccccgaggtttgggtccccatggagagtcctaagggctcacgtgactttcaattaacgttttaaatggaagggaaaaagagagattgggaaaaataggagaattgctgattgtcctagtggttaaaaaaagataccactacaattggtagacaaagaagaagaatgagtggatattaacaccattggggaggataatatagcaattggatatgattatatttcttagaggatcctagtgatagtaataataatgttgaaaattatttggtaaaaccatgtgagatagctaaattttatgttagaaaaaggaactaaattagaactattaacaatgaaaaataattaattttatcattatgaagtttatgtttttttaattatttaattttactgtgactttatgagtatttttttattttttgagaattatttatttatttaagttgaggcttaagcctcattcaatctcgaggtttaggcttcacctcatttaggcaaaacacctcaagaccacctttagccttttaaaacattagattttcataaaccttatatttttctttctattttattttgaaagaatacatgaggaaagcctggaggtgggaagagtgtacccaatgcgagccacatgattaaggatttaagtccctgaggatgagcccagtggaatttgagatacttccgtgcaaacatatttttattttatcttcctgactttacaattgatatcgatgtacaatggaaatatgttcatttgaagtctgaacacatttaaaagaaaatatgcttcattcttattcaaaatggactttgtgatggttgatgattgaccaggtgctattccaaatctggatattttttactttattttattgaactttagtaaaacatttttcattaaaatctaagggaaatttgttgcaagtctgggattttgaactagtttagagatctcctgccctacaagggcattgttgttttttgaatgagctgatcatttattcatattttatattcttgaaaataaaagatttagtagcttcacttgtctcttttaatgccagagtgtcgtttctttttggtaaattatgatacttataatttgtgatttcgaccaagattggctgaactggatcttatagtgatcttaagctttatcatcactagcaggccttctctaattgtgtttctctctttgttgcttaataagttttgactgttaagttttacataggcggttgacttactgcaacccttctcctttatctggatttggaccaactattgaagctaggatattaactgtagttaggattaagactttgttgaattgagttttattttctgtgtgtgcatttttcttccttcgtagatctattgaattctgtacatcatcatgtgccataccagaaatgaagtcctcgcataattgcatatgcataaatgtatggctgtctccattactaatttggattcttcgccaaataaagtgaagtacaagtaaatttaaaaaggccatggccgagaacatcacttatgtacttgttgaactacaaatggtgtttgtttcagatatggtctcttttcccttatttctgatattctaggtatgccactaatgctttaaatatcattgccaaatcaacaatgagacaatatgcaactattgggctgtcaacctattgaactttagatgcttctttgtccattggtcacacccctagcttgttgtgagaatgttaattttgttatattttttgattgaaggatggttgaatttacatcttattgttttttatcaaggtattttattaatattgtcattggtttgttcttgtagcaagttgagaattgtcttttaaaggtggaacagtc

SEQ ID NO: 10490 - DNA, 11615 bp, Vitis vinifera
  Intron number 2 from transcript GSVIVT01033755001 (locus G SVIVG01033755001) derived from phytozome v7.0 (chr-ID chr8 ; pos 18066323 to 18077937 reverse strand)
ggaagttggaaccactcaaggctctacccaaaaaagtttctctctgatgttttaaaaattgtaagcctcatcactcaaaagtacgtagaaataaactgctgtatgtttatttgaggaattaatatatttatggaataatttgagtttattttaatttgttgcaataatcacaaaaatagatatattatacggaatgctaaagattcctctccatggtattaaaagtgctcttaatttttggaacggttattattgatttatgtctctgtttcatgatatctactctaaaattttaattattttccatttaaaattaacctttttcatatagaagatgacaagttgttattggtctactcctaactgataaattgattttggttttggattcttaattcaatcaaacacaaaatccaaattcattgtcaactgtaaattccatcttcaagggtgaatgatcaacccctctgactaatttatgaatattaatgggtcatcaaacccaaatattctacttaatttcttttaaaaagaaaaaaccaacatggcccattgatacacgtagaaaagacgatttttaaaataaaatatttctaaaacaaatgtaagaggttaatgtgtataaaattctatatatttttagttaaatatattaaatttaaattttatttatttttagtatgtaccattaataaatgatggtcataataaggtttataaattattttcgaatataattgaagacaaagaagatagattttgtgagactcaactttgcaaacaggtcgattgtttggggcattttgtcattatcgtaggcccttcactttcattacatcaatgtggattgcctcgcgaaatagcaataggatttctctaaacatttttaattaacggactaattagacaatatcttgtttcaaacataggagttactaatagttaaatttgaaaaaaaaaaccgattatatgagaaatgctttagaaagttatatgggataacctggattgctgaataggacatcttctttgcataaattagatatacagacattccaacctattttagtggaatgacgtgttatttgtttatagacattatttcataaggaattcaatgtaaattttgataggatgtaaaataaactttttctaaaaatatatataatagtgagaaatggaagcattaaaagcaaaaaaaaaacgtattcaatgattttgtataaatttatgttttcataaagacatataagctaagtgactctatttaatatataataagaccattgttagatgataaaatttatacattatgcctaaagttaattctaaaaatgttaaagtgattttttttaataaaaaattaaatatttaacaaaagtttaaaaatcatatatttgaacttattcttgatttaatacttgaaatgtgcttctcttaatttttttaatataataaattaatgaaaaaatcattaaaagtaatttttatctatatttaaataataattaatttttaataaaataatttctaataaaaatagtattaataaaaatatttttaccataaatacttcaaaatataatccccagatattttcggtttcaattatcaacttctttatatacctaatttctatttacaataaatattccacaattaaatgtatttatttgtcaaagttgttgtatttaatattatttttctaaggacataaatcacatcaatgcaaattaatgcaagacaatgagttaattgcttaggacctaaccttatcaatatcaactattttttacgaacttgcccccatgtcccattgtccttttgtcgccaccattaggggacaacactaggccttgaatggactctagaactatataatgccaattaaataataatacaaataaattaatagcaaaagcaaagactacaaaataccgtgtagttgacaacaactaaaatacatctatctcccagatctaatcaggaaaaacattgaaatgaggtagtatttgtttttttgttgaataaaaaaattaaaatattttttttatttaattaaaagtaacatattaatatcaattaatttaattaaaataaatttattattaataaatttaattttatttatattgattaatattaacaaattatttttaatccaataaaaaaaattaaatattttaatgttttttatttaattaatttgttattccactttcttaaccagcatgcaatagttttcacctgaaaaacattaattctttaagatgagcatagaatttagtaaataatcataatacacaaatattaaaatggtgaatccaagataaaaaaaaatgaaatatatattatatgataatttgggaatacaaaaaacctaaaaacaaaacaaaacaagaaataaaaaaaatatgaaatatattatataataattttgtcctaacaaaaaactagcacaacataatcataataaaatgtaaagaatgtatgaaatgtaaaacatatgatcataattggacatatatgtggttaattcatcagtcatacaaaagtctactattcatggtcatcacatcataatgtttaggattttactaccttgaatcataatactaagtacctcatccgagtcatcacatgcaggggcataatagagtgtattctcaattctgtcacttcgaggctttgctacccaactcaacattaaaaataacatcatcttatgacttccatcttgctatataagtagtgcatgtggagttttaaaacaaaattgcatgaaatacatcatggatgtgctaccatacccataagatattaatgtccaaaagtctaaagtttatttagatcatgatagtatatataatttcatgaattctaaatatatgcaagttaatatacaattgcttgaagtcaaactaatatttattttgcaaattcaatataaaacatgtgtatttgagaatttagtaaaatcatacatatgtattcacaaaaatctttatcggtaaaactacaacaaaatttgcaattcgatacctcctcaagtctaggtacttccataacaaaaaaaaaaaaaaaaaaagttttaagtaaatataaatatttgggaatttcataaaaactgaattaagatttttttaaactttgttaacctattccaacctatatagcaacctaaattgaaatctacaaactttctaaagttaagaaattaggaaaacaagatccaatttaagtaaacttaagctagcaagtccattgaccaacttagatattttaataattaatagataaatcaaataactaccaaaagatcatcaacttggcataaacttaaattggttcaaaccgggcctaaacttaaattggttccaaccttatccaaaatagagcaagttcaaatactacttatattttttctttatttttcactaaataaatgagttccaaaaattataaaactctttaaatatactctatgatgagtgtataaaataataaaaataacttatgatcccataacaaatttaatagaataccaaaattccggaattccaaaattgtcttagtacaccatgctaaaaatccacccacatttacaaaattcttttcctatgaaaatggatttagactcaagtgaaattgacttttcagtttcattttcaagtgtactaatatataaaggtcaaaatcttgtcacaacattccaaaattttgagatccacaagttgtagttcaaaaataacttggtcaaatctccatgtttttcatcagtttgttcgaaatttttgtattagactattgtgatccaattaggatgaaatttaaatgattagattccttagaaaagtctattattttataaaataattatgagtactgatattcttccaaaaaatcacaaaattttgagaaacatgagtagacccaaactatttcaatcgacttttcattgatgtttttcgatctatttggactttccttatgatactaacattatctaaatgtaaagaagtttgtatggagatgattcaacttatattcaagtctttctaatgttacaattacttgaaattcatctatttgtgaattgaaaaagtacagtcaaaattcgcttaaataacagttgatcgcatagtagtgttcagtcgttgttgcattggtttatgatcagttaaaaagaaaaaatagcagggagaaaataaaggaaaaagtaaaataaaagaagaaaaaaaaagaagaggagagttaagattttgggtttgtaaggataagaataaagaagagcacatctgtgttttttaacattttaaattgtaaaaaggaaaaataatatttgccttgaataattttattgaatcaggagacgaagatttatacaagagatttcctacaatcatgctaatctattctaggtataaaagacaactgaataaatatacaattaatacaatatattttgccatatacaattaatacaatattgacctttccttcttaacactccccctcaagttggagagtgaatgtcaagaactcccaacttgtgtatcatagttgagaaagtttcctttcccaatggcttggtgaacacatctgcaagttgatctgttgaggcaatatgtttggtcacaactgaaccatcttgtattttgtcacgaataaaatggcaatccatctctatatgtctggttctttcatggaaaacaggattggcagctatatgtaaggctgctgtgttatcacaatataataatgctggctttggatgcaatattctcaaatcttttaataatgagcgcagccaggataattcacaacatgtgcctgccatggctctatattcggcttctgctaaggagagagatacggttttttgcctttttgtccgccaagaaataagagaagatcccagaaaaacacaataacccatagtggatctacgagatattggacaaccagcccaatccgaatcaaaaaaagctcgcaaagataaatcattttgagaagggaaaaacaaaccttgccctggactatttttcaaataacgcaatacacacaaggcagcttccatgtgtggtctacgtggtgcatgcatgaatctgcttaacacatggaccgaataggtgatatccggccgagtaatagtcaaataaattaggcgtccaacaagtcgcctatactgagatggatctttaagtaattcacctgaatccgagagctttgtgttttgttccatgggaaagttcacaggtttagcacccaaaaatccaccatcttttaaaatttccaaagtatattttcgttgcgagatggaaatacctttcttcgactgagaaacttcgatgccaagaaaatacttcaaatcacccaaatctttaattcgaaaatgactatgtagaaattgcttgagagctactatggcattgacatcattacccgtaataagaatgtcatcgacatatatcaacaaagctgtaaaagatttgcctatccgacatgtgaataacgagtaatcggctttggattgaacaaagccagcagcttagatagctgtagagaacttggcaaaccattgtcgggaagcttgctttaagccatataacgacttgtgaaggtgacacactaaattctccccctgtcgccgaagaccaggaggtggagacatataaatttcttcatggaaatcaccatgaagaaaagcattgttgacatcaagttggtgaagagaccaattctgggcagctgctaaagccaataaacaacgaacaataatcattttagcagtgggagaaaaagtgtcatggtaatctataccttccagctgtgtgtaaccttttgcaaccaaacgagctttgaaacgctcaatagtaccatctgagtgccgtttgattttataaacccaacgacaaccaataggcttcttaccaggaggaagagaagtgagggaccaagtgtggttggcttctaaagcagccaattcagattgcattgcttcttgccaatgggaatgagaagctgcttcggcataagatgtaggctcaatatcttgactaacagcagcagtaaaagagcgatgttgtggtgagtaacaatgataagagacaaaattgcaaaggggatagcgtgtacctttttgtggacttgatgacaaaggcggcaaatggttgggagacgttacttggttgcatacataatcacgtaaagccatgggagggtgatggggtcgttgtgaacggcgtaaaatgggttcgggaggaggactagcaggtgatggctgagtagaaactgaattcggtagtgagggttgttggatgggagaaataggttctggtggtgaggattgtggaactggtggggaaagatcggatatagaaagaggaatcacagggtctgaatttgaggaaggggatggaatggactcataagggaaaatagtttcatgaaaaacaacatcacggctagtgaacatttggtgagtgtcaaggtcatagagcttgtaagctttttgaccaacgggatagccaagaaaaatacatcgtttggctcgaggagcaaatttatgggggacgtgcacattagtagcataggccagacacccaaaaactcggatatgagaataagaaggaagcttcccataaagtcgttcaaaaggagtttggcgcgaaaggagaggtgtgggcaaacgattaattatatgaacaacagtagaaacacattctgcccaaaaaggtaaaggaaggtgggcttgaaaacgaaatgctctagcggactcaagaatatggcggtgcttgcactctacaaccccattttgttgaggggtatagacacaaaaatgttggtaagtggtccctttttgtttaaaaaattcccgcatagagaagaattctccaccattatcaacccgtatgttggctatagatacatggaattgtgtttggacaaatgaaaaaaaaattgacaagtaaatgttgtgtttcacttttgtgatgcataaaaaaaacccatgtgaatctagaataatcatccacaatagtcaaaaaatattttgtaccagaaagagaagcaattttataggggccccaaatgtcacaatgaattaattcaaaaggtctaacagacgaaattgaactgacagaaaaagaaagtcgacgttgttttgcaagtgcacaaacatcacaagcattgttagactggaaagggaaatttaaaaaatgttttgccataaaatctaatctagaggaagacaaatgccccaaacgacgatgccataaagcggtggaggaggtgacctgagaactgggtgaacggcaagaagtggctgctgcggatggagtttgagtttttggcttctctgatgctaacgcaaccaagtaataaagtccgtctcgttgttcacccaaaccaatcgtcgtcctcgtcgtcaagtcctgcaaaatacaccaatgagggaaaaaggttactgaacaattgagatctttggtaactcgactcacagacattaaatccaccttaaaagatggcacaccaagcacgttttttaaagtagcagtagaattcaaaggtaaattcccaatagatgtaatcggagcctgttctccacttggcatagcaactggtggcaaaaaggtgttcttactgctgttgacaagcaaagttggagatgaagtaatgtggtctgttgcaccactgtcgataattaatcgatgtaggtgcaacaatgtttgtaacaaacctgaggcagcagcattagctttaggattggtagattgtgttgtccctttaccctgcatgatagataagatttgctggatttgcaaatcagagagtccatttgtctttgacggcacttcctgcattactggacgttccttgacattgttggctgaagattgatggctattgttgcgcttgaaatgagtgcttccatgattagacctgtttgatgcatgtttagggtgttctggtgggtacccattcagcttccagcatgtttctcgtacatgatggtcacggtcacaataagagcaatgcaaaggttttcgattagatgggttagaacgagaagaagaaccttgtccatgttgaacagccagtgccatcggttcagccctttgaacaaccatgactgagttctctgtcgtctcacgtgtagcccccaggcttcgttgcttctcctcttgtacaatggaagagtaagccttggcaacatcaagtagcagattcatcaacaaaatctgccctcagattgcattgtaggactcattgagtcccatgagaaactgcatcaatctgcgtctcttatggtctgccccacaagagcaaacggtgtcattataggatcctagttcatcccataactttttaagccttgtgtaataagctgtaacagtcatctgatcttgagtaagacaggcaatgtctctctcaatctgaaaaatacgaggggcattgctttgagaaaaacgatcccaaaggtcttcccatacctcctgggcggtggttgaaaaaatgacactatctgcaaggtcctgtgaaagtgaattgagaatccaagagaggatcatatcgttgcattttttccacgaagcatgttcgtctggtttgtctgtggcagatggcattgtggtggtcccatctatgaaacctaacttggacttggcgttcaaagaaatcgtcatgactctacaccatgtcgaataattatccccattgaggggcttggaaacgagcaccattcctggatgatcagaatggtgaagaaaatatagattggcagcatcaagtttgcctccattcgaaggttgctgttccgtcatgattatgagaaacaacaaaaaaaggaacggcaaaaagaaagagggcagagagctagggtatcgtttcctgctctgataccatgtaaaaaggaaaaataatatttgccttgaataattttattgaatcaggagacgaagatttatacaagagatttcctacaatcatgctaatctattctaggtataaaaggcaactgaataaatatacaattaatacaatatattttgccatatacaattaatacaatattgacctttccttcttaacataaattctattccaaaagaagaaaaaataaaaataaaggtcaaacgaaagagattttagtaatatctaagggcatatttggttcatgtttttaaaaactgttttctgttcttgagaaaaaaacacaaaaaacttatttggagaaagaggtatatttttgttttttgtgttttcaaaaaccatttttttgaaaacaataaaaaaatgtttttattatttttttcactgttaaaataattgattgtttttcatattttctcttccttctttcttcttccttaaattattaaaattaatatacttacacatgatgacaaagtcatcatttatttaaaaaaataaaattgttgtaaaaattgattttttttaatttaaatgaattgtatatatgaaaattatttatatatttataatatcaagttaatggaagaaaataatttattaattaaaaatattaattttcaaacatatttttgttttatttattttttttaaaaaaattattaactcaaccaaacatgtttttttttttttttttaagaacaaaaactattttttggaattcagtttccaaacacaatttttttttaaaaaaaacacaaaaaattattctcaaaactatttttcagaacagttttcaaaaacaacaattaaacatgccctaagattcctctttatttgtttccatccttcttgttctttaggaataaaataaaataattctttggaaagcattttataattcagataaagccataaaagtatccggaacaagagactcttttgtggctaccgtccaaatgttacagaaggaaaaaggtatcactgagtatcagtacgccatgttaaagtcgagccttgatacgtgaaggccgacaaatcacaaattagacttcaaataagttattaagtatttaatttataataaatattaatatgttttgctttgagaaaagcgataaatggaaatgatgagaatttaaattgcatagaatcacatgttgacaattaagcatgcatttaatagcaaaattcagtccgttaccttggttcatgctttgagaagccatttctactccctttgatatccaataatctgctttccaggtgcgtgatggtccgagaatgagcgatcaatgaactcttcccttgtctcccaaaattcagtccaaagtggagtgtgtgagtgtgtttgccgagagagctctcaaagagaagaaaggatgctctaccgaaaaaatgcaaacacatctctctatatatatatatacaaataaatacatatatatatatatatatatatatatatatatatatatatatatatatatatattgtacattacacactttagttggacgacttgacttaatgggccagtcaagtgaattagggtgagcccataaaaaattaagtaacaatatgtgtccagtcccattatggaccacaatgcaaaaataaattaacactgatttatgatattatcaaattaattatgtaagtccacacataaaaattccaacaagaaactcttcggtagtagtagtagtatgctatgatataatgattgttcccacgtgaaaaaatcttgtcatgaagagacggacttttctcaatagtacggtaatttaaaaaagttatgcttaaattattgtagtaaaagaagttattacaaatatatggtagtttttgccacctaggagagaggagagagggtgaacggaaaaaaaaaaattttaaaccaaaatcacattttcaaatttcaaaagaaaatttcaaaaaggaaatcgtctcttcaagagacgagttcccatgaaaaaagttcccaaattaaaaaaaaaaaaaaaaatcctcgaggaactcgtctcttcaagagatgagttcccatgaaaaaaatatatattttttttaaaaattcccaaattattaaaaaagaaaaaaaaaattcctcaagggaactcgtctcttgaaaatacgagttcccataaaaaaaatatatttttttaaaaaaaattctcaaattataaaaaaataaaaattctttaagggaattcgtctcttcaagagacgaagttcccatgaaaaatgaggaattgtttttttttttttttttaataatttgggaattttttaatatatatatatttatggaactcttctcctaaagagacgagttccttgaggaattttcttttaccactcaaacgtcttcttattctctctcatgcgtaatcccatattttttcttgacttttcccccactcaaatatccttccatcctctctcttatgcatgcagccacatattttgctcccaaacctatttaatatgtggggactacatgttttgctctcaaatcacttaaatatatggtggtcccgggtgattttcttttctttgccatctaaccactcctaataacaaagttcccttgaggaatttttttttcatgggaactcgtctcttgaagagacaaattcccttgaggaattgtttttattttttatttttttatttttaat

SEQ ID NO: 10491 - DNA, 16214 bp, Vitis vinifera
  Intron number 12 from transcript GSVIVT01023720001 (locus GSVIVG01023720001) derived from phytozome v7.0 (chr-ID chr 11; pos 9959772 to 9975985 reverse strand)
tgaaggtaggtttgattgtttctatgaagaaaggtctttattgtttctttttactgattcatggttttatggtttatgcttatgcttttcttgttgactgcatctggagttgagcatagaaggtctgggaaaccactctagcaaaactcccattatgttaattttcacaacaatttgatactttgttcatttgagtctccaaaatagaaaacaagaatatgtgatatgctttgcaattttaaggatgttttttttttcctaataattgagtgactacttgtctgatttatttcttaatattaaagacaatggattgcttggatggaattagtaacaaagtttatttagaaagacatccttatgtattggcactttgatgtcccttttctggcactctagtgaaacattgctattgcttatgcttaggtttgtaattgttggaaactctattccccagaaggtaatcctgttgccagtgagttcctttgtggaaacaattagaaatctctttcatgtttatgagagaattgggttctcttttccttggtgtctttcatatgcttcgaaaaatcattgagagcatgaaaaaggagtttccttttgttttttcatgtaaagtatgatgcaaatttcgtgcttaaaaataatcatccaagttacatgcattttcatagcagatgatgagttctcaatgaatattggagatgtctattaaggactacaagttgggaatttttggggctataatgagtgttgaggccaggtctgccatagcaattctatggactcgaagaaaggaaagaaaggagccagctctggaaaagacagggaactgagaaagttgaacagttctgtgagttctgatgtttatgatggaagggagaggaatagcagaaaggtgcgttggtctttagggttgatcaaggaatttgagaataatttcttagaattttagaagtctgaatgttttggacaaacagaagttggtgaaatctgtacatgtttggttcttgttttgggatgttttgtgtgtattgtctgtatacatagtgtgtgtcacctctttttggcaattcttaatacatgcctttgtttattaaaaaaaaataaaattgaagttggtgaaatctctcattcatctcatagtgctgatttgatatgttcacaagaaactaaaatggagtctatgttcttggaggatgttctgaactttggtggggggttgtgttctggattgtggggcaaccaatggcaagaggctgtggatggccagatgctgatctagccatctaggctaatagagtgttggattggatttgttgattttgaagaaggggcctttgccctttcctatcattctaggaattgtgaggatgacattgttagggtgattttagggtgtattacaccaagagtgagttttttttgctaggaagtctcatggggaaaagttttaactttgcatcaactcaaaaggaggggttggacccttgctaatagatgtttcttttgtctagccaaagaggagtctactaatcatatcttaatccactgcacgaagactaaagttttgtgggagttattattcaatctctttggggtgacttgggttctcccttgctcgataagggagactctccttggttggtttgggccttttgtgggcaagaagagcaaaaaagcttggaagctggctcctttatgccttttttgggcagtgtggaaagaaagaaataggatagtttttgacaatacataggttgaagtattcttttgtatgtagtttatgatattggacaaagttgtatatagatgttaaccctttatctttaatcgactttttttattggttgggctctaggtgaaggcgggtgaggtttttgttttactcctgttttgctctttttgctcttttgagccttttggcacttgttgtatacttcttgtatgccttgggttgcctccgagcttccttttctatttaatatattctcttctgtgtttacccataaaaaattttagggtgtattacagtattggagaggagggaagggctttttgggaaacttggggctataagggttgtgagaggattcatggtgtattggaagggagtttaatgtggttttattctccttcaaaatgtgttattatgggaggcttcccgcatccatgatgtgttttttggttgactatcccttgattggaggggagtttactttggtgttgtagcaaggatagtacctctttattgaagctagactattcctattattggaaggcatggaagagcacttctccaatgttgtctagtttactttgcctagatctttttgatcatttgatgatccttctagattgtggtttgttgggaaacaagggaaatgctagtttaggtttgaaaatatgtggctcaaggaagatggattagtgtttggttcaaaatttggttagtgagcgatgtatttttcaaccttgtgagttttgtttttaccaaaaagttgaaagtcgttaaagagaatttgaaaggttggaatgagaatgtctctagttatatagttgtttccatgctacggggtcggtcctccatggtttacttgagaaaggaatataaaagaacaaagaaatatggagttaccctcattaagagtatttgagtaaattatcaaatttttagttttttataggcaataagaaatatatattgtactaagaagcaccaagaaatagcagtctaagatacaagaacatatacaaagagcactaaaggataaaaaaaaacccttcccttagcctaagccaaaataatcaacaaaatctattatagacttatatcttcatctatgtacatctttacccatcaaaacaaggcaccaaagaaaaaaatcttaagtgcatggattaactgcctctagttttcaaatgacctttgattcctctccttccaaactatcaaaggatgcataatggagcatctctccaaaccttctttattcttcttcctacaaaggagccacgccaacctagaagagtctctttgaatcaaatttttaggctatgtttggtttccaaaaagtgctaaagaaagaaaaaataatattaaggaaaatgattttttcatgtttggtttcattatataaaatacgaaaaaagtaaaaaaaattaaaattagttagaaatttgtacattttaaaattatttacataaaagaggaaaataagtgaaatgggtttgaagtagcatataaaaaatatttgttaactttaaatctatttttttatttttcttcattttttctttcctttacattttctctcaaattttctaagaactagacatacccttagtttttagagtcataattaagaagagttggtttatttgagtctagcttcgaatttagaattttttttaaataaaaatcctattgtaatccattgttgtacttttgaaaattttattttttttagaaacttctattgcctagaaagtggcttctttgtaaaaagttcaaaagtttttatcttctagaaaaattttactttctaaatgtttgtatcttataaaaagtttctactttctaaaattttttctaaaagattttatattttaaaggagttcctattttctttttcaattatttggaagttttataaattttatgaaaaaattaagagttataatatgttactacatatgttttctttttctatagtttggtatatcttttaggttgtgtaaaatctataagtaagaatatttgatgtaaccaagagattaacaatgaatgatataaattgcatacttgtaagtttcaatagtgagtattatcttaaactctaattgagctatcaactaaaaaggtcgatagagtatatggtaaggacgttgaaggtctctgtggagaggaagaccttcttggttaggttggaaggcgagcacggaggtaattggtgttcgattacataacactgtagaggctctgtttttgtcttaggctttgaaaaggatgaagtcgggtggatgatcgaacatttgacgaaagccatcgaaatgaagagtcacttggggttcaacagaaagtacaggggaaaattccatgtccatttgatggaagttggcttcaacaaccacagtaggttcataaggatctcggagttcgctaccagtagaaaatctacttttctggttattcttgagggcgagaagggtagaggatgggagaatctaaaaaacgcgctgtcgtcaatgttggtggtcccccccttgaatgcagttgaaaaaggaagacaatacaaagtgaaaaagtctatccacaatcacgtgggtcctctgtaccggtccttcgcgaatgtagtcaatgatgaaggaccaaggagaggtggtcttgtttctatcgggaggtgggtgcgagtcatggtgtgtgaatgcaatgctgatagcgttaaatgggttgaagttggccgagtggtgatgagaagcttagggaagaaaggagtgacaacgattgtacccatctcaggcggaaaatgagtattttttgttgaaatgatagaggaaactctctttctccaggatttaaggattcctaggattgagggaaggaatatagtccagttgagaaggtggtcaccaaaggaaaattcagaaattgaggggaagttcagaggaggctagatcgaaatacgggggttgccatttcatctatggtctgaggtacacttgaagaaaatagtggagcagtggaggacggtgactgaaattgattggcgaacgttgaaactgtttgatcttagtaaggcgagggtaagaattgcaatgaaggatcggtcagtccttccagctttgatcgaggtgacagaaggggattgagtgtttacaatttctgtcgtagtgatcgaagctgaagatgtttggagaggcagtgtaatgggtgagtcgacttgggaagtttttgcatctcactcagggacaggtggaggaaggcgggtggagagagttagatcaacggctggaggaagatgtcgtgttggggaagatggtagaatgaagaagggaggagaaaggagtatggctgatgtttttccagtggggacacatggtaagagtggtcaggatgaggggaacagttggtttctacacccatcgttgcccagtttgaataaaaaaaaaaatgaacgatgggccagttggaacagaggaggcgggaggagttagggcctgtggggacgaggtatcctcagatgaggattgttgggccactgagagaaaggcccagtctttgtccaagcctggtccactatttgcaaaagtgggctgcaacttaaaaggcccgttggggttgggccaaagattaggaggaaagaagccagatgacaagaagggtttgttacaaagggaagaagattctgcagtgggaaaggggaaagttgcatctgtagttcctgaggttcagacgagtggtttcgcgaagaaagaagtgaaatttggttcaaagaagctgtgaactaccctttttcctccaagttctgttcgccgacaaggtcttcgaagtcctagtgagcctttattgcatgggaagacttcggcaaatagcgaaaagtttccaaaggaagaggctttcggggccggatctcaggcagaacaaggatttagtgtgagtcctctcatttttcgtcgatcatcaaggattcgtaagaggtgtttgggggaaggggctcatcgtcaagaggcgaagtggcttcgtgcaaaccttcctttgatgaagacagagaaggatttttgggccaagtggggtccgatatttgtggctcagcagtcacggttttgccttctacgccaaaaataagaggtaaagggctcagctttatggggaattgtggattgttggtagctgaaaacttggaggtaaactcgtcttcacctactcagtcacccttgtcttctctacccccttcttgtggtttgacatcttcatttctgagttcttctgttcccaatcttcccagttcagcctttctatctcagtttcctatagaaaatcgagtaactctgaatttttttccaaaaaagacgatgttggtactataggtcaaatatctattggcattcctaaccttgttgcggaggagatccagtctgcttatccaaaccagctgactgagagttttaacccaattatgtctaaacccattttgcctaataaggtctccaacttggttacagttagctaaggggtgatactatgggctccccatcgggtgagttccaaatagaaggcctatcccccaggaaaatggttaaagtgcgagaggttttaagttctctggatattaaggtatattccaggaggaagagtaaatgctccacaggtaggtgaaacctgttggaactggattggaggattagggtctatgaggtttttcaatgaaaataattagttggaataccaggggtttgggttcaaggaaaaagcgaagggtggttaaagattttctgaggtcagagaatccggatgttgtgatgattcaggaaacaaaaaaggcggaatgtgatagaaggtttgtgggtagtgtttggactgtcagaaataaggaatgggtagctcttccggtgtgcggggcttcaagtgggatattgattatttgagactctaaaaaactatgcagtgaggaggtggtaataggatccttttcggtctcaatcaagtttgcattggatggatgcagatcgttatggttgtctgcaatttatggcccaaacaacccatttcttaggaaggatttttgggtggagcttttagacatttttggactttctttcccgttttggtgtgtgggtgtcaattttaatgtcatgaggagaagttcagaaaaattgggaggttctagtttaaccccaagcatgaaggactttgatgattttataagagaatgtgaattactagatccacctttatggagcgcaccattcacttggtcaaacatgcaagagtctcccgtgtgcaagagattggatcgatttctttactcaaatgagtgggaacaattatttcctcaaagccttcaagaagttcttcctagatggacatcgaatcattggctgatagttttggaaaccaatccattcaagtggggcccaacaccttttaggtttgagaatatgtggttgcaacatcctagttttaaggagtgctttagaagttggtggagagattttcaaggaaatgggtgggaaggtcacaagttcatgaggaaattacaatttcttaaggccaaattgaaagagtgaaataaggcttcttttggagagctaaatgaaaggaaaaaaagtatcctatttgaattagctaactttgataccattgagcaagaagggggtctcaccttcgaacttttagtttagagagctttaagaaaaaaggagctagaggaattgattttgagggaagaaattcaatggagacaaaaagttaggatgaaatgggttaaggaaggggattgtaactcaaagttttttcataaagtggctaatggcaggcgaaataggaaataatcaaggtgttggagaatgaaagaggcctagtgttgaataattcagagagcatcaaagagaagattttaatgtactttgaaaagctatactcgagcccttctggagagtcttggagagttgaaggcttagattggtcccctatatctggaaagagtgcatctaggttggactccccttttactgaagaagagatttctaaggccatttttcaattggaaagggataaagcaccggggcttgatgactttaccattgtagtgtttcaagattgttgggatgtgatcaagaaggatttagtgagagtgtttgcagagtttcatagaagcgggattatcaatcaaagcactaatgcctccttcatagttctgttacccaaaaaaagcatgtcaaagaaaatctcagactttagacctattagcttgatcactagtctttacaagataatagccaaagtgctatcagggcgcctaagaggggtactacaagaaactatccattatactcaaggcgcttttgttcaagggagacaaatattggatgcagttctcatagccaatgagatagtggatgagaaaagacgatcaggggaagaaggagttgtcttcaaaattgactttgaaaaggcttacgaccatgtgagttgggattttttggatcatgtgttggagaagaaagggtttagtcctagatggaggaaatggataagaggttgtttgtttgcggtatcttttgtagtcttagtgaatggaaacgctaaagggtgggtcaaggcatctagaggtttaagacaaggagaccttttattcccttttttgttcactttagtcgcagatgtactaagcagtatgttattgagagcataggaaagaaattcgttggagggtttcagagtgggtaggaacagaacaagggtgccccatttgcaatttgcagatgataccattttcttttctagcattcgtgaggaggatctatagacccttaagagtttattgctagtgtttgggtatatttctaggctgaaggttaacattgacaaacgtaatatttatgacattaatcttgaacataattatctttctaggttggtcgagctgcttgattgcaaggcctttggttggcctatactctacctgggtcttcctctgggagggaatcccaaggcttatggcttttgggatccagtgattgagaggatctcgagaagattagatgagtgacaaaagacttatttatcttttggaggtaggataactctcatccaattttgcctcacccacatgccttgctacttcctctccttgtttaagatacctgcctcagtggcagcaaaaattgagagattgcaaagagattttttatggtcaggggttggggaaggcaaaagagatcatcttattagttgggatgtagtgtgtaatccgaaggccaaagggggattgggatttgagaagatttctataaggaatttcgctttcttagggaaatggttgtggaggtatcctagggagggttcaactttgtggcatcaggttattttaagcatttatggatcacattccaatggttgggatgccaacactataatcagatggttacatcgttgtccttggaaggctattgcataagtcttccaggagttttccaagtttactcagttaatggtaagagatggggaaagaatttggttctgggaagacttgtggtggggggaccaacctttgggagtccaatatccaagactatttagagtagtcacggataaaaatattcttatttcttcaattctcggttctactcgtcccttctcttgcaactttaattttcgttgtaacattttcgattctgggatagaagattttaaaggcctcatgcagtcacttgatcgtctgcatttatcaccttcggtttcatataggagatcctggtctttattttcttcaggattttgtactgtcaaatctttctttcttgccttatcccaattttctggttttcctccagttttccctactaagttcgtttggaattctcaagtccctttcaaagtcaagtcctttgtctggttagtggtatataagaagataaatactaatgacttgctgtagttgagaataccctacaaaactcttaatcctgatatttgtaagttgtgcatgaagcatggagaattagtagatcatctttttctacattgcttttttacgatggggttatgacacagattattttagttagtcaagacggattgggttcccccgaggagcatctccgacatgctgtccaccaattttaatggttttggtttttctaagagagggattgttttgtggcaagttgcgagcattgctttaatttgggttgtgtggctggaaagaaatgcaaagattttttaggacaaagcaaggaattcagagaatctttgggattctattcatttctttgcttctctttaggctttttgttccaaggtttttaaggggattccccttaacatgttacaacttgattggttagcggtgtgtaattccaatgggttggtctaacctaaagagtttgcttgtttttactttgtattttcttgtatttgtttccttgtagttaagtttttctttggtgggaggattcctcatccttctcttgtacttctttttttatcaatatatccctttgtcgtttcctaaaaaaaataaaataaaaaataaaaataaaaaaaagaaaaaaaagaaaaaaaaaagtgagtattatctttgattatgcgtgggacaactaagaggccatagtgtgattctagggtttttcatatctcatcttctctatcctttccctctctccgaattataaaaaatgaccatttcattgattagaatagtaagtacaaagaaagatgataaatccttctaataatacaaaacccaatacaaaagagaataaatgtatgctagtctaaaggtgaatttgtctacaaatatcaaaatggacaaggctcattgtaattcataaaggtgaaaaaaatctccaaaaaaatctcaaaacaaaatgtctagctccatgctttgctaatgcattccccactataattttcttaaactaggagcctaagagaaggaaccactcaactatgaagaaatcaataatttgaagcaaccacctatcaaacttccacggtcctctttctttcttaatgacccatgatgacattggtcgaatctccttttactaagaagttgaggagacccaaagcttttgcattgagcaaagaaatagaatctctaccttaatgactaaaccttaacttgtaggtttagagaatgcttgtaccattatggcaaattggttcttaagaaaccttccaatccttaatttccttgggctaccaaaagaatattcatcaaaatatagtttgataaaacattggagatggttttgcattctaggttccaatctagtagaattgggctaaaagggatgcttgcaaaagcttcattagcggaaggccaaagagaagaagagaagtaaacaagtacccaattgcttctagagacctccacctatcctaaaaaatccttgaatttttttcctgctcaatagttcaggctagagttaaactagcaatgtgccaaaaagtcctaccttgaggaagcctcccaaatcctttaaaaggatataatctagatcacctccaagttctctttcttttcctcactttttatttattcattccctaccactgtagttttggtttctcatttaccccttaaatataaaacaatagtgtcctaactttatttggttgtagacaatcatcttagaattgtcctacattggtgaaaaatatcttggaataggttaggtattgggataaataaatggagtgctggaaactacaagtttcttcttgaggagcagaactattgggaaattttggaagaaatgtccaaggacaatagggtgttgtggttgaaagaagaagagagaagcacaaagtttgtctcacattatggctaatgtccattggagaggcaacttaattggtagtcttgaagtatgtggcgttttaacttttagagattgttgagattaattcatgagtcgctagatatttccagcagatttattgttttggaaaacctagtatagatgaggatgacctttaatactattggcttggtggcataaaagccctaggcctattggctttatcctaacctacatggtaacttattaaaattcttaattattgtttaaaactcacaaaccttccaaatatttcaattaaaagaaaataaaaatgatgtaagacaaccctaggctggttgtccacaatcaaataaggtggctagggcattcaaatttaaggagagggacagggaataaaattctggcatcaaggaaaagaaaatagaggatagaaaagaaaaagataaagaagagaatatagaaaatatttgtttcactaaagccttctaccagtctcacttagaaggaaaataatggagtctcaccattgaaaatgacaaggtttacacaaaaaattcatgttattcatcatccattcatcaatatcattttatagcaattagtcttatttagaagttttagaaaactaaccaaaccatacaaaaagaagcctaacctatatagtaacttattggggatcttatttcttttctaaaactcttaaatcttccaaataatgaaattaaaaaaataataataaaacctcctttttagacttgaaattttgaaacttcataaaaactttttgtattaaaagtttctaatgaagaagactttctaaattctaaaaagaactcaaataaaaacattaagaaagaaaagactataaaatatgagaaaattttcttcttcttcttttcctttattttgaatggaccttgaaaattcggcctcatcaataaacttttaaaaaatagatctttttaaagaataaatttttttagaaaagtacacttcttagaaattaatttttttttaaaacaatctgtttagaaaatggatgcctttagaaaatagaattaaaaaaaaaatagacattttaaaagtataaaaactcaacaccataaaagaaaatggaaaatagaatttttttttttttttttaagatagagattttaaaagtataaaaactcaacaccataaaatatttttaatgaagaagattttctgaattctatataggactcaaatgactaaatgccactaaatttgaatctagatatcctaaaccgtcaaaggcactaaaatatgcttgatggagtgatttatttattttttactctattttttgttagttagaaaaccttgaagggctcattcatcattaatactcactcaaagtaaaaacacagtggccatcttactaatttattcatgtctttatgatgcttgaggtatatatttgttttatagggattcaatggggtttccttttttacttctctcttcttttctactgtggtggtgggtggggaggatggtgggcaaaggatgtaaagttctcttaaaaggaaattccatttcatgaagtggttaacttttagttcagacaagagcaagagtgtttaggaaataaggctctactaggtaagtggctgtgggaatttgcagtttagagtgatcttttattgaggagaattatttttgggaagtttgtagaaaaaggacgagatgggtgcttggggggtatatgaagtggtcttttggaagacattatgaaaaatactaattttcttctggagtgagtattttaatagtgaatgaatagagaccttgatttggtttgatgtctgatgagaagagctacctctgagagttcccttcttttctttgctggccttactaccagaagggatgccaaagtcatggatatttgaattgaggggggtgggagaagccatttcagccttgtttcctgaggagcttttgtaactaggagcaggaggtgctagagttcttcctttggagccttcaggcagtgatggtgagttggggtagtgacaataggttggtttgaatttgcattagaatggactctctgttaaacccttctgtaggccttattttgggaggtttagtttcctttgctgagaataaactatgggttttggaggcccctctgaacaagggtttctttacttggaagatgatgtggttggtgcctgattaatatatgttgtttgtgcaagtgtaagaaggaaatagtcaaccatattccaattcaccattggaaggtgtgcaatctatagtatctgttttgggtgctccaaagatcagtctaatatttgtttcttaattagcatggctgttttgtgcataagaggtgctctagatatgtcggatgctccctctatgtttgttcaatgcttgtggaaggagagaaaagaagactatgtgatgcaaagattcccgaccaaatttgaaagattatttctttatggctgcatttgggtcatgaaaaccaccaagtaaatggaaaaaaagttaggaaaaaattataaatgctcttatttggtttatcaaggaaaattagataaatggaaattgtttataaatttttatattttcaaattctttattctctatatagaagagcaaaaaagggaaataagtctggaaaagcatgtgcgaaaaaaatgactagatttaaactttttttaattattattttccttcatttttatttttttttcttttccttcattttgcccttttaattttccaaatagccccagaatgttctgagcttctggaatagcttggactattttaataagtgtagaacagaaaaagtgaaaattctgaactctgtgaaataaagtagaaagttttgatgtgtagaaaccctaagtagctagactactccaaaacagtattgcataataatgagcttgtagttatccctcactgtttctagggggttttcggatggctaagtgcatataaataagggaggtcctaattagggtgagacctagcttgtctcgtaaagcttcctgatgtataaaacttgctttctttcaagtgtgattctttatttgctttctcaactcaagaggccttaagctgtcatgggatcttttgggaagcctccagttcatgactgtaggcagtaagggcgatcatagttttttctttggcttttggtatttaacacactttctacacttaatgtaattgttagaagtttctttctatatatttatgatgtgcctacaaaataaacgaaatacaaacatcaaaataaaccaaataactaatgacaataaaaatcacatttgatatcttttgtgcatgcaatccctccaataaatacatccgatatgaaacttgttataagtgaagtattcaatgggttttcatgtgtacttagtgattcctaagaccaaaccgttaagaattattcaagtggttgaaaggattccatttgctgggaaatgatttttaatcataacatattcgtaataaaaataagatagaaacaagaatattgagaaccagatagtttcatttaagagggccacaaatattgagagctttaggggccttgacattcccttttttgaatttgggtagaaatggtctgtttaatgttgtaggttagttctgtgcatctgcggctttttttttacttttcctggttttgatccctattgaacaattgatttacccaaaagtttatgctcataggatttggatccacaatatatatcataatttactctaacaatctcattttgaattcttttgttttttgttaatgatttttctgtcaaagattaatgagaagaagagaagggggaataggagagaagaaaaaagaaatggaaaatgaattgcttgcttctttttgggagaggtgaaaccacttttgtctggcattctcaaccaacaaaagaaaaaaagattttagccttaaatcctagcaaccaaaagctcaaaagccttatggtttctgttaaaaaatcctaggatttaataacaaaacttttatataaaagttttagcctcatttaggcctaaatgatgttaaattagagcaatggaaagaccaactacccttatctaaaaataattagactgggatagaagtgcccagctaataaatgaaacacaagcacactgaacactaaaaatttccatctgagcatgtattctaagtaaattaaaatatggtttgtttctggtctggaatcttgtctcctatcatggtaaggaatgatagtggtgaccatacttgctttaaaatagaaatgctgggttgcatctttgaacgtccattccctcattttctctcatatttatttattttttgaatgttcatgcttgcatatgtttcttcttatgaatatgtttagggttatgcatttccagtaaagatgtgctaagagttacacttctcagacaggagaaactgtctaggttgagcgtttaaacctcctctttatcagttaacatcttctgtttccctgatcagattttcatcccatgcaaccatctttatgaagatgctgacacagtttagctagtgatcatatttttatcatgaaattcctatctgcagctcttctcacagcatgttttttcctttttaatctttctcaggttccttcaagctttttcaagacagtttagctaga

SEQ ID NO: 10492 - DNA, 8783 bp, Vitis vinifera
  Intron number 11 from transcript GSVIVT01017353001 (locus GSVIVG01017353001) derived from phytozome v7.0 (chr-ID chr 9; pos 7093201 to 7101983 reverse strand)
cttccccaacaagtcttaaaatctcactgagatcggtatggatgcatgatgccatggttaacattttttttcctttataaaagttcaatacttaagcatcaaaagctataattttgaggatagttggtaatctcgtatgaaaatctggaaaacaatcaaacttattgatagctacatggcttagctttgtctgagataggaaaaagggtatcttttaggttgttggaaaagtcaaacatgagatcttgggctttggttaaaacaaagttgagtctaagaagaaccataccagccttacaaagttgaggaaaaagggtatcccaaccacttggtttatgtgcccagatccaaaaaaaaaaagggaagagggaggggcaggggcattgtaaggtgggttgctaattcattctgctgtatataccttttttctcttgtttttcctttctagctcaatacgtcctttctcaccaccttgagcttcattgttttccttccttgtaatgccatcaaatcatttaccatcagttgatatctgtcatatggtgaagcacaaacattctagaaaaaaagagtgaagaaagttgtaaggaagattaaaatagagaagattataaatttcataatggttagggctcaatccttttgttatatgtccactactaagtaattgcaataaataaatttattaggagaagaaacaaataggcaccaggagaagatttctattgtaaaaattcatcccagtgatcataggaaacgaatcacagagcactaagccttagtcttttcttttggtaattctctttctttacaagttttgcactaaaaattcctgcatatttgggacggaatgataggtagtaaatttgcaactaacatgaggatggttaccaacctttggagtccaatagggtatcaatgattggtttagacaaccaagatcaatggtgcataatgatttgacaaggtcattcgagctttccggctaaagctgaagccaaaagggtaaaaaattacatgcctttcataggatgtgtttctatggactgacagttactaacctaataggctgaactacctatcgaggtgcttatttttctcttaggccaaggagtgtttctctagcagtatcaatgcatggagcataattttaggtccatggtttgaagttgctcctatgctgcctcatgtacttgagaaaatgttctgaacacagctcctatgtgtgggtcgggtcccaacaattatttaactttctcgtcaaggtatacaatcctaatcagaactttagaatcttatgaatcttgatcttataattttagtccaattctgccaagaatctcctcagcacagttgcataatgaaatccgtataaagttgatagaattgagatttgactctgattatgacaagttgagggttttattttttttatattctttgtgatgtgtggtcccatgaatccatataagatttggcttcataacaaagacttcttcaagaaaaggtctgaagagctgtgaacttctcaagtccctcatgattcactcctgggaagtggatgtgggttgggaggaaaggtgttttgagctcaaggaagatgagggtgccagagggctttctttatcactggatttgtcatgagggaacattttccttaatgtttgaagagaaagaagtctcatggtcattggagtagttgcatggggctgcagcattggaacaaaggggggtttttcgataagaaattaggggacacttaagactcgtcaaggttctctggaacaacattgacaggtgtatttgtgactgagtttatgacaatctggagacccctattttgggtgattctaaaagtacctaaaagtagtgattggaccaattgtgtctgttgatctcttctagatccagaggaactggaaaaagagaaggttttttcgcatagcaagggaataaagggggatgagaattgcagctggggaaaggtcacctttctgcttttatgtgaaaatggtcaaggggggcacaaagtgaaggcattactgtcatgggaatatggtcatgagccataatctgagtatgtggcttggagttggtggattggatgagttttggaaagttcttgcagacgtgtttggtggttgggggcaagcttgtattgcttaattttccctaaaaggtgggatcttcttcgtggacttagtggaggacaccattttcttgagtaaggttggatcagtaaggctaaaggatgaggttatgatttctttacaagtaattgcagagagctggcacaaactggggctttcctgcctggatggtgggaggtcaaggactgcttttccatctttggagtttggacctctagttcatttgggccaaaagtgtggttaaggtgatggagataatctcagatctttgaagtttgttaacttaaataagagtttaagagggtatttgataaatcatctttatgacttaatatgacttaatgacttaatttgtcattaagtagattaagcatatttgataaatgggaggagagtggtttggcgaaattcagtcaatttctgggtttccccacggaagggttggagaaggaaatcctgaattttttgactaaaatcagaaaaagaagggagaaaatccatagtaaagagctactggaaaaatctaagtttgaaagggaattaaaaagattggaatgctccattaattatgaggggggaattaaacagaaaggctcagtacagggcaaagggcgccagattgtgattgtccaatgaagataaaaattctgagttggaatgtgaggggagcaaatgatagctctaaaagaaaagttattaagatgttcataaggaattagagggtggacttaatctgtattcaggagactaaaattcaagccatgtcggatagcattgtgagaagtataggctccggaagattcctagattggaaagctgtgaatgcggaagggggttcgggagggattctgatatattgggataaaaggtctttggatattctagattgggaagagggtcagtttactttatcttgcagattccggaatgtagaaaatgggacgatatggatttttacgggagtgtatggtctgttctcaaaattggaaagggatgcattatgggatgagttgggggcgattagagggttgtgggaagacccttggtgtatagggggggattttaacattactttgtttccgagggaaaggagtagccagaggagaacgaattcagcaatgaggaaatttgctgaaatagtggatgatcttgggctgatggatcttccccttcaagggggagaatttacttggaatgggggacaaaacaatcaggcttgggcaagattggacaggttccttgtgtcccctagttggacagatcaattcaatgggattaatcagtgtaggctacctcgtccggtatccgatcatttcccaattacgctaatgggggggggggggggataagacgaggcccgactccattcaaatttgaaaatatgtggcttaagattgagggcttcaaggatcttgtgcacagctggtggcaagggattgaggttaggggcagtgctagttacaaattggctactaagatgaaggaaatcaaatagaaattgaaagtttggaatagagaagtctttggaaagctggagagcaataaatccttagccttgcagcaggtggaattttgggatagggaggaaagtgagagaattctgactgtggaggaaacagagcttaagaaagaagcaaaggataattatagaaaatgggtgattatggaggagactcattggagacagctctctagggaaatatggctgaaggagggggatagaaatacgggtttttttcatcgcatggcaagcgctcaccgtagaaataattatttggagagaataaagatcaatggggaatggctgatagaggagcaggaaatcagggaaggaattgctaatgcgtttcaaagtttgcttttagaagacatggggtggaaggcggacatagggagccttcagttagatcagatcaatctacaagaggctgagaacttggagaggccctttacagaggatgaaatccatgtggctttgatggagatgaatggggataaagcccctggtccggacggctttactatggcattctggcaaagttgttgggagttcattaaagaggagattttggaaatgttcaaagacttctatgatcacagttctttcctaaagagcctcaacaataccttcttggtgctgatccccaagaaaaatggggttgaggaccttagagacttcagacctattagtctcttggggaggctttataagttattggctaaagtgctagctaatagactgaagaaagtagttggtaaggtggtttcctcttctcagaatgcctttgtgaagggaagacaaattcttgacgcttctttaattgcaaatgaagtgatagacatgtggcagaaacaaaaagaaaagggcattatatgcaaattggatatagagaaagcctatgacagcatcaattggaagttcttgttgaaggtgttgcaaaagatgggctttgggtctaagtgggtggggtggatgtggagttgcctatcctcagctaaattttcaatgttggttaatggagtgcctgcaggtttcttccctagcactaaaggccttagacaaggggatccgttgtctccttacctcttcattatggggatggaagtgctagatgttcttatcaggagagctgtggagggagggttcttatcaggatgtagcataaggggtggaagtggcccctctttgaacatctctcacttgttttttgctgacgacacaattatcttctgtgaggccagaaaggatcatctaactcatttaagttggattttattctggtttgaagcggcttcaggcctaaggattaatttagccaagagtgaaatcattccagttggagaggtggtggaggtggaggagttggctgttgagctaggctgcagggtggggactttaccctctcagtacctgtgtcttcctttagggccccaaatagagcgccttatatatgggatggggtggaggaaagagtaaggaggagactagctctttggaaacggcaatatatttctaaaggaggaagagtcaccttaataaaaagtaccttggctagcatgccaatctatcaaatgtccattttcagaatgcccaaggttgttgttagaaggattgagaaagtgcaaagggattttttgtggggagggggaagtatggagagaaaagttcatctggttaaatgggaggtggtttgtacagacaaagataaaggtgggctaggtcttaggaagctagctttgttgaacaaagctttacttggcaagtggatatggaggtatgcctgtgacaaagataagttgtggagacaagtgatcaaggtgaagtatgggcaggagggtcttgattggaggcctaaaaaggcaaatggggcgattggagtaggggtttggaaggagatttggaaagaatcagattggtgttgggataacatgacattccgagtagggaagggcaacatggtcggtttttggacagatgtgtggtgttcagaatcctcattgtctcaatgtttccctcatctctttggtatggctgcgcaacggaattcaacggttgaggaaatgtgggatcaaaattcgggtaaaggaaactggaatctacacttcttgagggacttcaatgattgggagttggagttggagttggttggggactttctccacatattgaggggtttcaaaccttccttggaggaagacttagttctatggaggaaaggaagaagtggtcagtttagggtcaaggaagcttatagtttattgacgaagtctgatgatataggttttccttcaagaagcatttgggtggcaagagtgccaactaaagttgccttttttgcgtgggaggcgtcatgggggaaggtgctaactttggatagacttcaaagaagaggatttcaacttccaaatcgttgttttttgtgtggatgtgaagaagaaagtgtaaatcatatccttatatattgtacagtggttagagctttatgggatattgtttttggtttagttgatgtgaaatgggtttttccaggaactgtaaaggaggttttagctagttggaggggatcgtttgtgggaaagaaaaggaaaaagatatgggatgtcattccgttgtgtattttttggacggtgtggaaggagaggaatagattagcttttagggggggggggggttttgaatgttcaaaagttaaagaattattttgtttgtaatttgtggagttgggccaaattgtatgtaggtgaggaggcgttctcccttataggcttcttagagtggatagcttccacttaaagggaggtgattctttgtttttggtttttgaggcctaagctgccttgtatacttcctgtatgctgtgcggcgttttgccttttttattgcatatcttttacttatcaaaaaagaaaaaaacttaatatcaccatttaaagtcaaaaccaactttaagtgctaagtcaaaatagttaacttattcttaatctcaaatctcttttgtctcatttacctatgtttagtgagaatatattttacaactatgactttacatttacaaatcatcttttataataaattatttttgtagttatccatgtatctgcaatctttaaatatgaatgtttaaaaaataaatttattgtttaagattaatgaaaatataaatgttaattaaaattaatgagagtaaatatgtatttagaatagattttaagttaatttttccaaacaactttaatacttagagcaaataataagtgataagttttaagtcaataacttaaggacaatttgatttaaagtcaacttaagttattaaataataagtattaaattttaccaagcacccctcagttctctttgctaaaacattgcttgataataatgtaaattttagagggcatagagtttgatgatctttgttgtagttagcagagccagagaagataggattcagtcccgttgcactgagttaaaccatcagttcactgaattaaccccaccaccatgtgacacaaggtacctttttggaagtaaagttttggttggagatacagcataggctagcctatatggcagaaaaggagtgttggtggagaacaacattgaggcacatggtttgaatttgtagttgtgatgagtttcttccccaaacaaggcttggtagaggcaacagtcctagctggcctggacaacactagttcaagatattctaacagggatatcccaggagaaaacccaatcagtagggttagtttaagtacccctgctggttaagtagtgtgcaatgcatttgataattgaaagatttgtcactatgcaaatggaaggatggaaacaagaaccaatttcatagctttcacattcgtttttgaaaaaataaactgtgaaaaatttattgaaaatggtagaaatatttgttttattgaagtaaaaaatagaatttgtatttaataatatgtgaaataaataggtttattgctccctagttgggttctgccttcaatgggttcattcaagttaaattttgatggacgtgctttaggacaaccagggcaactggagattggaggagtgataaaaaaatccctagtatcgtggtcagagctttttcaaacccagcaggagaaggcttagccatcgaggtatgataggtgtctatcaatttcctcattcaactaatagtgttgttgatcttttagcaaagagaggagcaattttttgggttcattttctaggagattattaacccccttgaggagtgttgagttgcttctccttgtatactgatgggtgggtactctagtgatgtatggatgtccttgctctattggagaagttttctccagttcttttgatcagattttgtaaaaagattgaaggattcctcatccttcatttgtgattcatatcaatgaatatgtttgtttttgataaataaataggtttgctatgacatgggacctaaaggctgcttgtttgggtactaacgctatgtttagtgcaaagaaaagaaaaaaattgctaagaaaaatgattttctcatattggttttttcctatgaaaaataagaaaaaaaatcaaatataattaaaaattcatatatttttaaattatttaatccttatatataagagttataataagtaaaatgagtttgaagtaacatacaaaaataatttattgattctaaatctattttttattttcttacacttttttcttttacttttcctgtctatttcctttccctcgcattttccctcagattttctatgccttaagtgttgcttttaaatcccaagcatgaaaaatcaaggtaggtaggtatttaagtgttgtaatactcttctatgtatacttgaaaatagggaaaacattcagtaccctaatttaaatagttcattttaacacatcgagtggcacatttggaagtaaaaacagaataacaataagttgcaaagttcaacttcaaaaacttggaaatccatttcctttatatggtaaaatttagaagccaaacctagaaattagctgaaaaagtccgtttcaagatttcaaaaccactgcaacttaaagtttgtttgcccttttcaattccagattagagaaggaagggtccaaggtgtgggtca

SEQ ID NO: 10493 - DNA, 1112 bp, Vitis vinifera
  Intron number 4 from transcript GSVIVT01008807001 (locus G SVIVG01008807001) derived from phytozome v7.0 (chr-ID chr1 8; pos 2299459 to 2300570 reverse strand)
caaaaacaaaatcaataaccagagctaaagttgtggtgagacactttttttggttatatttagtttccaaaatcgatttcaaaatactcttctcatgtttcgtgtgaaaaaaaaaatattatctttgaatttcttgtcggctatctattcagattagttgcattcctcattttagtttctttacaagagcatgttctcaatgtgacaatgaagagacctttaggtggtaagtgaaaacttaatgctttcattttcttaattttcttcccatatcttatttttaaaacaaatatatatatatatatatataagatttgtagtaaaaggggcacatgttgcctcattttttccttcgagtttcactggaccaaattagtgggattcttcacaagtaaaccttggattttttatacttctatggattggtttgacttggactctaaataatccatcaattgatgttcttgtctttgagatactgcattcaatgcactgttataccgtatcactggggcgctagcactacataatttagttggaccatgttgttgagagtatgcagtcgtttacaaggccattctaattcattggggggggggggggggggaggagttccaagacatttgggagcatacttcactcaatttgataatgcttctcttcccttgatttgatgatgcttttcttcccatcttttagagtcttccattaaatctccagtgcttgtttttgtttccatcttagttaaatttataccaagagtaagctatgaggcaacatgaaaagaagtcagaaaaaggcacaggggattatacatggtgggcattttgaataggcttttggagatttggatctcttcatctgatgccacgatggagttttagtgataccatgtggaaactttttcgctatctacataaagctgcaaattttgttgatttaatcctgtaaatatgtaattcctggttaagccttgattctcactctctgtctaaagggaaagatttgatattggatgaatgttgatatgccttcatagagcttgctaaccacatttattttcttcacctttaacaggtcacagctcctggaggaaggaacagggatagaaa

SEQ ID NO: 10494 - DNA, 6827 bp, Vitis vinifera
  Intron number 4 from transcript GSVIVT01029899001 (locus G SVIVG01029899001) derived from phytozome v7.0 (chr-ID chr8 ; pos 1179821 to 1186647)
ctgggaatacctctggtgaaggtaagaggtttgcgatgccatgtaattctgtctgcatgatagttttttctagaataaagcttgtaaagctatatattgcatggcatttttttgataggaaacgacaaaggaatatattgataaaaaggaagtacaagagaaggatgaggaatcctcccaccaaagaaaaacaagactacaagtaatcaaatataagaaaatacaaagaaagaacaagcaaacactctagttacacaccgctaatcaatcaagttgtaacacgttaagaggtatctccttaaaaaccttagaacaaaaagcccaaagagaagcaagaaaacgaatagaatcctaaagatactctgaattccttgctttatcctcaaaaatccttgcatatctttcctgccacaccacccatattaactcgatgcacgcgtcttgccataaaacaatccctctcttagaagatccaaaaccattaaaattagtagataacatgttagagatgctccttgggggaacccaatccgtctttgctaattgaaataatctgtgccacaaccccatcgtcaaagagcaatggaggaaaatgtgatttactgtttctccatgcttcatgcacaacttacaaatgtcgggactaagtgctttgtggggtcttctcaattgtagcaagtcattagtattaaccttcttgtgagccaccaaccagacaaaggacttgactttgaaggggacttgagaattccagacgaacttagtagggaaaactggaggcgaatcagaatattgagataagacaagaaagaaagatttgactgtgaaaaatcccgaaggagataaagaccaggatctcttatttggaaccgaaggtgatatgtgtagacgatcaagagaccgcataaggccttctaaatcttctatcttagaatcggaaagatttcgacgaaagttgaaattccaagagaatgggcgggtagatccaaggattgatgaaataggagtatttttatccgtgactacactaagtaatcttggatattggactcccaaaggttgatccccccaccacaagtcttcccagaaccgaattctatccccatcacctaccacaaaccgagtaaacttggaaaactcttggaagacttgtgcaatggccttccaaggacaatgatgtgaccatctaactatattgttgacatcccagctattggagtgtgatccataaatgcttaaaataacctgatgccacagagctgaaccctccctaggatatctccacaaccacttccctaagagagcgacattccttacagaaatctttccaaatcctaatccccctttcgatttcgacttacacactatgtcccaactaaccaaatgatctcttttgccttcccctacgcctgaccataaaaaatctctttacagtttctcaatttttgctgccactgaggtgggaatcttaaacaaggagagaaagtaacatggcatatgggtgagacaagattgaatgagggttatcctgcctccaaaagataaatacactttttgccacccatctaatctccttgatatcttctcaatcacaggatcccaaaaaccacacgccttaggattccctcccagaggaagatatattgcatgacatggatagcaatttatgtgagcttttaagtaattgcgggacattatgacagttttttttttcctgataaataaaaaccaaattcattaaaaataaaaaatgccacaaggacgtaccaaagtacacatgaagtatacaaatagcacctaatagcacaaaacttggaaaaaagcgccactcttaaccataacccaaccactcaataaaattaaagaaagacaaacaatctatctctatgtactgctttacccaaaagaacaaattcctaagaaagaacatctttaaaaactgagcagaatgctcctcattatcaaatgccctgagatttctttccttttggactgtccaaaaaatacataatggagctgttctctaaactttttttctttgtttgcccacaaatgagctatagccccctaataaagcctccttaactgtagcagattgcacctaatggatactaaaaagatcaaataacaacttccaaagaatcctaactagtgaacaatgaaggagaggattctttgtcttctttgcaaagaaaacacccattgaccaaagaccacatgtgtttctaaagctgatctaaagtaaaccttttccccatgaagcctcccaagcaaaaaagttaactttagaagggacccatgaattccaaactactcatgttggaaaagaaacaacaacccctagttccaagacaacataaagttgcttaatagaggatctctcacttcaaaggttaaaatattcttttgtatgtaatctttggtcgtgggtcaggggttccttagcagagagtcattcttctcttgtaagttttgtagactggataggctcctagttagggaaggtggtgtgtatactccctgtatacttagagggcaccggtttttggtgtttcctcttttcgtttaatatacttctttttacttatcaaaaaataaaaataaagttgcttaatagagaacttattaatgtccaaattcatccacaccatcttatctttcccttgtctataaattgccaatccatgcaatcgtaaaattaaatccttaaattcatctacctttcaatcattcaaaggttgataaaaacaagggttccaatgccctctctcccttaacccaaagatttgccatccatgcctcttttgaatcaactaagacatataaagaggggaaggaaacacacaatggttcataaccacaccatttattcgtcgaaaacttcaccctcctcccgttacccaccataaaagaaaaatgacccaagaaagtgctttgttccttcgtaatggatttccacaaccctactctatacccatctctaacttcaccagaccaccacccacactcttcctctccatatttgcccttgataacttgtgtccaaaaggcacatctttttgtggcaaacctccatatccatttgtacaaaaacaccttatttaacaaagaaagacgttgaatcgctaaccctcccttgctctcctccaaacacatagtagatcgcttcacaagatatatcttcttcaccaacccttcacctccccaaggaaatcctttgaattttctctaaccgcaattggattgacctcgaaatatggaataaagatataaaataaatgggaatgctagtgagagtaaagttcccccctttagagatgaattgtctttccacaaagaaagtctttcacgaaacctctcttccacccaatcccatactgccactgatctaaaaggagctcctagaggcaaccttaaataggtagaaggaagtgtgctaactttacacccacacactgagatcaactcctcaacttggtccacactaccaataggaattggcttgcttttctccaaattcactttaaaccccaaacaagcttcaaaccatatgagaaaccaacataaatgaatcatttgatcttgggaggtctcataaaattatcaacaaacaacaaatgggacacctctaccccatcacctcctctccccctcacctttacccttgaaatataaccaccttccatagctcttcgaagaaaacaacttagagcctccattgctacaacaaataaataaggagataaagagttcccttgccttaaaccttagagcactaaaagaatcaagtaggataaccattaatgatcatagagaacatggtagaagagatgcactatttaatctaaccaacccacctctgtccaaaattcatcttttcaaggacaaataacaaaaagtttcaattcacatgattgtaagcctttttaatgtttaacttgcacaaaataccacaatcattattctttagcaatgaatcaatggcctcatttgctattagcattgcatcaagaatttgtctatgttctacaaaagcattttgtgactatgaaatcaccttacccaacaccaacttgagtctactagctaagacctttgcaaggagtttatacatactacctaccaaactaataggtttaaaatctttaagatcctctgcaccccccccttctttgggattaacaccaaaaaagtagcattaagacttttctcaaacctcccatgatctcaaaattctatgaagaaacccatcacctcatccttcacaaaatcccaactaaaaagccagaaagccaaagaaaacccatccgaccctagagccttatctccatttaaatccaccaaagcattgaaaacctcctcatctgtaaacaactcctctaaccctacaacctctgcaacatctaaaactttaaaatccaaggtattgatacttggtcgccaatatgggggttcaaaaagaatggaagaataagccctaacgatcccttcctttaaaccaatgtgctcaaagaattccctatcaattttaatcctagtcaagcaattcctcctcttatgagcattagccattttgtggaagtattgtgtatttcgctttccctctttaagccacaatttcctagatttctgtctacatgaaatttctttaaaaaatgcccacttactataatcccctaaagcctgcctttttgcatcagcctcctcagtggtaaggaacccctccctctcctttgcatcccaaaaacctatctcattaaaagccacatccttcttgaaagaaacattaccaaacacatctttattccacctcttcaaatctgatttcaaagatttatgttttgaggccaaaatgaagctaaaggatctagggaaatggtaccttgaccaccaccctttgacaagatttgtgaaaccctccgcctttagcctcatgttctcaaacctaaacggaataggtctagttctcacggctactccatctaacaggattggagaatgatctgaaaccggcttaggcagaatacattgaatcacaccactgaaatggctttcccaagtatcgaacaccaaaaaagggtccaatctagaaaaggcaaggttattcaacccactgctgcaagtaaaagaatcctctgacaaaggaagatcctataattccaattccttaacaacctctaaaaatcttctcatcgttgaagtcatcttattgcctccattatgttcccacgagaatctaacgatactaaaatcccctcccacacaccaagggtcagcccatagtcccttaatggcccctagctctccccaaaaatcttcttttttacttcctaatgtaggaccatacatccttgtaaaaatccaaacaaaatgatactcacaatttttgaaacgacaagaaatcgtaaattcaccaacttccattcccagcatctccaaagttcaattctcctaaaaaaacaagcaccccaccaccaacacccttggcatttacaaccccccactctaaaaatctgccaactcccaaacttctaactaaatcccttgatatcaattggacctttgtttattgccaacaaaccaaatatgctttttgggaatgaatcaaagacttaatgatctttttctcttatctgcattgtttatcctattaacattccaagagatgattttaattttcatttacaaattggaattgagtcccaacctcctctgccactcctgttcccactgcctataacacccaagtaattcatcgaacattctaacttttttaattcacgttcaaactttgagataacctttttccttctcttcctagccttgttgccctttgcctcccttctatctttcatttttcaaaagagcgacaaaatctcattctcaaacccctcacttggcatacccaaacaattattgaatgttgtgagactactggtcaaccaatctatctttagtaactcctcccttaaggtgtccccaacgaaaggaccctgaagttgaacctctctctccaacgaattggcctccacacttacctcttcatttgaacactccacaaaagtgtcatccaccaaaaccatgcacaacgaacccatccccttgccctttaacaatggatcagaaatcctcaaaacactttgccagaagaagcccaccctcagacagagaagaagaaaatgagacagcccccatgtctaatgaagaaagaactgcacctggaaatcgtcctgccttcgccaaaagggactcatcgacaattgggtgtgagagagaactcctttggaacagactgtcacattatttgaacatgtcatttctaaggtagaattgagtgattttataagttcttaatgttcaacgatccttgaaaagcagatgacttatatgtcaaaggtgttcgcattgtgacaagatgtaattcaggattgtgctcgatttcttcgtcttgtactctaacaaaaagctacaaggatactcttctttttagctgtttttggttttcctgacatctaacatgtattgatatggctattggaaaaataaggaaataaggaatcttcttattcactgattgaaaaattagtacaaatagatatacaccttttatacttgtacaataaatggaaactatttagaggcattcacactatttagaggcgttcacgctatttatctgagcaaaatagttatatcctaatctgttcatttcatgtttaatctcttgcagtagcttgtcttacagatataaaattttccttttcctttcacttcatttgtgttatatttgtgctgatcaggaaatcagcagcgagctgccttggtgg

SEQ ID NO: 10495 - DNA, 2508 bp, Vitis vinifera
  Intron number 1 from transcript GSVIVT01001760001 (locus G SVIVG01001760001) derived from phytozome v7.0 (chr-ID chrU n; pos 6216528 to 6219035 reverse strand)
gtgtcatgtatctaaatagaaatcttaattgacagttttggctgccaggaaacataatggtatgctgctgctgataatgttattgctgctatttatgctactcatccaactcctatggagaaatatggaagttgtggttgaaaaggtttgcaataggtttggtggagtcacatgtattgtttatactaatgttttaattctattttcatctatcatgtgctaatatgacaacttattatcatgtcaggttttaatgcatgacttcattataagatataatgtcatggcacctacgcttggactagtctcttatttacccatattggagacatacttcattaataacctagcaaggtattaagttgttcttgcattacctcatttgcagtttatttttttattaattggtgtatttttttcacactaacgaaaaccagagtaaaattttgaaacaaataaacagaatactcttagtcatgactctttttctctctaattttgaaacgatctttaaaaacaaaatttaaaaattaccttgtgtccaagtttaaaaaaacatggctaaataggccttgaaaataaataaactaggacaaatgaaattaattattgggacatgaaaatattatataaattctggttaaatgaagctgattatctgatatagatataccattctcattctttagtcttgagactttcctctctttcacctcttttcttctcctcttctcttttatgtaccttattgtcgtcacgatctcaccttctcgttccaaacaaaaacaaattttttcccctggtagtgtagaaagtgaaagaaactggaggaggtaggaagacgaggcttttgtgtctcatctatggtggcgtctccccgaagtggaatctagggcgcggcggaagccatagacttgaaagaaggggaagtgaaaggcggaggacttttgagttttattggccgagaggctagggcacggtgtgatttggttcgatcttggtgtggaagctcggggaatcagcttagtgcgtagtggttttgtggttgtgggattttggaaaccttagatttgggtcaaggttgtgtggttggctgattaagctaggggggggggggggggggggctgcccatgcgattgactgggttttcatgccgtcaaaaccacttccttgggatcggaaggacttcttcaaggagaggagaggaagcacgagaggtcggagtctttaagtttgctgcaaaatagaggactcgcatcagggttcttgggagtttgctcgccggaatcggcagacttgcgctgtcctataggtgagttgaatcccaccaggttcttgatgatgtcggttttgctttaaaccaagaaaaatagtcgggttcttggaaatttttttatgatttgttcctttttggtttttaattttgaatttattctctccacggaagaagcacgagaggtctgagtctttaggtttgctgcaagatagagggacttgcatcaggttcttgggagtttgcttgccgggatcggtagactttcgcccccctacaggtgagttatgaatccgggttcttgatgattgtgatgaaattcgtaggttttggtttaaaccaagaataataatagggttcttagaaaatttagtccgagtccttttgttttatttttttattttttatgatttgttcttttttggtttttaatttattctctccacgggtctgattctttgttttggggaattagtttttgatgatgattctttcatggttattgtagatctgtgttttttagtccatttgtttgttaatgtgctgtttagttgtgcagaaattgtaattaaaaaaacagatggttttttatctttttaagtcaaataaaactacctgtaagaaaattctaggttttgaatttttgaagtttcatcgtgttctttggtattttgatttaccatgaacttttcttacctatcaaaaaaaaaaaaaaaaaaaacaaggctgggttagaaattcatagacatcaacttgctcaaatccatgatagaaaaccctatcaaagctaaaggtaaaaatcctctcccttctcatcctaccattcatcaattcaattattataatgatttttttcatgaataaatgaacagaaacagataagtagcaatttttagtgaaagataaccttgaaaatggaagtttgtgaatctaggctttggacaaaaacagtatcaccatgatctcttctctcttttgaacttaaaggtctaaagcatgcatagactgttatgtgcgacatatttttatggtgccaaaaacctttatcttccaagaattagtgcataactatcatgaaattcagcaaaatagagtatgacttaatccacctgaaaattctagaactagagctttgttttgtcattgaggcattttctaattcattactgaaaattttacattattatttattagtacagtatccactatcacacaaacttgtatttgtctctta

SEQ ID NO: 10496 - DNA, 3531 bp, Vitis vinifera
  Intron number 10 from transcript GSVIVT01008395001 (locus GSVIVG01008395001) derived from phytozome v7.0 (chr-ID chr 17; pos 2534703 to 2538233)
agagcaactgtctgccagcaagataggcccaaaaggtcaaggtcaaggtcaaggtcaaaaaataaacctaattctgagcagagttctggagcaatagatgtggatcccattagttccattttacatgatgacgcagatgacatgacacttgcttgctttataaaccataggctgcctaagagaaggctcaaacccgccaaaaatgatgatcaaggattcaaagttgcttcccctccagtgtgaaaggcatctaagatgcttccaaaaccagtaggacaacttcatgatggaaatcaaggacttccccttcatgcaagattccaaaatgtttgaaaacttattgtctcctgatatgccaaccatcacagcaagtaatggtgatccaagtggagtggatgtggttaatattgggtctattgccctccatgaatcagtggaggaaacaggtgaaaaaaactatagggtatttatgaagtgaaaattgttagatactaactgattctggccgtgggcttaacttagacctaaaggaaggggtggatgatttagaatcaaggaagatctcttgaacaatttgagatggtcgtctcgcctggggttattcagcagcctgcatgttgggaatgtggacgcagatatcaaacccacccaacaacaataaaaggagaggaagagacacatgttcccatgtcaatagatacaaaatttggaagctggtgtaaggcctaccgaggtaccagttttcaaccttagagatgagtaccatctttgtatttgatttcttcacacatagagatgcgcgtatgcgtttttggtcgaatctagtgagtttaaggatttataattatacctgtatagctgcatatacaacagggcattctttttataatatgcacagctgcatatggaaacatggctttcttctagctggattcttttgtcgattgtttgtttggtgttctcgaccttgagattgagatatccgaaattttgagaaatgggaatttgagttgaagtttccaggtattcgatttcagttgatctatcagtgggtgtgccataaccgtgaattagtcatggtgttctctgtaggggtggtcttattcttttcttttaggtatcttccttaacaccgaaaaccctcccacactagaagagtttgtttttaatccaaaccaaattttgaaaatttaatcatcaccctcttttttctcattttaacaaaagtgtctcacccttttctcgtaaatataaccgtttttttttaaatctacatttcaaataaaaacacgggaagggtaggcctgtttggttcatgttttcatgaattgttttctattcttgaagacaaaaaatttgtttagaaaagggggtatgtttttgtttttgtgttttttgtattctcaaaaaccgcttttttgagaacaataaaaagaggtttttattgttttttcactactcaaataatatattgtttttcatattttcttttactttttttttgcgttttcttagttgtttttttgtattttcacaaaagtgagttccactcaaccatcacactctcacccgcaaattctttattcttccttaaattattaaaattaatatatttacatatggtgataaagtcattatttgtttaagaaaattataattgatgtaaaaatttcaaaatgaaataactttttttttaatttaaatgaattgtacatataaaaattatttatatatttataatatcaagttaatggaagaaaacactttattaattaaaaaaataactttcaaacatgttttatgttttatttattataaaaacttttttattaactccatcgaacatgtgttttttttagaacaaaaactattttcaaaaatttagttcccaaaaaactatttttcagaacagttttcaaaaacaacaaccaaacatgcccctagattcacatatttggatatttttcatcccttttaactattttttttaattcgaaattcaaaatttttggaggtaagcaaacaaaatttatttactatagaattgagcaaaagttttaggattttttatatttaaatgataaaataaattgatgaaataaaggcaatttttttaaaatatttgttttgttataaaatttatttatcataaagaagagataaaaaaaaaatagtttatcatgattactaattatttagttaatgattaataaaattgtaaaataaaatatttttcttttaaaaaaaattagaaattttttatttcatgtatatcataattaatataggtaaaaatggtttcttaaaaaaattatttatctacgaacttatttagcatgatgaatagataaaaaagtaaaaacttttcttacttcaattgataaaagaaattagtaaaataaaatattatattaaacttgagtagcgaaatgtaattttcggccccatgccaatgcttaattgaaatttagatgtgtttggattatctactttttagaaatataaaattttacttctctattataatttgataaataaaacaatcaattagcataaaaattatgatacgtgtttaattggaaaaagtgagttttgacttattaatttgaaaaaaaacataaaaaatggtcaaattttgtaaattgattttatcttcatatatttaagaatattttataccaaatatattttttggtaagtgaaataattatttcttaaaatgatatttttacttattgtattaatgatactattgtgagaactgatttaaaatcaataatataataaattttaaagattaaaaatatagttataacaaaaaaaaactttaaatttaaaaatataaatataaaaaaattaaaaatataatatgagtcaatattttatttttaaaatttttaaagtttttttttatttaattgtcatttataacattttaccattatcattttattcatctcgactttgcctttgactttgatactgattattaaatttggtttgatcatcttatttgaaaacttattaatatccaacgaagataaataagattaaataatatatagtgaaaataaattaaattttacaacatttatttgtcttagtttaaataatcgattcttcgaacttaacaataaaattattatcgagatgcatgaaaaagtaaataatatgtaaaaaattttataggtaattgttagtaaaattattattatcataaaattcgtatatattatgaaatttaaagctttatataaaaaataaaattaataatttgaaacacataaaacaatttgaattttaatcatgcattatttacctctcacataggtcaattaatataattttaaaattaaaatcaaaatattttgcaatagataaaaaaatactttggaaaaaaataaataaatttataattaataacaaatatattgaaataaaaataaaattggatacttcgacaaaaacggaaaagagaagaaaaaggaaaataaactccaaacgaaacggatccattagggtttttcctca

SEQ ID NO: 10497 - DNA, 5350 bp, Vitis vinifera
  Intron number 8 from transcript GSVIVT01022255001 (locus G SVIVG01022255001) derived from phytozome v7.0 (chr-ID chr7 ; pos 17890653 to 17896002 reverse strand)
ttactgaaacacaggtattatatttaccatcaataaccccgcctgtatcttgttcctcctcatgtgcattgttgatacttattctgggaagatttcctattgtaggattgttttccttaaaatgaagattgtaatgtctgcaaagttaattttgttaacttcatatgcattgttaattttgttaagatgttgcttaaagatttcttcgttggcattttagactaaactgatgcagaatttcttgtttctcaaaagaaaaggaaaaagaaacaaaaagtgctgaaagattttattctgcttgctgtgtttaaactgttgaagtatctgaagtgccttttttaaactcagtgtgatgtttctactcaacctatccattgtgatatggtggattctcaggatttcaatgtttctacatttaaataaatttgcaaattataatatcctgcttatcaaagtaacctttctaatgcaatcagtgtcttttctttttgaacacttccctctgcatggaacttatttgatatcttcataccccttttaatcaaatctacagatttttttttttttttttgatagataaaatctgtagatttgatatataagaggaaacaactttctttctgtctttctttcttttattagcaacatctaacaaaaagcggcacaaaagcatacatgaagtagataagggcatgaaaaggctaaaccaagcaaagggatacacaaaaaacaactccctcgtcttagaacttaatcagtaaagttcactatagacaatgagtaatctcctatgtacactctaacccactccaaacaattatacataaaggattgtttaattgtttgatccacatttttattaaaagttctatttctcttcttccatatgtctccaaataagtacaaaggagcagctctccaacctttctttatgttctttttaataaaggatccataccagatcaagagtgcatttcttacggaggaatgcatcacccattctattaaaaaaaaaaagcataaatcaattgccacaagatgatttttcaagcagtgaaggatgatgtgatcaatcatttcttcttcttctttgcacatatagcatctattcgacatcttcaatcccctcctttttgagcggataggtacctggcattcctttatgttaggcactactaatatatatcttctatttgcctatcaaaaatggtaacaatttttttttttaaagacaaaggaaagttagtccttaatggttaagtaccaaagaatccctggaccacttctaacttctatatataaccatttccatgaagaaaaaaatggagaaaaaaaatacagaattaaattctgatctttggtggataaaaaaaaggtgaaattttgctcttggttggacattggcgttttgggacagtcggattcagttgttagatatggaaatcagggtgttttctctttcttgatgtttcataaattgcagagatggcttttgttgggtgctttcaaaggtgaatagtcctctcttgggttctgagaggaaggcctggtgaaaggagttagaagccatccaaggtctttggagggaaccacaatgcattgtcacagatttcaatttggtgcattttccttatgaacttagttgtgggagcaattttcctcccttgtggattgatagaagaattcaaccttgtggaccttcaaagtatccttcttggaccaatgtcaaatggttaacttatcatctgcaatagtagaattacaagaattgaaaattgttttcttagatttaaaatatatatggattggggaggaaggttaagcaacttaatgtccaaggttttctagtaacaaagcttgtaagttaaagagttctaagtaggaactaaaaagttggaataggcagtctttcccccccaccttatatttttgtttgtaaagctaatgcataggaggaagtcaaagtgtgggactcaaaagagagatggagatttattagttgaagaagtagcagctaggatattaaccacccatgagtattgcaaattggttgtgatggaatttcttaggaacaatgctcaaggaaggggacaagaacagaaagttctttcatatgatggccaatgcttatgggagaagtaatttcatacgtagtttgtgggtggaaagttcttggttgcatgagaagtcttgctctaagatggggaatctctagcttcttccaaaaacttcttttagaacctagggttcatcatcttgggatcaattgggaatttttcaagtagatcggtgagaatgacaaaaaggttttagagaaagcttttagggaagaagatgtatctgctactctttcttatttacgtggggataaatcccaagtccatatggcttcaaaatggctttttggcatcactatttcatgtcaaaggcaatgaaagaaatgcttattaaggcttcaaagtactgtatagtagagttaagggggtcgacatctctatcttctatttataaatgatagtttatggttttgtacaaccaaagaggaacgcttattgtatataagtttggtgtcgccatgtttcgaaggaatctagggcattaagatcactttagcaaaaagtgagcatattctattaggagccataggtggttgagtcaatggcctctatattgagttataaattgggcagtactccatccaaatctttgggattgtcattcattcaaatcaaatccaccattgtatgtgccttagttaagtagaagttgaaaaaaggttaaccactttgaaaagtcaattattgtctaagggcaatggactttattgaagaacaccttctctagcctttctatctaattttttgttggctttcattatctcaagaaacatatggtgcagtctagaaaagatttaggagaactttctttgtgaggttgtgtcctagcctagaagatcccatttggtgaggtgggcaattgtttgtttggaaaaggcttttaagggtttgggcattagaagttttgaggtctaaacaaggctttctaagtaaatggatttggagaatcatggttgaatggaccaatttgtggagaaaagtcatagtagggaagtatgagctagaaagggtggaccgggtggtgttcaagggtgtgtagagaagcttatggcataagtttgtggaaagccattgaaaataattaagttgattttagcatttgggaagggcctgattgttgaaatttggaccaattcttgatgtagaagggccccttcaaaaggtcacttctcagagtttttgagttttgttccctagaacttcaaaggagtttaggcattgaacttttgagatagggttaaggcctttggaagttatgagtcttagctttaggaggcacttgatggtttggaacatctttaagaaagaatcttctcaagatgcattccaatagctccatctaaagtaaggttttgtgtcgaaggtggcattttgagaaaattcttacaattgaccatgaagagaggttgaagcaagtagtattgtctatataaataagacaaagacttagtatatcattatcctcatccattgtgaatggttttctagcctatcgtcttcagtgttctccttatctagcattctatggattcttcctcgttcaattagagaaatgttgtttgtgttgcatggtagctttattgaaacaattacaagctagtttggagcctgattccattatgcttattttggaccatttggaatagtgtaacaggagaaatttttggagaagtgttgcaatttatttatttttattatttaaaaaaaaaaaaaaccaaaaacaaaaatattttcattatcataataaataagagaaggatgagaaatccaacccaagctagctagtctaaataatttagatcataactctaaagttattagacaatgtaaaaaaagatgatctattgattttctaatgcttgttgactaagggctttgaaaagtcttctcacctaaaacgagtcattggtattcacctgaaatgagtcacttgaaaagtctttatggcatattttgttctccttttttgatgtgtcgtgggtgtacccatcctcgattagagaggctttgttaggatgacatggttttttcgtgcgtaagaaaaggaaaaaggtgtggtgagctgctcttttatgccttttttggactgtttggaaagaaagaaatagtagggcgtttgacaataaggggcgattgattcaagggttgacattctccttcatttgtaatctttgggcttggtgcaagttatacataattcctagtcctctttcctttgtagactttgtggagtggttgggttcaggctaagggggttgttggtggtgtccctctttgattttgtgttgccttgaggtgtttctttgtatgcatcctatgtattgaaatgctttttttggcgttactttttataaaatgattctgactacctataaaaaaaattaaccaagcaaatgccttgacctttaatgagacttttgatttccatataaaattagctggaggggagaactgaagttgagtgattagataaggctaggaagaaagatttgacctaaaaattagccagaaaatgataatgaccaagctctcacatctcaagatgacggtgatttattaacactatttgagaatgaacatttagggatgaagaagtgttgcaatcaatcttgaatgtaaaaggtttggttttaaagctcttgtttcaatggtctagtgaggcaattgaaatttctaacttcttctcactagagtttgtaaatagtttggagcagtttagtcaagtgtatcatattctctattttcttcttggccttttaacgccttgtatactttttatgtacttgattgctttctattttttggtagttgctcttaatttgactacgacatatatatcttgcctatcggggaaaaaaatgaaatctgtaaaatagaaaaagaaaaaaagaaaaaaaaaaggaagcctaattattataagaatgaagatagagagagagagaggtaaagaaaaacaaaaatttgttttttgttttttttttttttctttttaccctaaaaggtcttaaaagttctttttttacctttttgagggaaaaattaaaaaagttggagtttttagctctgaggtcacctgtgagttatggtactaatctgtaccatctcttgtgttgtttacatatttttaatccttgagttttagtgtatttcacaaatttttcaaagcatttgtggtggtttgcttaacctttcatttccaactgtcttttttgccccacttttaggctgaatct

SEQ ID NO: 10498 - DNA, 15416 bp, Vitis vinifera
  Intron number 2 from transcript GSVIVT01022381001 (locus G SVIVG01022381001) derived from phytozome v7.0 (chr-ID chr7 ; pos 19397075 to 19412490 reverse strand)
gtcttgaatcggcttgcaggtgccttgagtctgaggtatgtggtttactagttcattatttgctctaattggtcttttttaccatctgagattgtgaataagtagctatctagttgatggagttgaaaattagaaatgctatacaagttgaagatcacagttgaattttgttaatttaaaaagttataccaaggtaatttgaccagaacagagctccaagtacaggataaaatgactcaccgaagggattaatggtgtgaagggaacaaccatgcactaatggacagtagactggcattgtcaacctttgaagacaaataatggtagcattaataggagctccaatagaaaaatttatttagtcagttccctagaagtaatctaagcattttgtagagttctttactattgggagtaagaactctagaataagtggagtcaagtggagctatagcatctaaattttctgtaaaatgagtaagaatattggctagaatattttctgcagaattctaaaactgaaaagaaatttcagtttcagattaaacaatattacatgtttttgttggtgaatccaataaaaacaaatgtggacaacccttatcttctattaatatctccccttgaagataaggccgagtaaagaagggctgattttatgcaaaagtcacacccaaagaaacaaaaaatttagaaaagagtgataataacatttataccctttttgagttgtagaatatcccacaaaaatacatcttaatacacatggcttacttcaatgtcgattatgaatataagcaaatgacacaaccaaaaatcttagggggaagttttggaaaaacactaaaattaggaaaatattcgtaaaacactttaatatgactcttaaaccccaacacccaaggaggtaacctatttatcaagtgagttgctgtcaaaacagtttctcctcagtagcttttaggaacatgattttgaaataaaagaggacgcgtgacttgaagcaaatgtctgttctttctcttagccacatgctgtggggtatcaacacatgaagactgattgataatgcattctctttgtaagaaagggcttaaaaattgattgaaatagtccctaacattatttaaacgaatgttcttaacactcactccaaactggtttttaatcatgctgcagaatattagaagaacactgctcttgtttgatttttgttttaaaaggaacaccgaagccattcttgtgcaatcattaataaaggttacaaaccatgttgccctcaaaacattatgaattctagatggaccccaaatatcataattaatcaacaaaaaaagaactaaagatctattattgctcaatggaaatggaacttgatggtgttttacaaatttgaaagcatcacaatgcaaagaattaacatcaatatctttgaagaaagaaggaaacatatatttaagcaatccaaaggaaggatgtccaagttgaaagtgatgaagccaaatggtatcttattggagctaattttttttatagagacatgaaattaagggttggtcaccattagtaggttcttcctcaagaaaatatgacccgtatttctccttaacaagtccaatcatcctccttgtaacccggtcttggaaaacacaatgagtaggaaagaaggttacactacaatttaaatttttggtaatttgatgaatgggcagcaaattcattgatcactttggagcatgtaagccattttttaaacgaagaggagttagtgtaacttccccttgactagcaatggttgatagagtgtcatcagcaactttcaccttcctattactgaagcatggaatatcaacaacaacatagctagaagagtgagttatatgattcttagctcttgaatctatgacataggagttggacatatttgaggcactaaatgcataagaaatagacttactagcctgggcaagagggcagggtgcagctggtttttccagcattgctaatggggtttctagatgtatgatctcctcctttttgaagcctttaatgtccatggctagcttttcttgttggtcctccatggttatatgagcctgactctgttgttggcttccctttgtaccaccaatccaaccaatatttttctgtttcctgtgaagtttccagcatgcctccttcttgtggcatggtttcttgcaaaacaggtacatcaaactccatctcggttggtaggtctggaattattccctgtattactatcttgtgcctcttcattctatttcaaggatactacagctgacccttcagtaacctgaatgtggagcataatcactcttcaactctcctctgcccaaatcaatgagaaaacttcactcaaagacaatacgtcctcctttcccaaaacttgcacatgaacttgatcagttttggcattaagtcctcaaagaaactcaaaaatcttttcccttttcacaaacttttgcaacataatagcatcttcattacacttgatttttttttttttaatgtcttgataataatcaaattcaagacaaaagctgttcatggtattataatactcaatgaccaagggattaccttgtttcatggctgaattctttctttagctcatagacaagagcagcatccttcacctttgagtaagtctgccgaactgcctcccatatctccttagcggtggtgagaaacatatatatatgtgtcactaacttctgaaaacatagagttccaaagccaagccatgatcattaaatcctccttattccatgcgcagaatctggggtcttccttgtttggaacagactccagtaagtgacccgactttcccttcccttttagaaaggttctcacaacttgggaccactttagatgattttgtccaccaagactatatgaagcctacaaattcaagaaattctcccatagtatgactctacagtgtctccactgttgagtttgtgacaggtttgggtttagtttcaaatgtctcagatatttagtcagaaatgagaaatctgtaattcaatgttaggttatttcgatatgggcactgtaggaatgaaacctgaagaaggtctcttcagaaaagttgctgcaggagtcagattttcccaagactttcctagagagcataggctttgataccatttaagaaaattaaaatctaaattttatctatccataattacagaatttatacaaaaataatttaaaaattctaggaaactaagatttcatcaattcctacaagtcagggatttgattatcaatccctataaatcaaagatttaaacttttacaactatacaacatagttgtgtagcaaatatactcctagattttccaacacttggtttatattaattcgtcaattattgtttcttgagcaaagttttagaaatcacccttgttttaaataaggatagatataaatacaactatcttgacaatagatgaatgaattggatatatattgaccaacctaattataagagggtcctgtttgtatcaggcattttttggttgttctaaactggatctactgcctactctatgcatttgtgaaagagaaataatagttgtagtagccatgtattggctggagaaggaagaaacttatctggaagccaaaagctaggcttgtgggatccacaatacatcaattaatattccttttttggtccagggagaagtgtcttgagtactttttcatggtcatttagctgctttattttgagacctatattggttagagctttattattattattatcagttttcaatttaaaaatcgagaaaattcaatctatggtagcaatactgtttttactattatgcaataatgttcatgccactgtaaataataataaatgagggtttttggtcttttggtttaccttttttttttttcttttagattagttgggccaagggataggatcgactgttattgacctttctattttagttaaaggttgaaaaatatcttatttgattttgtgaacaactgagaatttctagctttatgctccgtggtttgaaatctgaggctcttaatgtctttcaactataaggagtgaatgcttattcagtgcagtaatctattccaagagtgttattcagtgtgtgtgtgtgtgtgtattgggggtgggggatgggggattaggctaggcaattctataatttggctacttggccatattttttgtggattataattctatgcatcagaaaggtcttgaggcggcagattggctctagattatccacctgttggttgaataccatgtgggatgcaattcaaattggttagcaagttgaggaatatttgtgccacagcctttcccttggctacttcttggtgatatagaaaaacgcgttcaattttttcgtttaccttagcagggaaagtcagttgagaagtttgggattgtttctagtttttctcttaattagcctattcctttatctggatcatcatttaattaagaagttcgcaatcattttaaaacttgatattgtttactgataaagggaaataattgagggctagtgttatgcagcaacagaattgattatgtgtgaggtaaagcaagagaacatgctatggaaaggggtatagttttttagtctttactttccaccaatgagatttgacaaggaataagtttggggctgtactatattttcctgactactaattgatctatgcagttgtgcccagtggttctaaaagtaaaagatgcagtgaagaagctagaattgaaggcagaaccatgccctaatccataaggtggcttgggtgaatgataccaacctaaaaaaattaagttgatatttgtttaccattctgttggttttggttgattgtttgacaccattcattttgatgttatccctctcaaagtctgccacattttttaggtcatttttggtaatttgacatgtagatggagcatgaagctatcataatactaatttccttgtgtttgggacaagggaagctaagtttttgccagccagatatcatcccattacaatgttaaggagaagataaagggtcattccttatgaagtgtatcaattctttgccagatgtatactgggacctactcccaacccaacttgatggaggtgtatttttctgaagggggatgatgctcttgccatggattgactagagaagttttctctcttgtagcctaaaacaaagcttcttggtcccatgtcaattaagaagctttcatcctggaaaaaaaggttctttgtagtttttttccaacttcaattgctttgttttgaattctatactagttaaaacctaatttttggaaacttgctgtagaaattcaggttactgtatcatgtaatgtaaaacactatagcaagtaacatagacatactgttcatgctactttggcaacaaattaaggttttcttgggtcttatacttacattttcattgatggttaggattagtttgattcaagacaaggattgattgttggtttaggtttctcttctataagaaggattgtaatgatctttttatagtttgtgaatgttgaactgagaatttctagtttcatgccttgtttggaaaatttagatagttttttttcttcaccttgtttggctgattgatggagacaagtggcaaccacctttaaaattttattagaggcgcaaaggagtgggctccaatgcccaagctttaatttggcactctctggatgatattgggcttagttgggatcttatataagtcaatatggatttagcttagaaagtactttcataaattaagttatgggcctagtcaatggttccattttcagtcattattattgtcattttccaatagtctttaatgtggtcagtagttagtccaagtttgtcattttcaagttgcattactactatgtctagttccaaggagttataaatccctagaaaagtctcatatagtagttgagtagtctttggaaaggaatcaatgaaggaatgaattttcagcagccatgttttttcctttgtgtgacgcaaagagtacttgggtgtgaagcctaaggtttctaggagtgattcctaaggtcctttcgattatactctccttgcattttattttctatactgcatcaattttggaaagagtacttggatgtgaagcctaaggtttctaggagtgattcctaaggtcctttcaattatactctccttgcattttattttctgtattgcatcaattttggtatcagagtgagggtgatatcatggctacacgatctagaaggacttttagaggaagactaactgatagccagtgtgatgagatgctaatttggatggtggatcagcttgatagcctctacatttggttaagtaacgtcgagacacgaatatctcagcctactaatgagtcatcacatgttgagtaaggggaaacatcttaggctaacaaccaagaaaaaatggagcaagagtcaattcaagcaccacaataccctatgtctgaatgggctagaggattgcttgaaagaagacatgaagtgtatgatgccgctggagatatcacaaagaagtgctataggtacatcaagatcaaaaatagtaggggtggaatttgacaaagaaggattagagttacctggagtagtaaatggaccatttattggagacaatggttggtcttgtgctatagttgtaggcaagtttgcatttttttgtttgagtactccttctagtgtaaacacggagctctgaggtaggattaatgtgatcctgtcttagtatttctccccttgtctgggagtcattgaagtttggcaatggtaggttagtttttccctctttttcattattgtgactaccaatttcctgactattagaggtggaaggatcaagaacaggtataggaaagaaggaattaggcaaacaatagttgtttcccaaaactaagcttcattattctctattgccccctaaagacaattttgtccaaagtaaggcgtcactccacaaacaagacatctagactcgtgattttttttttttttgaggattataacacttatatccccttttatttggtgcataaccaataaacacacatttttatgccctaggatcaggtttggatcgaagcctactgggtatgtgaacaaacttagtgtgcccaacaattttcaaaggtaagtcagagaaaagttgacattcaaggaagaaatttttataacactctaaaggtgttctatattttaaaacaagagtaggcattttatttatcaaataagatgttgttaaagtagcatctccctataaatattttggtacatgcattgagaacataatgacacatacaccttcaagtaaatatctattgtttctcttgacaataccatttcgttgagaagtatcactataagtagattgatgttgaatcccttttttctataaaaaatttcccaaaacttgattgaaatactcagttccaccatcaaaatgaaatactcttatttttgtttgaaattggttttccaccatagtataaaattttctgaacaaattttcaacttcagatttataattcatcaaatatacccaacatagccaagtgatcatctatgaaagttacaaaccattttatttttttccagaaggtgtgatgattttcaaaggacccaaaaaattactatgaatcaattaaaatggttttgaagcacaatatggttttgaattgtaagtagtacaatgactctttgataaatgacaactttcgtattgaaaggatgaacaatccacattattaaataaaataggaaatagatacttcaaataagaaaaactaggatgtcttagtctaagacgccaaatcattaattgttcatgaatagagagagaactaatgttagtactaaagccttgatcttgtttataacagaggaagttgtcatcaaaatagtagagactatccaccattctagcaccaataatcatcatcctcatgcacaggtcctgaaattcataatgagaataaaaaaagataacatgacaattggaatctttagagagttgactcgtagataagagattacatgcaagattagggacatgaaggatatattttagggtgattttttcagaaattttgatacaaccttttcctacaatagatgaaaatttttcatttgcaattctaacttttttatcactagaacaaggcaaataggaatgaaatacatgtgagagacttgtcatgtgattagaagtaccccaatcaatgatccaaggtgtaagactagaatgacaagaaaaaacactagagttgctacatatttgagcaagagaaacattaggaataccatatcgtggattaggtttcaacaacttcaaaaagtgatccatttgctctttactgaagggaccaacatcaacctcatttgcatgagcagattggtctctaagctttttgttcttccagttggcaggtttgccatgaatcttccagcatgtctcacatgtatggcagtgttgtagaaatcacaccatatccgattcttgtcctccactctgttggtaattaaaagttctacttgcatttgcatcagcaacgactagggcagaattttcaatcgatgccccaatccacctttttcccgagcataacactacaatagctttcctcccttcaaacttcaacaaatgcctctccaagtgaaggaagaggaccacgaccaatgatcttgccccttagttcatcaaattctacgttcaagccaatgagaaatttgtagatttgatcgttttccactgtcttcttatggtgattgcaatcatctaaagatttccattcatagtcattgaaaatatctagatcctgctataaccttttcaaaatattgaagtatttggtgacgttgtctcccccttgttgaatttctccaagttatagttgcagttcatacacttgggattgattgccaaggttagaatatatctggtggatattatcccaaagttccttggcagttggatagcacatatagttagaggcaatgtcttcattcatggaattaacaagtcaggccataaccatggaattttcttcatcccaagtggcataagttgtatcattcaaatcaagcgcctttgtatcattggtcaggtacccaatcttgtctcccttgaatatacatatgcactaattgagacaaatgcacaacattgtctcaattgaggcatatagcgcttatctgaatagagtgcaaatcataattgagaccatggttttcagtaggcttcaaaggtgaaagggtgaattcagatgagactaaagacattgtgagtttcaatttgagaggagaaaaaagatgtggagtttaccgaggaacaagtcctagtaattttttttttgaatccaaaaaagaatcagaaataaagttcttgctctgataccatctacacaacaaaaaaactaggagagaattgtttgagtgaaaaaatggtatttcattgattatgagaatgatatacacgtacactacttataggctatataaggcactaaaaaaaaagcaaaataataaaaaaataacaaaataattatacaatcaactttcctaatttacagggttgataaagcctatatttaaacataaaatacaactcggtaatccctagagatcagcaatattttttgataggaaacgacaaagagatatataaatagaaaaaagaagtacaagagaaggatgaggaatcctcccaacaaagaaaagttaaactaaaacaatacaaaaacaagaaactacaatgaaaaaacaaacaaacaaactctctaggttagaccaacccattggagctacacactgctagccaatctagtcgtaacacatttaggggaatcccctcaaaaaccatggaacaaaaagcccaaagagaagcaagaaagtgaataaaatcctaaagattctccgaattccttgctttatcctcaaatatcctcacatttctttcccgccatacaacccaaattaaagcaatgcatgcagcttgccacaaaactattcctctcttaaataaaccaaaacccttaaaattaatggacatcatgtcagatatgctctttgggataacccaatccatcttggctaactgaaataatctgtgccacaaccccatcgtcaaagagcaatgtaggaaaagatgataagttgattcaccatgcttcatgcacaacttacaaatgtcaggactgagcgctttgtagggtcttctcaattgtagcaagtcattaatatttatcttcttatgtgccactaaccaaacaaaggacttgactttgaaaaggacttgggaattccaaacgaacttagtagggaaaacttgagaagaaccagaacaatgggacaaggctagaaagaaatacttgactgtaaaaagccctgaatgagataaagaccaagatctcgcatctgaaaccaatggtgataagtgcaaacaattaagtgaccgcatgaggcattctagatcttctatttcagaatctgaaaggttatgacgaaaattaacgttccaagagaaggggcgagtagaaccgagaattgaagatataggaatatttctatccgtgactactctaaatagtcttggatattgaaaacccaaaggataagtcttcccagaaccaaattcttttcccatctcctaccacaaaccgagtatacttggaaaaatcctgaaagacttgtgcaatagccttccaaggacaacgatgtgaccatctgactatagtgttggcatcccaagcattggaatgtgtcccataaatgcttaaaatgacctaataccatagagtcgaaccctccctagggtacctccacaaccatttccctaagagggcgagattccttagagaaatcttcccaaatcccaatcccccttttaccttcgaattacacactacatcctaactaacaaaatgatttcttttaccttccctaacccctgaccataagaaatccctttgcaatctctaaatttttgcagccactaaagcgggaatcttaaacaaggagaaaaaatagctaggaatgtggaaagacaagaatggataagagttatcctattttcaaaagataagtaagccttttgccacccatctaatctcctcgagattctctcaatcgctggatcctaaaagccacaagcctttggattccctcccaaaggaagacctaggtagagaataggtcaatcagaagccttgcaatcaagcaactcgaccaacctagaaagatgattctgatcaagattgatgccaaaaagattactcttgtcaagattaaccttaagcccagaaatattctcaaacactaacaataaactcttaagagtctacagttcttcctcactagtgttggaaaagaaaatggtatcatctgcaaattgcagatgagacacctttgttttgttcctaccaaccctaaaaccctccaacgaatttctttcctcttctctcaacaacatcttgctcagtacatccgcgactaaggtaaacaagaaaggggataaagggtcaccttgtcttaatcctctagatgccttgacccaccctttggcgtttccattcactaaaactgcaaaagagaccgttgacaaacagcctctcatccatttcctccatataggactaaaccccttcttctccaacacatgatccaaaaaatcccaactcacatggtcgtaagtcttttcaaagtcaattttgaagacaactccttcctcccctaatcgtcttttctcatctactatctcattggctataagaattgcatccaatattgtctctcttgaacaaaatcaccttgagtagaatggatagtttcatgtagtacccctcttagacgccttgatagaactttgactattatcttataaagactagtaatcaaactaataggtctaaagtctgagattttctttgttaggtttttttgggcaaaagaacaatgaaggaggcattagtgttttgattaataatcccgcttctgtgaaactctgcaaacaccctcactaaatcctctttgatcacatcccaacaatcttgaaacactgcaatggtaaaaccatcaggccccggtgccttatccctatctaactgaaaaatggccgtagaaatctcttcttcagtaaaaggagagtccatcctagacgcactctcttcagatataggggaccaatctaagccttcaaccctccaagactttctaggaggacttgagtagagtttttcaaagtaaagtaaaatctcctctgtgatgctctcggaattattcaacactaaacctctttcattctccaacaacttgatgaatttcctatttctcctgccattaaccactttgtgaaaaaactttgaattgcaatccccttctttaacccatttcaccctacctttttgtctccaatgaatttcttccttgaaaattaattcctctagcttcccttttcttaaagctctttgaactgaaagttcagaagtgagaacctcgtcttgctcaatggcatcaaagttagctatttcattcaggatacttttttttcctttcgtttagctctccaaaagtaaccttattccaaactttcaatttggctttaacaaattgtaacttcttcatgaacttgtgaccttcccaaccatttccttgaaaacctctccaccaactactgaagcactctttgaaactaggatgttgcaaccacatattctcaaacctaaaaggtgttgggccccacttgaaaggattggtatccaaaactatcggccaatgatccgatgtccatctaggaagaacttcttgaaggctttgagggaagaaatgctcccactcatttgagtaaagaaaccgatccaatctcttacacacgggtgactcttgcatgtttgaccaagtgaatggagcgttccgtaaaagggggtcaagtaattcacagtctcttataaaaccatcaaagtccttcatgcttgaagttaagctagatcctcccaatttttctgaacttctccttatgatattaaaatcaccgcccacacaccataaaggaaaagaaatgtcaaaaatgtctaaaaactccacccaaaaatccttccttagtaaggggctatttgggccataaatagtagacaaccacagaggttcgcatccatccgacataaacttgactgagacagaaaatgagcctattaccacctcctcactacacagttttttagagtcccaaataattacaatcccacctgaagccccgcacattggaagagcagcccaatccttatttctaatagtccagatactaccaacaaaccttctgtcacacaccgccttttttgtttcctgtatcatcacaacatccggattctctagcctcagaaaatctttgaccaccctttgttttttccttgatcccaaacccttggtattccaactaataattttcatggagaaacctcactaaccctaaacctccaaacaaattccaacaggtctcaaatacctgtggagaatctgtttttccgcctggaatacaccttgatatccagagaacttaaaaactcatgaactttagccattttcctgagggaaaagccttctatctggaacttgcccactggggagaactcaacatcaccctggctaactgtaactaggttggatacctcattaggcaaattgggcttagacttaagagggttaaaaccttcgggcatctggttcagataagcaaactgggactccacaacatctaggttaggattgccaatagacatttgacataaagtatcaacatcgtcttttttggaaaaaattttagagagttcttgattttccataggacattgagactgaatgactgaactgggaagaatgggaacagaaggacttagaaatggaagtgtcaagccacaggaagggggaaaagaagacaagggtgattgagaaggtaaagacgaagatacctccaagttttccactaccaacattccacaagtccccataaagctgagccctttacctctgattactggactagaaggaaaaaccgtgtctgatgagccacgatgatcgaaacccacgtggcccataaatccttctctgttttcattgttatagggtttgcacaaaacctcttctccttttgacaacgaagccttttccctcgaattgagaggactcgcactgaatcctcattccaattgagatccggcctcgaaagcccctttctttggaggagcttcgcaatttgatgatggcttctcatacgttataggcttgctttgtcttcgaaccccttgtcggcgatcaaaacttggaggaaaaagagtagtccacaacttctttgaaccaaacttcacttcattcactgcggaatcccttggctgaacatcagaaacctctgagacaactttcccctttttcattgcagatgcgtctttatttcgtaataagcctttcttaataatgggcttcttacttcctgtttcttggcccaactttgaaaaagggccttttaaattacagcctctctcccaacccaattttgcatcacccagtggactgggattgggaagagattaggcccttctctatagctttgaaaaagaggcccgatgccctttctcatttgagtaggccttgtcccctccggcccaagcttcgcccgccttctctgacccatctggctcaatgctctatgactaggtgaagataaatggacaaaaccaaattctaatttggatgtgcatatgtagaaccgaaaaatcaaaaccaaattctaatttgaatgtgcatatgtagaactgaaaaatcaatgtctaatttatagatctgtccttcaaatgactttcgcttgacttcttgctacaatatatattaattttttctacctcccaatgctacagtatctttttccttttttactttttcaattcatctcacctttgtatataagttttgttggaagttagagtcaaatatcatttgaattcctttagttttagataagttatttgaattaatctttgttgtttaaattttatgcttatcaaattaggagtcttatctaagtttgaaaataaagatagctatctatttggtagttatcttttttttttttgagtttaaattttggtttcctagattttgaggattctattgaagagtcccagtataaattagggctgtatgttattctttggagtaatgaagatttaattatggtgcatactagttcttcttccttcctagtaacaagtttatttcttttataaggtgccattttgctttaattttttctcagacacaaacactggagcaagaggcgtatccagcatt

SEQ ID NO: 10499 - DNA, 3349 bp, Vitis vinifera
  Intron number 9 from transcript GSVIVT01009320001 (locus G SVIVG01009320001) derived from phytozome v7.0 (chr-ID chr1 8; pos 7401755 to 7405103 reverse strand)
caatcaattacgtgttgatcaagcaattcttacaggtacttctgtttccagttcaaatgttatcattttacatggcctatatcatttactaagatggcaatcttacttttttgatcagccgtattttaggaaggattcctcatccttattatgtatttctttattcatatttaataaattttttttgtttctgattaaaattttttttatcatttactaagatagataggaatagatggtaaggatgttgataggcatgcttgaattaagtaatcatccatctcttagacactttctccaaaaccacatcctagaaatcgtttactctagtttgcctcctattggaagctcataatattgaagcgacattcacccttttatacaatcaagagagttggcaaggtggttcactagttctatttataaatgtacatctaaagagcacttttaaaaataatttttttaattagaaacaagtatattcttttcaatgaatgataaatacaaagaagaatgagcaatccttccatgagatacaaatattgataaaaaagtaaaaatgtatgctatttcacagaacttactactatttgtgcagattatgagcggacaaaacaatgtacacatagtacaaaggctttacattctcaaggaggaaaaaagtctccaacaaaagaaaccaattgttttgctcctttcctagctaatcagtctacaccttgattagctgagtgaggaacccaagagaaaaagcatctggtttcgctagcaacatttggaattctgcgataccaactatcaaacttccgtgggcctttctccttgttagacacattaatgatgagaacaatagaatctgctactacatttacgttggagagatgttggagaggcacaaggctagcttgcaacaaaccctctaataaagctagtagttttgcctcaatatctggacccactccagcaaatttagagcaagctctcaatattgtacctgaatgattcctgatcaagccttatatacgcaatcgtctcagattacccaaagaacatccatcaaagtttaaatttactgtacctacttgcagaagtaaccactcatgcagacttactggaagagttgtgatgctagagattttttttatttttttttgatagacagttgtgatgctagagatttattgttctctctttaaacctgtgtcaggcttggacataaatcttcaaaaaagtgagatggttactgtgggggtggaaagattggcctcttcattcaggtgtaaggttgggaaccttcctaccttatatcttgccttgcctctaagagttgttcataattcatgtgtggtatggggtttagtagagcagagattcaaaaacagattggcctcttggaagaagaagtaatatctatctggggggggggattaactattttaaagggtacactatcgagccttcccatttactttatgtctcttttttcaatttcaaggagggtaagagttagattggaaaaagatcagagagattttctgtgggatagtcatttagaagtaaggaaaaatgcatctagcgagatgtggcattgtttgtaaggataagaagtatggtagttttggaattaggaggctaaaggtattcaaccaggccttactaagtaaatggttgtcaaggtttgccaatgagcatgacattttgtggaggaagtttatccaagctaaatatggggaaatggatggaggatggagtaccctaggtgtgagagggtcttttggaataagcttattatggaaaacagttcgaagaagctgagatgattttaaaattaggacatctatttgggttgaaaatggtatgaatactaaattctggtgggacatatgggtgtgcgagagtccattgaaagtggtcttcccattgctttttagtttagtctctgacaaggatatgctatagtagcaaatttatgggaagggggaaggaatgggggccattggtctgttcagtttagaaagcactttcaggattcgaaaatggatgaggcgtttaggaagcactttcaagcttattcatttcagtgagagtgcaaggagtagggatggacaatttacatgggaaagaagataggaaaggaaaattctcagttaagtcctactatatttcttttagtggtgggagtcaagagatgttcctagctaaagaaatttggaggtctcttaagaacctgtctttttgcatgggaagcagttcgaaggaagatcttaaccatagatatcctcatgagaagagggtggacaatgggaaatagatggagcctttgcaaagacaatgaagaaacaaccactcgtattctaattcactataataggcctaaaaagttgtggaatcttattttagcaatgtttgggttgaaataagggtttccagacctaaatagagcttgttcgtagttttcatagtgtagtttcttgtttttgatcagatgtagtttcttgttcttttattgtgttgtttagttttatctttggtgggaggattcctcatcctttttttgtacttcttttttctatcaatatatatatttgttgtttcctataaaaaaaaaaaaaaaaaaagggtttccagacacaatgaaataccttttcctggggtggaatgccaaggggatggagaaaaggcaaaggaaggtttggtgcatggttcccttatgtttattttggtgcatttaaagagcgtaatcaaaggatattcagtgatggagagatgctagatgtaagacgatggagacttttttgaaatccttgttggagtggcctcatgatgcaatggggatggagattgccacaatgttggattttttagatagcctaaattgtgaatgtataggctgttttgtagcctaccttattcagtagattttgtctctttttgagcctttcgtatccccccctttgttaggtgctattctattaatatatttttctagttgcccatcattttttttcctgtgtgttaatttattttccatctatgatgcaaacgagcaaacattatatacccagaatgcttgttactaatattgcttgcccattttttttatgcacacatggacacacacacacgcacgcacgcacacacgcgcgcgcacacacacacacacacacatatttgtgttatctaatgtcaacatttcttactataacatgtttagattgaattgtggtgattctcttgtccttgatgagtttacaagattttttgatcagatgcatgatcaagttcttgttgaactttttctttgatgatgataggtgagagctgctctgttgaaaaagagcttgattcc

SEQ ID NO: 10500 - DNA, 6239 bp, Vitis vinifera
  Intron number 2 from transcript GSVIVT01038161001 (locus G SVIVG01038161001) derived from phytozome v7.0 (chr-ID chr5 ; pos 23998472 to 24004710)
gtctctattgcttccaccatcacctctggctccgagtgagtgtctttcgtcgaaaatgttccttggaaaattcatttaattctcaaaatattctatgaatggatagatcttgccgatgttcattgaaaacaggaggaagcaaaggcccaaagtatgcatcatttttaaggcacaaccaacatgaatagcagccaaacagccaaattgaccgcatgaatcttttttttttttttctgtttcctatactttctcggcaaccaaacgggttgggagaatacggtaaagtgaaggcagcaacttgttcgctgatttgtacaaggttaaccttcaatgcaagtaattgcgtcattcgatgataaacaacgctctcgctctgataattggctacgacaaccttatgattggtttccaagaaaatgatagaaaaacaaacacagaatctgagactaatgcttgggagatgatccaaaaaagtcaaaacaactatactgcactttagatggtggcctgtgaattgggccgtaggtatgaaagtgggctaggcccaactataacggaaaacttttttttttttttgaaaattcaaatataaaaaatgattttctttgcttattctacgggaaggcattaaacaaaaattcccaacctagtatccataaatatatattacaagcatattttaaaaatcatttcttagaaaaataaactgtggtttccaaaaacatccttcaacaatggttttgaaaacataatttttgagaataattttttaaaattgttttatgatgatttgtaaaacaaaagtttgggagtttgaaatgtttttaacatatttttaatttttttaaatatgttttaaaagtaattttaatatttagtgctttatttaaaaaagactgaaataagaattaaaagatgttatttaaaaacattatattttttatttttaaaaatataaaatagaaaataattttttaattctcaaaggttttttttttaagaacataaaactattataaaaaaataattatcaaataatgtcttatttttttacactcaagcctccctcccacctataattccaaaaaaaatcattttttttgttttattttgacaaaaatgtcctccctattttctggtaaaaataattatttcttttaaaacctacatgaaatatttaaaataataaaatacatttatgtcaataatgagttatttttcaaataaaaatataagaataattagattcataaatttggggattatttcatcttttttaactaattaattcttaaaaataaaaaaatcacttggacttttgaaaagccaattatatttcaattcaataaaagcttctttttatttttttttcaaaaaagcttgatataaaaggtagaaaaatattgctttttatagaagctatgttttaacttttattttatctaatacaaaaaaattatttatatttaataattcttttacaatatcaatattgtcatttaaaaatgattgcataaaaaaaaatttgaaataatattttgagtgatttttttatatttttaaaagtttttcaaacatctaatttgtaaagacgtgttttcaaatatccaaaaacacttttaactttattaaaatgactctaaaatgaactattagaattaaaattgattttgagagaattcaaaatgttttgatgatggtgatagtgatgttgtaagttatattgggtttgtttgataatgcttttagagttttagaagcgttttttaatatttgaaaatactttctgttaggaatattaggctaattcaacctatggtaatcaccctaaaggggggggtgaataaggtgatgatctctttttgcaaatttaaactatgtgaatgtaagagacaattatttgcaagtatataataagcaatataaagacaattgcataaaaattaaaaagtagggaagagagaatgcaaacacaagagtttataatggttcgacgcaacccaacctacatccactctcctctagcttcaatcccaagcttgaggttccactaattcaaggattccaaaccaaaccttcaagcaatacaattagatcatagttctaattcaccctcttggacttttagctccaagcaccctttacacttctcaagagataccacactcttgagaaacttcctctaaaaggtttacaaataaatgatctcacaaaaatcctagtacaagaactttaaactcaaatgatacaagaaaactaggattgaaaggtgcactaaagatatgcaagttttagaacaatggtgcactcaaaaacacttttccaaggctcaaatataatcaagaaggtttgggaaggttaaactctttaaacaatgaagattagagcctttttatagaagagaaaaaccaaactagccgtttgggggttcaattggtcgagttaggagtcgatcgattgactagccgttaacattaaatatttgacaagtgaccgttgggcctcaaccggacctcaaccaggaagagaattacctcgatcgggaagagaaggctactgagagagagagaaactttttagcctccctcgaccggtactcgaccggacaagtacaatcggtcgaccagttcctcaaccggttgaaccggttgaggcattttttggctcaacacccaactttttcaacttaaaaccttttaaaataagtttgaataacatttaacacaaggttttagttgaaaacatgaaatcatccaattcttaagatatttaaaacaaaataactattggatgattttggtacataaataaagaatgtaatgcatgaaaatcctagtgcaccaataaccttacaaagagatcttatgaagcttgaatcttgaaaaacattttttctttgaggtggttttcttcttcatgatttctccttggcttgatttgtctttgtgattgtcactttggaaatcattttgcctaatcacacttgaaatataatcattagttctaaaccttattttgttatcatcaaaatcaagattgaccaaaccttagtttcacactttcttatagaaattagatgtttgacaaactcaaaaaatgtttttaaaaaaattatttttttatgtttgatttattatgaaaaatatgaaaaaaaaaatcaattaaaaacctatgtcttctcaaattatttaattattctaaaaaaaaaaagtaaattattttgatttttttttttttaaatcaataacaatttttcttactctttgatccttcttcctttttagctaattatcatgtcatttaagcttgaaaatatgtgttcaatttaaacttaataataattttaaatgggtttaagtgagtcagaaaaaaaaaaccaataaataaagtcaataagtttaatctctaattaaattttaattaatgtattaattaaaaaactaatttatgagattatgagaaataaatgtgggggaagatacaagaacaaactcggtgaaaaatagttaggatttagaaaaaatgatttattttaacttattatttaaagttatatttagcaatattatgcattttatcaaatatttttaatgattgaaattaacttattaattgtttttgaacacattttcaatttttatttttaaaataagagctcttacatgaaaagtaaaatcttatgtcaacaaatcttatttatacaagcttcaactacttcaataattactctcataaattataaaaattacccttatactttcatttctaccttaattcatctctaagggttttttttttaaataaaaataaaaagcaacatcaaccctacagtagtttcaaagatgaataagttcttatgattggaacatagacaaattaaaatagacaaacatatcatataatgattgaaaaaataaatagacaactacgatagaaacatagacacgagatctatctttagtgttgagcatggtgatggtggtaaagttgcaaagcctttttactctagaggagtaaaaaagggccttgatggagacgaagacaaaatgtggggtggatggtagttgaatattggtgatggtggaatttattagagtactattaaaagtgtttgcagtgtttggtagtaattttaaaaggaattaaaaacatagtgaattgttttgtagcagtataattttaatgtttgaaaataatctttttttttcttcttgaattcaggaacatatttagcaatgactcttgaaaacgatttttgattctttagaatagaacaatgttttctaactatacgtttcagagaaataatttttttaaaatatgcatagcattagtagattagcaattaaaaataaggattttctaggattgggctgaattaagagaaagaaaatatgcatagaatttgattaaaacgtcgattaacaagcaagttgagtttttggggcaaaatagtccttttataaaataaaaatgtaaggtataacccctccataaaacttatgttcaactgtctccttcattgtcatataagagtcatatcataaaagatatttttcttttcaaaatttaagttgaaacctcaattatcaatcgggacttcattttttttaactaaaaccgtaatttgtaagtgagactattgaggcttctgttgaatttttttttttaaagtttaaaatttaattaaaaatattaaactacaaattattactgaaatttaaaatatatacttgaataataataaattatatatttaaacttaaagatttaatataacttcaataaagataaattgataaatataataataataaatattttatttatcaataaattaataatcttaaaataataaagttatatgatatataaataagatacaaaattatataatttattaatttatgatatttattttttttgtatttttaagatattaatttatttgcattttgacaaatttatctttattgaaataatagtatactaagtttctatatatagattttgtattattttaaaacatatgtttataattttatgtaaaaaaaagactattatttgtgcacacacaacatatatgccttgaagatacatttcaaaattagttaatgaaagtaattaaaaaaatatactacaaaatataatttttagtactttcatcaaagtcacaaaaaatacctagtaaatatttatatagtgagaaaaaagaacgtcagtccctgattgtagcaggtactacatgtgatataacttaaattaataaattttataattttatatcttatttatatgtcgtgtaactttatgattttaagtttattaatttattgaaaaataaagtatttatttattattatatttaccaatttatttttattgaagtaatactagatctttaagtttaaatatataattttttttattatttaagtatatatttttaattttaacaatagtttaatattttttaattaaattttaaagtaagaaaaaaacaattaaagcctcaattgctaattatgacttcagttaaaaaaatgaagcattagttgacaattgaggttttaattaaaattttgaaaaaaaaaaaatttataacatggctcctatgtggcaatatagaggctaatttgaacataagttttgcaaaaaggttaaaccttagggttagatttccagaaaaaatatgggaagagttagatttccgatttgtggattattttatcccttttaaccaaatatttctaaaccgggttatttgattaaaaaggtctctccaaacccaaattttaaaatttaacctcccactattttttggcatcatttggataaaaatgccctcattattttctagtaaaaataataatttcttttaaaacctatatgtaaatacttaaaatagaaacgaacatttatgtcgaaaatgggttactttttcaataaaaacatgagaaatgttagatttctgatttagggattatttcatcccttttaacaaaatatttctaaaccttatatattttctataaaatggctatattcccctaaaactccaacaaggaagcataataggttttcaagggtttttatctaaacaacctgctcttatgagggttttctcctccaagttgcctttccatatgtctaaatccacccaagaacatccatttctatatatatatatatttagcatccaagtctgacgtccagattacacggaagtgaagtcagaa

SEQ ID NO: 10501 - DNA, 26632 bp, Vitis vinifera
  Intron number 4 from transcript GSVIVT01036862001 (locus G SVIVG01036862001) derived from phytozome v7.0 (chr-ID chr2 ; pos 18562640 to 18589271 reverse strand)
gctggacgtatcacgaagtgatcggcgccaggagtgtatagtggctaagagaatgtacgagcctgggtgctacgggggcgaaccattctttgtggcaaaggagccggacaatccagaggcagaggaggatgatgggtatgtgttgtcgtatgtacacgatgagcaaagcgggaaatcaaggttcatagtgatggatgcccagtctcctgaccttgatattgtggccgctgtgaagctgcccacaagggtgccttatggcttccatggattgtttgttaaagggtgtgatctcaaaatggactgaaacaccaaattgttggaaagcaagctcgaattaggaaatttgtaattattaggattagatttagttttaaaaaaaaatcaaggaagaatgttttattttatcttatcttattaggagtttctattttgtttagcgtgaatacttcagattatgtaaggcttgaataagaaagaggaatgaaatgcagtgaagttttaattctcctcaaattttaccattcttgtaattgtgtgtttctctgccaaccttattaccttaacaagttgataccttgtgttttgctatcaaccttattacctcagcaaattggtatcaaggattcccacatatcaaacaaaacttccgcatacccaatacaaataatatccacaaaaataaaggaggttaaagaagtcttcttctttaatcaactctctaaattatcatatagtgtacgtacataaaacgtgcttttctgtcagtactatccatgtcattagctattccggcggatttcttgtatttctttaccccaatgaatggtttttactttatttcagcccgcccttcatcttcaccttccaatactaatctctccttctggggaagacccttcatccccttcatcttaccagggagccagccgtgctcttgcccgagtggtctagtcgtagcaaacatttgacatggttaataatttgagcatagaaagcttaaaaatcttgtagtcggtgccgtacaaaccataggaaattcaattttattttcattacttcttattttattattgaaaaagcaactattatgttcaaatattacattctcggataaaattaaatttttatggatctacaagaaatgcaagagaaggctccctcgggggtgttatcagggatagcatgaagagactattatgaaaaatcatgacaaataacaataatagaaaaaaaaaataagaacatgaaaaatagaaaatacgcaaagttcacaacaatttatatggttcaacttaaaacttttataagggaaaacaaagaagattttccatcatttttcaaggaaattataatcctaaaacttttaaatcttaaagtttaaggatcatgtaggatcttaaaacttattgaaattataatcctaaaacttttaaatctgaaattgattttgaggttagaactacaacttataagaccattaatttttttatccttttatcacaacatgagcaccctttgagattcttataaatccttttcaactttatgtgtattcattggaatcatgtgcccaaagaaatcacatttttcttcaaatccaaaacatggtttatattagttaatgtctttctaatgccatcatgatcttaattcaaattatccttatgttaacaaccttatcagctacattgtttcctataaaaacctttccaccatcaataagtcaagaggcagtaaatcaatccttattaggaaacatataataagagcaccctaaattaagggtccactctcatcatttgagttagtaagagtaactgaaatgacatctgcaatatctaaattttcttctactattgttgtattaccaaaattagaagctttccttttttcttttcctttacatttaaacaatttcttgcatagtgcctttctttgtaatagaagctcttgttattttccttggattttgatttaggtttggattaacctttccctatcattatttttctttcctaactccctttgaccaccaaaccttcaccaaaaatttcttttttactcttagacaccctattcttcaattcttttaagtttagagttgccgtaatatcctctatggagattgtatacctctaccacacatcatggtatccacaaagtgatcataagaatttagtaaggaacacatcaaaatggtgatttggatttctacatcaatttcaaaatttatattccttcgatccataataattttattaaacttattaaggtggttatgcatcccaaagtagactcctcctatcatttggtgtgataaccaaagtgcttctcatcttgttatcaaactagttttccatgttttcttaaagtgtattgagcttgaactccattttgtacataataagatcctatgcaaaaaatttcatcaataatatatttttctacttatcgacttatagatatgcttataaagcattttccaaagtcacaattcttaggatttcatattaagctttttgtcacccttaaattacttgagagggaatggaaagaatcagctcaccaattcatcatctcaacaaattaccacttaagcttctcatgggattcttaatagattatgagtggttgttattgggaacctcggactactccgttcccatgccctggatcacatagggtgcatgcaaatctatcttaggctctttaaatctatcacagataaacaagtattcaaaaataatatggataccatagaaatcatatatctagagaataaagtcacatacctttgattcagatgttcttagatcgattccaattgatgtagataattccaaagtcgtaatggatctcgtaaattccatgatctttcatccgatgactcttccttgtatctaggaattgagatggcgaagatctcaaggtggaggctagggttctctttctagactatagggagaaaatgacaagacatgggaaccttaacccctaaaggggtatttataggtttttttactaaagttaagtgacttaagcctaccatgagcttgagtcacttaatctagcccaaaaagggttgttaattaattaactagccatacaagaccctaattaatcaattcacccaatctagagataccactcacttattcttatgcaaccttgtgtaattaccaaaatgcccttatgcacaaaagtgaactaaacacctatccaaccctcataaatcgtgacattaaggagtatgagctcagagcggggaccactaggatccataagagtactagctcccttaaaatcaaattttgaaattgactaaacatctcattatagagagtctactacattccagtaccttatgtatattacaacaagacactaagtgctcaagtctgcaacttactattcattgcatgcagactccctatgaactgatgtccataatctaacaaggtagtactatcacctatcaagattacctctcaagtccttgagttacatattccacttattatgtgatcaaatgacatactataactccaaagagcatatgtcaaattccactaaaggaattgttgtggctacatatttcatgatcacatgtacctttagattatccaaggggacacactatttcaatcccatgagatatcatggtgcctcgtcatgggttctttgcaagtagatcaattgtctatagttggttcatggatttgggcaatccagtagagcttgtagtgcaccacctcttaattaaagggataacttgtcttggtcgtcgagatgagtttcccataatgagtgcactaatgtatgtgaagcacactagataaaacctatactgagtcatgacttaagactatcaattgtcatgattcaccaaactactacactatatgaactctcaacattgagaggatattaagtatgtgccaaatttaataggacgctttgacttatgggtgagaccctaaagtagtcatatcttcttatagattgggtcactattgatggaggtttgtggcaacatgtattctgtatcttatatgtaactcctaatgcacctaagtcaaatacaatgtaaaagatatgggttgaatattcaaatcaatttcaatacaccaaaagggtagcaaatggatagttaagcctaaatttgttacatcatgtcttacttttaggaactcaatcccaacatactctccacttataccatttttgttacaaatcaatggatgaactttcttaagggttctcaaatggcttatttcaattaaatagatggtcaacacacgattgtgaggttgggccttacatgcatactatcgcacaaattgatcacataattgagcaaaatcacttatagaatagggagggagttgatgaaaccaagtaagtgatggaccctgcaggatagttagaaaaaccctacacaataatcctctccttatcgtctaccaaaatcattaactagcgaaaatgatagatgtgctccatgggatctcctatcttgtcataaagattaaactttgggggtacgtggtgagcaagtaattcttcttgtagtagatgagtggaaaatggtgatttcaacatacctttccaattttcaattgcattagtggaagagctggtttatagaataattttatgtatttctgctgtgaactttttgtacttcttttgtagctccccaaacccttaccctgattgttagttgatctttgttggtgtctcctaattttttgagactttctacatgtggcttggcacactttccttcaagagatgaccatgctaggttggtgcctcagtattggctaagtcgtaccacaactattctataaggtcatcttggtgggctaatatttcttcaatttgttgttggtcctcgaactgttgtcattccaactgatgtgggctaaaaaaaattacattttttagaactttgacttttggttttcaaatgatatgtatttttgggaaaataacccttagaacatgcactcaaatggtaaaaataattaatattccaagcttaccctcaaaccctcctctctcacctatcgccaactactacattttttttttttgggttactttgacaaaacaaatgagctcatcattattattgattatttaaaaaaaaaaaaaactttgacacatggcaatcactataccatatgatttttctttttctttttcccattctctataatatctccattttctttgtcttttgttttttttttaaaatatgttggcttgatgaaatcttttaaatttcaatatttttttaatatatcgtctttttatattaattgattttaattatttaaggacattttaaacataaaataataatatataataaataattaatgagaataaatttgatataaaaataaatacattatacacaaattttgagatttaggatataggattttatatatttttgctatataaaatatttatttattttataaatcttatcatattgtcatattatttcattatttatatatatttttaatttttaaatttcatgtaaaaattatatttttaactttttgcttaagaatttaacttgactatggatttaattttttttcatggctaaaatgtttaatatttttaattaaagaaaacaaaaactcagttgtggctctaatatttcactttattaaaatttttaattttttattatataaaaaaataaattttatttaaaaaaaattgtatttaaccatttatattaatttttatgaattttattaaaaattaaaaaatttttatattgaaattgcgcatcgatcgacacaaccatcataaaaagggtaccactcttttatgaaaaaaaataccatttttttttttatgaaaaaaactatatacttatagacccctttgtggataaggtttttttttttttttttttttttgttgttaccatcttgggaagagctggcaacgtctaggaggagtggggggccgacttcttcaaagactcaattgcatgcatgggacggatgaccaagaacacaccaccaccttgacattgtggtggttgagatggaactttttttgaacggatgacagaagatgagataggaagtagtaaagttggaagagctagagggaaaaacagagctagggggagctgtggaggaaggaagggggtatcggtgaataagaagaggttttgagagagagaaagggcggaggaagggagtagtagcacaacgcactattacttgctgctaaggttgatctcactctcactttgcttatttttatgcatgattcgttttattatttgatcatttcactagtatcaattgatttccttatcaattgtcacacttgttcacattatttagtagggaccttattataaggcttaaaggggtcctacggctcaccaccgtaccttcccaataggtaacctgacccccggatccagattctgtttttgcagacatgtcttttccaaataaggagtcacatagggttttctttcttattttgttttccctttaaaaaaattaaaataagtggcgactcaaagtcttttctaaaaatcatattttcaataaatgaaaaacaagttttgccatcgagtgagaatgcatagaacgaaatgcggggtccacaaaatggcgacttcattggggatcactagagggtcaagcttgaacataagttgaggcaaatgtggtgtttgattggtcgatcagtgggtacccacctctctttgtgcttttgtttgcttgactattaattacacattgagagctcttgatgccattatcctttatgcatgcttggttattgcattcgtttgaggcattggcatgttgattatattgattgatcatttcgactatccttacaaattgactcttcgtactatatgattactttgctcaccttgacatgtacattctttttgttgcttatctcattcatcttgacatgtttgattttcttggttgtatattatcataattatcatggagcatgctatccttgctagatattcatctcgattatcatatttcatgcttagattgtgtgtagatttggatgatatacatgtgctttgcatgactacctattgcataacctcttttctcttgcatgatgcatgtgttgcttgtctgtgtgggacacacacctatcctcttgtctctaagtccctagtcttggtcaaccttgtttcccttgatcttgtatttgatatgagacttgttacttcgtttgctcttcgatcgagctagtgattcgaaatagggtctagcgatggctatatgtatgtttgggagcattttggaggtggtcgacacattgatgctaattagagttcgacttttgaagacttgtatagcttagagctagatttcaggatacttgtgtgactagtgtgtgttttttttagtttcataggattttcggatgcacccacaccactcactgtgcactttagttgactattgagtgctaagaattgtgagagctttcactataggaaaccccctgagatgtcgaggtagtgcatgtgtggaggtgatgaccactttgcatggaagcatctcgtctcttcagaggcctgtaaagggttgcataccactagagggtacgataacttctgatagggatcttttaaagtccattattcccctttttagagccaccttgaccttataaggcaagccttagatcattcgatcaagatttcttccctacacgtgggtgcatctgagggccttcaaagcctctttagttatagttcgggtccaatactccatcttttggtttctaattgagagtgcttagagattagtacgagttttagtatcagttggatcaccttttgtcacgtcatcttagattattcttttcactcgatgagtttagcatgctttttccctaggactttcatctctttctcttggcttggcacatcctttcaattggttgtcttttgcttgatgctttgggatatgttcattgatcatgatcatctttttacaccgtacacttatcatgggcccagtacccgagttttgtttgatcattgattcaattttcaactcgatgctcatattttcattacggaaaggtaaaaggcatgttttcacattcaattttttttaagagattcgccttgagcaccttatcattttttctctttatggagctcgagttcaaggttgagttaaggatgtgtggttatagatggagtatcgatctcatgatagtgtgtttctcacacctctttcatcttagattattgataggaattctctagtcacatttgtagccatctcatagtggacacttttatgactctagagttctcatcatacatccagatttcggattgccaccttaaaaccatatgtttgcatgttgtattgttgtcttttagggttctatcttgtgtccttcatccatttcgtttgcattgcatggagtcagtttaggagttggttgagtctggagtcacattcttagaggagagttggaggtcgattgatcagagcagattcacatcaaagtttaggcaatatcaccctttgattggagctaaaatatgtgctctaatgacacatattctatatgatttgtgcaccaaaggacattcaaatcacccaacttgacctaaatcaatgctaaggccctagccatgagtttaatttgtactttggagacttatctcaggttcaagggaagaaaattgtgcaaattgaatgactttagattttaaaagatcaagaaagggctaaatgaggaaataagtgagtcaagactcattgaatgtaaggaaaggcaagacgaggatatcatgaggttggaagatgataaatgaccattatggagtaagaaagaatgcaagaaagcatgggaaatgaggcatgaagcaagattcagctacatggaaatttagaactcaaaaatctgatgacattatatactctgactttgaggacaaatttggagcactttctggagtccattatatacatactatatattctttcaaagcttgggaagtcaggagtccaacactttaaatggttttcaaatcagagctgaaatgaagaagttatgaccatttgaagacaactgcactaagctggagggtcattttgaaatgatttcgaaattcaacttatgatttcgaaattcaacttataaattcgaaatccacttcgaaatgacaccaatttcgaattcactcactgccactttgatgttccgcctcctctaccccgggaattgcatctattcaacttatgaattcgaaatccacttcgaaatgacaccaatttcaaattcacccactaccactttgatgtttcgcctcctctacctcgggaattgcatctagggcacttcatccaccctaagtggaccccacacgactagaaatcaccattttattatttttttaatcatttttaggaaattattttgtaataagtggccaatgagagtgtgccacatgttaagtaattgatggtattatataaactctctcaattctaggtttgagggatcttggatttttttctagagagtttgacattgaaggtggaagaagacgagaactttggtttgttttcttttccttctttattaaatatattgtttttagtttcttttgattcaaattatgaatttttaccctattatggattgtgaatgtgacatcacccctatgagaggctaagagccaacttggggcttgaaacatgaaaacctaagggctaggaaacctatagggacaatgggtaacttattataacaatgagattaattattggttgggtgacaatttatcatttttttatcctatccttgtagttcatttagggaatgatacgatatattattacctgatactagtgattcttggtaaatcttgatcattagttatcctcgttttccgtatcgttatttacccctaaacaaagctataacgagtaggaagggttaaaaagccaaatcttaaattggtaatcaatctcattcatttgatggttttaggaatctgttttaaaaaggaaaaattaggtttcagatgcaattttgagttatagaactcaacttgatcgcgagcggccaatgatcccaaaaccctaagatcatattacttaaaagacccttgttttctctaatttctataccttagggttggattgtggaaaaccccaaacttgaatcaattgaatttaaaatcaatattcattttttttattaatttaatttcttttacttagtttcacattattcacatattgtttttcactttaggatttaaacaaaaacaattcatttattctagtattgacaattttcataagccagtccttgaggacgatacccagaatactacaaaagtcgtagtgactctttctctagtttttcttgatcagagttactatgtaaaaaggctaagtattttggtacaatagagaattttggtcaagaaattgacgtcattgtcggggattggcaatcgtcataactaggatatagtgcattactttgttttagttcttttattttttatctttatatatatttttcttttattttatgcttggttgggaaagagatcttttaggtagacttcaaagaacaattgaggaatctcaaccaaatatggaggacactaaagaattcaacagtaataacaacaggccatgaccacctatgcaaggccaaagaactatgagagagcttctaaatcctcccaggttgagcacaccatcgtgttttatgctacctccaaatcatgatcatgttaccattcggcctcaagtggtgtctcaattacccatttttagggggatagaaaatgaaaatccatactctcacatcaaggaatttgaggacatcatttcaatttttcgagaagccaacactcctttggagatctttcgcatgaagctattccccttgtcattgaaggataaagctaagacttggttaaatagtcttagaccctatagtatcagaaattggggtgatctacaatcagtgtttttgcataaattatttccaacacatagaactagtgcattgaaaaaggagatctcgaatttcaaggctatggaggatgagaaattttttgcatgttgggaaagattcggggagattgtcttagcttgtcctagtttcgtatttctatgaagggatgtcaccaccaatgaaacaacttgtggaggagatttcatgaataaaaaccccgatgaagcatttcaattccttaattatgttgccgaggtatctagaagttgggaagaaccaattgtcaaggaaccatctagagattataacaatgaacagaacaagagctagtggaatgtcttaccagagggtttagatgtccaagtaaattttgcaaccgttatgagaaggttggatgatttggaagccaagggagttcaagaggtacaaatagtcaatgagggggtaactcaactgtgcttgatatgtaagtctacggaacatggtgtgcaatcttgtcctactctacctgcagtgcaagacatgtttatggagcaagccaatgccttagggacatacaagcaatattctagcaattctccatattccaacacttataatccgggttggaggaatcatccaaatttatcatggagatcaggtaacaatggctagtttcaacagcaaggaagtcgatttcagggtaatcaaactaatgggcagcaaggttttcagccacaaggtatgccatctcagaattttcaacagcaacatcaaacctcatcatctaactcaagcctagaagatatgatgagagagtttataaaaaagcaagacaagcgtaatgaagatcaaaataggataaatgctcaaacatctcaagaactagtagatattcgaaccactttgagccaacttgctgtaagtttatctcaagagaaaggaaaattcctaactcaaccacagaaaaattcgagaggagtaaatgaagtttctaaagtgcaaaaagaagattgcaatgcagttatcatactcaaaaatgggaaagaatatgaaggtcccaagttacctgtaagtgaagatattcctgctagagatgaaccaaccgtggagaaaaatgttagaaataagaaagcgtttgaaaaatatgaggaagtcattgtgagcaaagataaaatgagtgtttccaatcatttgcctttccctttagctatgtagagacataaagtgggggataagactttagagattttggaagttttgaagcaagtgaagatcaacattccactccttgatatgatcaagcaagttcctgctcatgcaaagttcctcaaagacttatgcactgtgaagagaatgattaaattaagcaagaaagcattcctcaccgagcaagtcaatgccatcattgagaataaggcaatggtgaagtacaaagatccaggttgtcctaccatctcagtccagattggagattcattcgtggaaaaggctttgttagatttgggagctagtgtgaatttgcttccatattcaatctataagcaattgggattgggaaagcttaaggctactaccattacactctctttagtagaccgttcgattgaagtacctagaggagtagtcgaagatgttttggtgcaagttgaaaagttctactacccagtggactttgtggtgttagatacagaaccgttgaaaaaaggtgtgaattctgttctaattattcttgggagaccacccttccttgctatagccaatgctctcattaactgtcgaaatggattgatgcagttatcttttgggaacatgacaatgtaaatgaatgtcttcaatttatgcaagcaaccgatggaccatgatgaagtggaaaatgaggaagcatgccttatagaggctttggtgcaagaacacacagaaaagttaatgaaagaaaatatagatgaatttttctctacaattgttaaggaagaatgtgttcaagttgctacaaaatggaaagaaaaatgtaccattcaatctttgaacaatgttgagaatgatgaagaaagcaaaaaggaagaggttgagatcagcaaaccaaagttaaagcccctaccacatggtttaaagtatgtttatttagaggaaaatgtagctattgctagccctttgagcctcacacgagcactgtagcattttctttcatcacctcatttacctattacaccgggttggggaccctatagtgtttgcatgctttgattagatacatcgtgagttctaaacttaacatacatattcaggcctcatctctcactcttcattgtgatattttccattttgacatcatttcatcactttttttggcatcacatatcaccatttgtaatattcgttctctgtcttttctctcatcattgcttactcgacattatccttgtttcaccttgagtgatggtttttcacacgtcattgcatggaggattgtcacattctttcctcccgttcaccccatgggcagtgattcagagatctcagtttgagaggttgtcttgttagtgaggattcatgttacatccatatatggagagggtttgatcatttgggtatgtactttcataggaggtcattcattattgatcaaagtatgtgcaaaaaaaaaaaaaaaaaaagataacatgttctttattgtatcattctccattgagcacatgtatggatgtgctagtttgcttcattgagtttatgtgttagagagagttcgtaagggggcttatttgtgagattctatcttagtatatattttgggtgagagtatgagttgcctattcgatttttgtgagagaggcaagcgatcttctttaggatttttggatccttgccctattcgtcattacatccatttttatgtgacttatctccatgctttgatgcaggttgaccatcacccactttcctatccttttgttttcttctatctttgttctattactccatttcgctctacctcatctaattttttttttttctcatcttgcatgatgtttgacttgggttcaacatccacactttattcttacttattcgatatgtccattcctttatcatcacttttcatgtggggatccttaggctcgcgactcatgatgttttctacacattgcatctcatgcacgaggggtatggggattatatcattgggattattgaacctagtttcctttcatttctttcaccctaagactttagcctacgttacgtcctgtttcttaagaccaccctaaggccatgacttcatacattgtgcttaacgactcacacatgggcaatacttgagattggttggagattatttcttggagcatgatggatggggagttgatgtgatggattacactagggcatacccctcttatcagtgatggattttcaaaggtgatgtgatttacactagggcataccctgctcatcgatgacattttctttcgggatgatgccttgcactgaggcatagtcagttcacttcttcacttggattatgatggattaggggttgtgggatgaccctaaactggggcatagccatttcagagagcactattattggaaatacagtcactctactcgatattctacattgaaacacattttactcattaatggttgatttttgagatgatggtttattttgagacacagttgcttaagagattgtgcatggtagacataaccactctattatttcttgtggagcatgaggtgattagggtctgttaaggttatattaatatattcattttcaacattgagagatgagattgaccttattatgatgacacatgttgagacataaccctctcattggcgatggactttgatttatcttggagcatagacacttcagatggtttatattggggcataaccactttattcacattcatagggcatgaagattctgattcatgtggattatgttgagatgtttccattttttggcaccaggagtggagattgattgatttgttgacatacactaggcatgatcttccttagcagttgttgactcggatacacttatactgggacatagccgggatggagagtatttttcggtggagcatagccaccctattagatcctttacactagggcatatccatcttttggagggagatcagattgattctttatgttggagcatctgacgagtgatatggagatcactggattatttcatgttgtcctcattgcatactggggcatagccacctagttggatgtttcgatatcgagacttgactttctatttatgattgttgtttttgatggattatggagctattgacactttgggtttagttttctcggcgtacttaggtgatcttggatacctgcttacctttcatttcatactcagacatctcacccttgatactttcatgctttctatcttaccagagcttgatcattaccttcttttatcccacacatctcaccatgacacatgacctcacaactctctctcgattaggagaagatgtagatcaatcctcgttttctttgattgccctttcatacatcttttagactttaggttcaacatcttccatgatggtagggcctaatagattgttgatttattagtgatgatgctttcattttgacagttggcatgttgagtgttgatttgcttgcttttttcattttgagcactggtcatcattgtttttattcatcagttagttttgttttgtcaacatggtatcacaatacatggtcctgtttggtattacctatttgaggttggacattttcattacatgatggatgagcatgtttcaaagcatagtagttttgaggcattttgtatctcagattgttcaccgttacatgttggggaataccgtcttctctaagagcaccaaacctttcagcagacttttattcaccttttgatctagttgttgacccctatgagttgcatactagggcataccctccttccctaggatcattggacctttcacaggcttcattatattttgacctagttgtcgattcttataagtttgtcatactggggcatatcccctcctatcgagtttgcttacatcgttatcctagttatcctttgtctttgggccacttgatcatatcaccatcttgtcagttcaatctgagtttttcaggaccgcacctatatcaattggtcatcttcctatcagtttgcattcagtttgagttgggactgcatctatatcaatcagtcatcttcctatcagtttgtgttcagtttaagttgggacctcacctatatcgatcggtcatcgtcttgtcaatttgagtttggattttgaggttgcacctatatcaatcggtcatctttctatcaattcagttcagtttgagttttgaggtcgtacttatatcgatctgtcattcattttgtcagttcagttagaattgggaccacatctatatcaatcggtcatttttttatcagtttgagtttttgggaccgcacctatatcgatcgatcatttgtcttgtcagtttgagttcaatttgagtttttggggccccacctatattgattggtcatcttcctatcagtttgagtttggattttgaggtcgcacctatatcaattggtcatatttctatcagttcaattcaatttgagttttagggttgcacctatatcaatcaatcattcatcttgtcagttcagttagagttaggactgcacctatatcaatcagtcatcttcctatcagtttgagttttcaagaccgcactcatatcgattggtcatttgtcttgttagtttgagttcaatttgagtttttagggccacacctatattgatcgaccatcttcctatcagtttgtgtttagtttgagttttcgagactgcacctatatcaatcagtcattcatcttattagttcagttcaagttaggaccgcacctatatcgatctgtcatcatcttgtcagtttgagtttggctttttagggctgcacttatatcaatcggtcatcttcctgtcagtttgtatttagttcgagtcaaggttgcacctatatcgatcgatcatttgttttgtcagtttgagtttttattgatcggtcattgtcatgtcagttcagtttgagattttaaggtcgtacctatatcgattggtcattgtccatgttagtttgagtttttggggccgtacctatatcgatcgaccatcttcctgtcaatttgagtttgagttttcgagttgggaccgcacctatattgatcggttatcttcatgtcagtttcgttcaatttgtgtttttaggaccatacttatatcgatcggtcattgtcttgtcaatttgagtttgagttttcaagttgggaccgcacctatatcgatcggtcattgtcttgtcaatttgagtttgagttttcaagttgggaccgcacctatatcgatcgatcattgtcttgtcagtatgagtttgagttttcgagaccacacccatatcgattggtcattgtcatgtcaattcaatttgagttttcaggaatgcacttatatcgatcaatcattcatcttgttagtttagttttcgggaccacacctatatcgatcggtcatcttcctgtcagtttgtgtttagttcgagttgggattgcacctatatcgatcggtcattcttgctatcttgttagtttaacttaagtttcgggaccgcacctatatcgatcggtcattcatcttgtcattcattgtcatgtcactttgagtttttgggaccacacctatatcgatcggtcattgtcatatcagttcagtttgagtttttggggtcgtacctatattgatcggtcatcttcctatcagtttgtgttcaatccgagttaggaccgcacctatatcgatcgatcattcatcttgccattcatcatcttatcagtttgagtttgagtttttggggtcgcacctatatcaatcgaccatcttcctatcagtttatgtttagtttgagttgggatcgcacttatatcgatcagtcattctcttgtcagttcagtttgagtttttcagaaccgcacctatatcaatcaatcattcattttgttagttcaattcgagtttttcaagactgcacctatattgatcaatcattcgtcttttcaatttgagttttcaagttggggtcgcacctatatcgatcagtcattcattttttcaattcagttagagttttagggttgcacttatatcgatcggtcattcatcttgtcagtgagtttgagtttttaggaccgcacctatatcgattggtcatcttcatgtcagtttcgtgtcagtttgagtttcaggaccgcacctatattgatcggtcatttttttgttagtttagtttgacttttttgagaccgcacttatatcgatcagtcattgtcttgtcagtttgagtttgagtttgagtttttgggaccgcacctatatcaatcagtcatttatttttcatgtcaatatgaggttgagtttttcaggaccgcactgtggacccgcatttttcacgtgcgtccccactcgatcggcgagactcgctttttatttatttgtgaaaatttgattttttgaaaaaaagttggagtcgccacttattttatttttatttttgaagggaaaataaaacaagaaataaaaccctaaaaaaaatgactccataatttttggaaaagcgtgtctttgaaaacccaagtcttggtccggggatcaggttacttattgggaaggtacctctaggaggtagcacccctctaagccttaaagaggtctctactaattaagttaaggggaatatggcaattaatcggttaattatggatacctaagtaggctaggtgatttcaaaaaatttgcatgctaaacaaggtcaaattgccataaaagaaatgttaggatgcgtacccggaccgcttctcaagcgttatcgtaaaacatcagagttagtatagaagtataacacacaacatgtatttaatcatagtgaatcaaacatacatctaaacacctaaggattatcaaacatatgcatacttcatagtgacacgattgtttacaaaatttagaaagtaggcgataggaggggcgtacctggatagcataaataacttacaatgcgctctcataagacatgagggattagataataataaaataaagaaaccctagcatgcttgttatctaattagcataacaaaaattatcaaagtatatgaaaatattaattatcacacacatcttatatacaattcctaaaaaagatagacataatttcaacaagtgacaaaaatggcaacaaaaataatttttgaaaagattttcttatgtaggggtttcaccaattccccaattgatatacacgaatttagcccagaatcatcccattatttgggaccacaagctttgattcgtgtttttgttcaaaaccaaaatttttgttgaaaaccgagaatgatgcaaaccgaacaagatatggttgcatattatttttaaataataataaaaaaaaagattttgatcctgaggactctaaatgagtttttgaaatagatttttaaaatgatttttttgagaaaagtattttattttaaaataaaaggaattaatttggaaaaaataaaatataagaaataaaatacccaacaaaacaaaaatgaaacctcaaagtaaaatttttttagtaattaacaaaaatgataatggtgatggtagaggccaatcttcatgattttccaatggcctttgaacaaaaaggaaactatcaaagcaataaattattaatatttagatcaaataagctaatgaaatatccatcaagaattagcaacaaggattcaagaagcgcataaattgagaataacaatccataattaacataagattaactaaacacataaatgcctctagactaaaaaaataaattaaatcaagattaaactttatctaacgggattaattaaactaatgtattcaaatcacaaacacatacaagtgaagaacaaattaaaactaaattaaattgtaattaaaaacatgaactttatttaataagattaattaaactactaaattacaattacaaacacatccaaattaaaaataaataaaagctaaactaaatcggaatttcaaatatgaactttatctaacaagattatttaaactaatgaattaaaatcacaaatatacttaaactaaaagataggttaaaactgaactaatttagaattaaaaaaatataaactttatctaacatgattatttaaactaataaattaaaatcacatacatatttaaactaacaaataaattaaaaataaactattttgggattaaaaacatgaactttatctaacataattatttaaacttaagaattaagatcaactaatgcatttaaactaaaaacgaattgaaatcaaactaattgagattaaaaacacaaactttatttaacgtgattatttaaagtaaagaattaaaatcaacaaaatacatttaaactaaaaacaaattaaaatcaaattaattgggattaaaaatacaaaatttattcgatatgattatttaaacttaagaattaagatcaacaaaatgtatttaaactaaaaacgaattgaaatcaaactagttgagattaaaaacacaaactttatttaacgtgattattaaaagtcaagaattaagatcaacaaaatatatttaaactaaaaaacgaattgaaatcaaattaattgggattaaaaatacaagctttatttaacgtgattatttaaaacaaagaattaagatcaactaatgcatttaaattaaaaatgaattgaaatcaaactaattgggattaaaaatacaaactttattcaatacaattatttaaacttaagaattaaaatcaacaaaatacatttaaactaaaaaacaagttaaaatcaaactaattgggattaaaaatacaaactttattcgatatgattatttaaacttaagaattaagatcaataaaatgtatttaaactaaaaacgaattggaatcaaactaattgagattaaaaacataaactttatttaacgtgattatttaaagtcaagaattaagatcaacaaaatacatttaaactaaaaaataaattaaaatcaaactaattgggattaaaaatacaaactttattcgatatgattatttaaactaaagaattaagatcaacaaaatacatttaaactaaaaaacgaattgaaatcaaattaattgggattaaaaatacaaactttatttaacgtgattatttaaaacaaagaattaagatcaactaatgcatttaaattaaaaacgaattgaaatcaaactaattgggattaaaaatacaaactttattcaatatgattatttaaacttaagaattaaaatcattaacaaacttaaactaaaagatagattagaattaaactaattggggatttaaaaagaaaataatataaactttaacacaaagaattaatcaaaaactaaaatttccaaaaaaaaaaaaaaaaaaaaaaaatctaggctaaataaaagtactatatagaaaactaacctttgaagtgaaagagaaaatcctctcttgatgattaaatgacagcccgatctccgttcgaagtcccttacttttttccaaaattccgtgtgctctgcccccaagaaaaatccctctattcttttccttttctcacctatatatatcacccctcaagacctaaatttgtttccaaaaaggaaaattctcctccttcctttcttcttctcttctttttttaaatcctccaatcaaaagcaatcttcccaatttcaaattcccctccaaaaccttccaaggagagtcccatcttccttaaactccaatggtaagtttccttgcaaaaacatgaaatttttgaagttaaataattgcatgtatagataaataagtaaataaattaaaaaatggtaaaaataataaataaataaataagttaaggaaaataatataaagaggaagataaccaataaaaagtgaatgataatcataaaattaaaattaaaaacaaaataaataaataaataaataaaataaaataaaataaaataaaagtcttcgtaggcctagtgtgcctaaacgggcctaaggtgagactaagtgggcctagggtagtgcctaatgggccaagtgtatctaaaagctatcctaaaaaaacaagaaaagcctaagtctaagttagggctgccaagggtcacaataagggatcaaataatccctcaaccaaaatctccgaggtgactcagaaaaaggtaagtggtatgagtagccatgggccaccaaggaactattgtggagcattgaaaatgaattttaaagacatgtgctaaagggataaaattgagggtctacacgcacctatatcgattggtcattgtcttataagtttgagtttgagtttttgagacctcacccatattgatcgaccatcttcctattatcttgtgttagatttcaatttttgggattacacctatatcggtcgatcattcatctagtcagttcagtcttatctttagcatagaccacaccttatacgattggttttatctttgtcttttccttagtttggtgacttcggtcatgacaactgtgtcccatctgtttcaagtgattttggtcattacgaccgcgtcccgtctaattcaggcgatttcagtcatggcgaccatgtctcgttctttcctttagttttgtgattttgttcattgtgaccgcatctcacccttcctctattttaggtgactccaatcttttcacaccttgtcctcacagtttcatatcccatcctattttcgtatagtagatgtgtggtttctccctttgtatgtgtttgttcatgtgcttctaggtggttcagctattattcaactttgacattgatcttcgagctacttttagagacatcttagagggagtctagatccatagcgcaactttagaggcattctgagagctacccttctcttaggattttagggccctttttgttcatttgttggtttgaccaagtttgtgttctacttgtatacctttagggttctttctttttcttcgatagagttcacttcattctactcactattcgcactttcttttcactctagtgttcatattccttacactcgtgaactatactaaagatgggcatatttgtagacccctttgtgaataaggtttttttttttttttttttaccatcccggtaagagttggcagcgtcttagaggagtggggggtcgacttcttcaaagactcaattgcatgcatgggacggatggctaagaacacaccaccacctcgccatggtggtggttgagatgagactttttctaaacggatgatagatgatgagatagggagcaataagttgaaagagccaaagggaaaaacagagctagggggagctgtggaggaaggaagggagtaccgatgaataatgagaggttttgagagagagagaggaggcgaaggaagggaatagcagcacaacgcactattacttgttactaaggtacgatctcactcccactctgtttatgtttatgcatgattcgttttattatttgatcatttaactgatatccattgatttccttatcaattgtcacacttgcttcaccttatttagtagggaccttattatagggcttagaggagtgttgcgactcaccaccgtaccttcccaataggtaacctaacccccagatccagattctgtttttgtagacatgtcttttccaaataaggagtcacatagagttttctttcttattttgttttccctttaaaaaaattaaaataagtggcgactccaagtcttttctaaaaatcatatattcaatatataaaaggcgagttttgtcatctagtgggaatgcataaagcaaaatgcggggtccacaaaactattttccaaaagttttgtttatcaatgtgtaactttagtataaattaagagaaaatgaacataaatgattaaatacaattttatgacatatatattttatttttattttatataaattaaaaattaaaaattttaacaaagcaaaatattataaccacaatcaagtttttatcttatttaattaaaaatattaaacattttaactaagaaaaaaagttaaaactacatttaagaatcataaacaaaacgttaaaaatcatgataattgattttttattttcatataaaaattttaaaatttttaaaaatataaaaaataaaataatatgataaatttatttttatttaatttatatatgataagatttattaaataaataaatattttatttacaatgaatacataaaatcttatattctaaacttttaaatttgtgcattatgtatttattttcatattaatttttctcattaattatttatcatattttcttattcttcttattattattattatgtttcaagtgtctttaaataattaaaatcaataaatatgaaaaggtgaaagagtgaaaaaaatgaaatttaaaaaaaaacataaattattgtctaggtaaaatgaagaaaaaagaaaaaaaataaaaaataaagtggtatattggttacccacgtgtcaacaagtatgaaattcttttactggtcaaaaaaataaaaaataaaaacgcaaatggattaatcaactagagaaaataactgaaggacaatttgaatccatgtttattaaattattttataaatttaaaaaatctataacttctagataagttaccttcacattattcgcggcatcaatgaagttggtatagtgaacttcttgagttttcttactttgagaatttttttgaagatgatccttgtccattaaatttcatggtttttgttatagagaatttatcggtcttatgcaagcttttatttattacttttgacttgcttttaacctttgacaagagtaccagggctaagatacaagcatgtaagacaatattgctaaatattgatggtttatcgtcgatatatcatatattggaaagtatgaaaacgatattttgtagagaaatatcgttttaaataatagatacaagaaccaatcctggatattggttcttaaggaagctcggaggtgaggtaatgctttttaaggtcagtggtgggtggttctctattttaaatttttaagtagctttaaaattaataactgaggaatgtgattgaagggcttcggcattatttgagacagttaatgctgaagtgacctgtcgcggaatatatagatacagcagtgacgtaaagagatatttagtaacaagttgcggataaacatctacaacaccagaagagaagtgccaagtgtagatgggattttttgataattgcacggattttttaaaatatagtaaattgaaaaatactttataatgtacgacacttttttccactatagaatatatgtcttgacatatttctcatcatttttatatcaataacacgttaaaaaaatttaaatttatattaaaaatatcttttcaaaagacatcccttgtaattttataaaatcaaatttatattaaaagtctagatatttttcataatttttatatcaattacataataaataaattaaatttatattaaaaatttctccttaaagagatattttttataattttataaaattaaatttatattaaaggtgtcttttaaagagacacctttaataattcttgtatcaattatctattgaaataattgaatttatattaaaagtgttttttcgaaagatacattgtataatttcataaaattaaatttatattgaaatattttccttcaaaagatgttttaaatataaatctaattttttttataggtgaccaatataaaaattgtgaaaagtgtttttttaaaagatatatttaatataaattcaattttatggaattgtaaagatacctttaatgtaaatttaattttttttaattatgtgactaatatgaatattaaggaagatgtttccttcaaaagacacctttagtataaatttgattttaaggtattgtggaaaaaatgtttctttaatataaattcaattttttttagcatatatgactaataaaaaaattatgaaaaaaaatcttttaaagagatacctttaatataaattcaaatttataaaattataaaagttctctcttaaacagatacctttattataaattcatttttttttaacatgtataattgaaatgaaaaatatggaaggtgtttttaaaaattatcctaaatttatcaataattttgtaattaccgtattttaagaaattttcttgaaagtaccattttttaagaattattttttaaaataggtgtagatgatggggtgccacacttccaagtataaattttactctccgaccccctctgtccacaggctttgtcctcaatcctcaagggaatctgatggtggtggtctctatataagaaaaaggaatcctccgagtctccgccaggagagtctcctctcaccgaccaggg

SEQ ID NO: 10502 - DNA, 3737 bp, Vitis vinifera
  Intron number 1 from transcript GSVIVT01035762001 (locus G SVIVG01035762001) derived from phytozome v7.0 (chr-ID chr4 ; pos 4078402 to 4082138)
tccactttcattcgaaatcgttgatctgatcgaaggtaaccctctgttcttttcttgttttttttttttttttttttaatgtctgattgtcttgaaatattagttagggttttgggttttaggattgtttggttaggaggaaagtatgagaaagcatttccaactgtctaagatacatttcttctctattttctctcttgatctagttttctcaaggtacgtcaagtttttcttggttttttttttcaatctctgatttgattgtcaggaaagatgaggaaaggatgagaagattaggaatatttggaatattttccttccattttctcttttggtgttttggttgcagaaaaaattagggatccttgtctggtcatttgtttgatcatttgcaactcataattttgcttaatagcttctgattcagggtatatgtcaaggttttaatggttcatgttttcagagggtattttgattttgtttgtatgattccgttttcctatgtcttcttaacaagcagggaagcattgtttttcttttttgggatcctaatgttgatgcattgtgtgatgaaaatgactatacaactatgaaacttcatgaaacccaaacaaaagccaaaaccatgtttggtgaaattaggaaagtagtggagagtaaaaagattgcctatatgtaagcagtgaatgaatttcctataacagaggataaggatttgtttgagtgggttggcccattttatatttgggtaaattttattttactttaggcattagacagatgttgacaggcaagactgggaggaatttgatctctttttactttgagtgtctagcctgtgatgctttgtttggtctaatgacagacagtttctgataattaacctttgaaagtgaagaattttgcaaactgtattgactagtagagtcagtattttgcaccttttgattcttggaagttgaagttcatgttgaaatattctggtataaggagtgagtttctagttttggaatagagttgggcactctggatttgtactttctttatccaaaagaaaatgccttgatccatttctttttttatacatatggtttgacaaagctaagataaattattgccttagctttatgcagttccactgaattatgataatgaagaaactactttatacatatggttttcagaattttttcatggaatgttgtcttgattgaactttttcttgtgccatttggccttaactgtttctggtttgggattatgatttttggtgcagtttagggctaaaatcatttactaatcaaatggttatcttctataattatcctgtttggctaatgtttgggttttgaaaatgtctcttgtagaatgttatattgattgaagtttttctggtgccatttggtctcaaatgtttctggttgcatagttttaaaatggtttattgatagtgtttatattcattgtgatgattctttatgatcctcatttttggttgatgctagggttttgcaaatcctcatcctcttgctagggtttttcatgtcattaaccaccagtgggtttatttatttattttttcctctcttcttatttctatgcaaaaatttccaactagttatgagtgtgtatcttcaattggttataccatccacttgacgtattttaaagcttttgtaagactatctcttgctagggaattcttctttatctaagccatcaaagagattttactgcatcaatcaaacattggcccggcatgtaccgaaaaagtaagataacagcaaaattgaattgtcgcttctatataatttatgtcaaagttctgcacaaaaattgaggtctctacttgcccctctcttagaaaagcaacccctctcttagaaaagcaatcctgatataatttcatggttgtttcatttccttattacaaaatacaagatatttctcttccagtttccaaatgaaagtttttttctacttctttctacatccaaaaatgggcaatatagtttattcttttacaaatcttgaagagtcaatgtttcttctgcatctatcattcttttttttcttttttcttttttcttttttgggtgttatattggttgaggactagctggaactttggttatcagttgcagtccagctggaaaatgttacaaaagtttgtgaagtttattttcctgagcttgtattgaattagcaggaaatgacttgtttgttaaatataaattgtttaaccttcagcagtcaatgattacttattcatgatagtgatgaattcgtgtgtactgcaaagtatctttcttaaaattgattacatgttcttttatgcttcattcctgtatacatatgtacctattttttctttcttttgcaaagatgtaaacaataatgcagtcaacttttttatacttggttggggaaattaaggctgcaaatgggaacataggttgctagagtgtaaggggaagttcatatagttttgactgctagggactaagggagtaggaaaagataaataagcaaaatcataataaaaccaacatggaaaaagaagaaaagttatcacctaaattagagaaatatatcctatattcaaatatttatatataaaaggagagagtgaagcaaagagaaagggggataattctcttttaactaaggattttgggtataggggcatatcaggatactgggatggggtttgacttaaagttgagtcaaatcttaggtggtgtttatttttttggctttttgctgaaaaccatttagttttagaattaagttgtttgtttttttactttttcatgacttattataaactttttactaaatagaaaaagccaaaatatgtggctttttctaaataaaaagaataacacaatggtttttttttactttttaatacttaatagaaataaaatactacaaaaacaaacaacctaatatttaatactattaagtattaaggttctatttagaattaagtaaaaaaacaaacaccaccttagtttaatcaatatagaacaattccaaatggtaggattagtacttccaacagtcttgttgttattggtaacataatgttggtgctggttacataatggcatattcctggattgtacctttgtaacacaattattttttataagagaatgaagtacaaagcatttgcctgagggattattcaggcgggactggtaggttttaacttcattctttatgacatttctagataaaaatgaaaaaaccttctaaatttaaacatgtttaaacaaacattaagattgaaatctcttcataaaggggacagaaatcttatacataactagatatttatggtagacttagctaaagtagctaaatcggaaagtatctagttcttcttgaacttcttttgaaactagtttagctagaaacttcaactgcctgaatgagtgatattaagactgatacaactaccaatgaggatttcttttcaaccaagaatattacacttgaggatttctttttcttatttgtttattatgttttacagaatctgcctatatgatgctcaataccgagtttacatttaaaaaatttaatcataccaagtattgtttacactagataaccatattttcttgatgttttgttccttaattctttctttattcttcattttaattgtgtgattctttgtttgaaaattattatttctctaaaatatatatttttttatatagagg

SEQ ID NO: 10503 - DNA, 3025 bp, Vitis vinifera
  Intron number 2 from transcript GSVIVT01016681001 (locus G SVIVG01016681001) derived from phytozome v7.0 (chr-ID chr9 ; pos 340078 to 343102)
gtttttgtactaatagctagaagcaattcattctagttgtcattgattattctttttctacattgtaaatcaacacatcaaacttgcattggttatcaaattattctgtgttactaaactttcacttaactacccaacaaactgaaaccagagagtgattaaaggaggcaattgcagtcatgggtctcatttagatacattgctttccattgaaaagccaggaaacaacaaaggtggaccgctgggtgggtgggtgggggctttgttactatatcatttcattactcttcccatacaatccaaatggtttcctggaaagacaggtgctttctttggcatgtcacctcttcattgctttttaaagactaggatttgtcaaaagtttactaaaaatagaccataataattgagtaaagtaaaggatcatcaagaagatggtagatgggtaaagaaccttcttttctcatgaacccttaaaccacttttcttttttgttctataataaagtgtataaagccttaagcaacattccctttaaaaagccagcttaagggattggcacatgagaaaggtgtaccgttttctcaaatctgaaaggttttgctttcatttaaaaccaaacccattaccccatgcccccccccccccctcctctctctctctctctctctctctctacttgtaataatgagactactcccaataattgcatgtgaactgtactgaccccacctctcttccttccccctctgcaacccatttttaatcttctttagctgtgccatggggccttatgtccatgcctttactctgtcctcctctctttgattttttttattttatttccatcttgttttacccttttaccaggaggatagtgacacttaaatgcccattagtactgtagtctttctcaatggtaaaagtcagagggagggctctaagaccccagtctgtccattttaaattcaaagtcatagcatctttctagcatcacaaacccaagaagtaggagccctgcatggagaatttgtctctcttcaagggtcccccaccattgatactggttgatatttgcatgatgtcaaactaaaagaggatcaaagtctcacaagaagaccaccatcaccccaattcaaacaaccccatgattgaatcatggccagctagctgttgtttctactccatgacccaccaccattttaccctccaaattcacaatgatgatactggatgattgacaactgtccaagccatgcgcagaagcaccattgagccagtccaactcacaaatccaacaccagaaatcagccattttgggcacaatgttcattacctacttggtagacttgcttatagtgagtattgattgattgtctgtagacaatccaagttatgaattgagaatcagcacatgcactttatggaaacaacctgcaggcattgatgggtgactacctttggtagatatagatatccttctcccttccaattttcagccacatatatgtatctaccatattggttaataaatgcagcctttctagtaggaaaacctaaatggctgatggagaaatctaaatttggtatcatgaaatgggtcgattcttttatcaaatacaatatcttgtaaacaaaaaagtaattgaaaaattaagataatttatgagggaagaaattatttagtaaagtttttaaaaacatcttcaagaacaagatttttatttgaaaattcaaatatggaaataaaaatagttgaaattagaaaactattctgtgttttaataaacaaataatgagatcaatctagtgcctcaaatgaagtccaatttacacaaaatgaagtacccacatgggtgaaggtgaagccacctaacatccctgtctccttcaattatgggccaacttcctaatatttccatggatacttagaaaggagacaaggcaataaaaccacaagaagccaaaaaattatcagtccaacatgtgagaccccagtaacacccaccacaaaaatcaccattacccaattctaattgctacaataataaccccattatcactacaaatctaattaaccaaaaccttacaataaattaaaccctaatgagaaaacatatatatatggtaataatagtagagatattttagtatataaagtgggattggaatggaatggattggattggattattagggaatgtccctgaccctgactttaataaatgggtgcatgaaaaaccgtgttgttttaatactcgggccccacgtgtgtgagaagggggaggtgattctcctagaatgaggcgcatggtagcatggtggtgtatgaatcaggtgggtgttgttaacacgtgggggtgattcttcttcttgagagaggcttagggatgaccacaaaagtccaggccccaacccaacatacacagaatcctgtagggccacagctgtttctatgggtttttattttaatattatgtcacgattctcaattcaaaaacaatataaaaacataggttttaggagtattgttccaaattttgtagtctacatatatatacaataaggtttgagtatgttgaccatggtttttattcgttctcccccccctgaactgaatgaacatggattcattctactaatatatatgcttttagctccaccatgaggatatgctaaatgacacatgattagacttaaaattttccaaatgaaattagtatctcaagtaaccataaatgtcaaataaaaagttgaacttcaagccaaaacatctatacatgttttaagtggtccttgtgagtgtcatattcatcctaccatctaagctgatgcagggcatgtgagatcctcatcccctagatgatgtgatgcaattgcaaatttgcaatcaattcttctacggatcattttcaccattctaaataaggaatacaagattgcatattcattttaatagagacgttattggttctacgcggtctagattgactcacttattattcttatgccaaaattgagcccc

SEQ ID NO: 10504 - DNA, 1777 bp, Vitis vinifera
  Intron number 1 from transcript GSVIVT01029337001 (locus G SVIVG01029337001) derived from phytozome v7.0 (chr-ID chr1 7; pos 14593836 to 14595612)
gcaccaaagtttgattcttctccttcgtgttcccggcaacccaacggagcatttcttgcgaattctcatgatttctgttcattgatagatacatgaatgaatgagcttttcggtatatttttatttattttgattttctcttgttttttttttccttttaattgtcttcattggacggttggagcatattttggggattgtcgtttggggcagatgatttaatagtctgatgagttatgttaattgatggatgtggaaatgagttttggattcattttaaatttgttttgattatctcaggttgcgttttccccccttcattttattagaaaccaaacaagagaatatgttgaaaattctaatgtggagttaagtgatttatgttcattgatcatctcatgcagttgcatttttttacctttcgttttcttggcaaccaaacatgaacatatgttgagaattctagtttgaaatcaatgataagtcattatgatgatttccggataaatgatttttgaacaattttcatttattttgattatcccctgttgttttgattttttccccttcattttctctgagaccaaattggaacatatattgaaaattctagtttggagtgagtagttgctgttcactatcttatgcttctttgttttgttttattttggtttttctttcttctttttcttctgtttattccttcatttttcttggcaaccaaacactagcaatgttgagaattccagtttgcctcaatagtttgttagtttgatgattctgtctatgtatagatatataaatgagtttttcatttatgttatttattttgattatctcatgctcttttctttgttcattttccttcattttctcagttactgagcagagaacatgttgaaaactgtagtttggagtcaattatcgatcaacttgtttgaaaacttatcttctattgatggatgtgggaatgagtttctgatttaatttgattgaaaatgataatcacttagtattggaagtacgatcttggtgaaaaagttaattaaaaaatgcaaaatcatgctaacaaatagtccagattgattctttgaatatggatgtaatctttagaaaaatcagggttgattaatgctcatgtccttgattttcccttggtttcacttagtattactcaaatcaatttggttatgaatcttatgatcaatcaaattgagttgttcagcgaatagactgtctggtttggttttctgaatccaatgtcaaaccatgtatttttatgtaaaatgaagggcacatattcactctatgcattggaggaacaaatcattggagagtctactaaaagtgaataggattactctatgattaatctattatagttttttagggttgggggcaataagatgccatgtcaaaacaattgaagcaaacaaaaatttcaattctaatttgagcaatgctaggcttgctggaactgtttcttggaatcaactcttgttaagagttagtgaacaattattcttgacttcaagaaaatttaaattgtttgccacactgagttggttggaaaaattgataggagatggaatttgaaaattttcctgattttcttctaatcttgtgttattccaacttcaagcacttataagcaatggaagtgttctataatgaataatttctcttgtttgaatgatgtattcttgaacttatttttattttcttctgctgatttgaggcaggtaggtggtgtaacaccaaagaagggtgggacaga

SEQ ID NO: 10505 - DNA, 13181 bp, Vitis vinifera
  Intron number 2 from transcript GSVIVT01025916001 (locus G SVIVG01025916001) derived from phytozome v7.0 (chr-ID chr1 8; pos 27269356 to 27282536)
accaagccaaagaagcacaacttctggtatgttaccttgccacatccttactagatcaaacatcatctcagttctttctctatgcaaagctttaaggtgtggaaggaatcttattttattcaaaaagcttgtgttagcatcggatgctggtctctgttgcctcttaacgtgatattagtactatttacaacagccatgcccaaacaaatattattacattcttatcactactttttggaccgcgaaaatcatgatcagtatttggccatttttttgggattggaacattatgcctctcaccaaacaagctatattattaattagatgattaaaaatatgcttaaggacagttgtcctctccacccatttctttattctttatgcatctactttagatcatgggccacgaccagaatttcatacaacttagtatactggtgcactctcccctgacagtaggatttttctatctactctacccagctagttcgttaaaatattatctggagattaatcttgtaagacactcaattataagaaaacgtgccctggtagttaattgatccaggatcattcccaagaacagccctagaatgatatttgagtcagatctcagaaaagagaccagacatacatggaagatgatactggtgcagtatcatccaaagaaatcaagtaatcaagatatcagaagaggcttttagaataatagatggagatgcgcatgcatactattattgtgaggagttccttatatttataggtggctttgttgatggaggatccaagcattattgactatctagcccatgatgtctggagctggattaggacaaccgaataacgtacgtttttagagattaacctaattaaaaatagaaactatcatgtcccacgttgagtatagattttctcctgcataactgccctagttttcccaagcttgaagttcacagtcaggagcaagaaatgtagatatatggttagtgaaaaattaggttcacttagcaaccacctaatgccataggacaaccactacattttctactcttgaggcatgctagaagttacacctgactagtttttgggctaagttgtgccttgcaaacctgttaccaccggactacttttgtaccaaggggagtttttctgccattattcgaaccattgttgtctagtgttatgcttatactgcaagctcctactcaatttttgtaccatatgcacaattcgattagggtctctttggtaatattataaaaaaagtctttagaaaaatagtttttgagagcaggtcttaaataacaatcttctcggattagtctcattgaagatactaaatatctacatatataaacaagagttcctatgaaaaacatcaaaccaagatatatacatagattaacgaaaagattacttaagggagagagccttacaattatgttaaacttgaggcttctttctaggaatagaagaatgatgtagttgcgtccctatggcatatcaaaatggttcactttattatttatctttgaaaaagtagacattcatttagtatatctaccaagttatgcttttgacttaagcatatgtagggaactttcatctctttagccctatccaatggagaacctgttttggattgttatttatttggaaaaaactgattttattcatttgatgttgttacttattttatttatttttttgtaaatataaaacaaaataagaaaaaaaaaagccttaaactgctttcaaaaaggaaatgtgaagtccgtagaataagaatgaattcaagggtcaagtttggtagtcggaaagtattagacaccttcctaagcctgaaataaattggtttctactaagtaaacaaaggcatttgtgataattattcattaattcatcaaaagatacaatgctataaaaaatcataagaaataaactatgagatgtacaatctatatattgtgacatgaagcatggtagatgacaaagaaactactgtattgtcacaatttttaattaaaaaggtggaaaggagcaaagacaaaaaataatcaaatcccaaagtctcaattccaccaaaaaaatattgtaagtcaagatctcttcctatatgtttttctaattacataggaagatttcttataggaaattgcttgtatagttgtcaaagatacctattcctaaaagaagatctcataataaaatatttcttttatgataatagaaaactcccttatacgaacatattctattaggaaactatcaatgactttccaattgattcaaaatagaatttaagaaacttttcaacaaactccaccttagctcaaattcccaagatttaaacaaactaaaaaatcttctatgttacttcactctcacacccctaaggggccttcaaatattaccaacaccaattaagttcaaggaatacctgaacttaattataggaatagactaagtcatcatatatgctgaattatccattgtagggatttttttatttttatttttactgcaatagcaccctatacaatcacatccataataaaatgcattctaacatcaatatgtttgatcctctcatggaacatttgatttttagtcacatgtatgacactttggttatcacaatagtcaactcctattgtaagcctaaatcgccaaccaaacccttaagtcaaatagcttctttcactgcttctttagcttccatatattttggtttagttgttaacaaagcaactatagagtgcaaagttactttccaacttatagtactaccacaaagttcatacataccctatcagaggcattattctatccaaatatctagcatagtcataatcaacataactaacaattgtcctagagacgttactacttttatcataactaagccaacatgtgatattcctttaagcatcaacgtatctatttcactattttcaatgaatctttccaaggcaatccatatatctactcacaacactaacaacatgtgaaatgtcttgcttagtgcaaatcacaacacatatgatgctcccaagtacattagcataagaaacatgtaacatgtgctctctctcttccccagtttgtggtgataaagaacttgaaagtttgaaatgaactactaattgagtatttaatgaattcaatccttgcattcaaaagtgttccaacactttctcaatgtactttttccatgaaaactacaatttccttgctttttggtctctatgaatctctatacctcaatattttctttgttagctccaagttctttcatttcaaactctcccctaagttgaggttttaacctattgatctcaacatattcttgcaggcaattaacatgtcatcaacatgtaatcataaatgaaagaaccacaaaataatgtcgtatgataaacacaactatcatactcactcctactatagtcattaccaatcataatagcatcaaaccttttatactgttgccaagaagattgctttaaataaaaaagagacttcttcaacaaacaaacatagtcttcctttcttgaaataatgaatccctcaaattgatgcatataaatttgttcttcttacttaccacgtagaaaaacaatctagatattaagttgctctaacttgaaatcaaacaaagcaaccataacaagtaacaccttgattgagctatccttcataactagagaaaacatttcattgaagtacaatcccttcttttgtgtgtagcctttttccaccaagcgtgttttgaacctagcatcttccactcttggaagtcttcattcttttttaatatttgttaacaacaatcttttgatctttaggattctcaactagttgccaagtatggttttttttttttaaaaaaatattcaatctcctcattcatataaaaaatccactatgtagactctatactagttatggcttcatgaaagtacgagtttgctcgttttcaatgctttcaaacatactaagtgcatatgcaaccaaatttgtataagcatacctttgaggtggtttaatttttctccttgttttatctttggccaaattttattgttgctcttatggcacattttcttcatcatcaagatgttgcacctcttcctccgttggctttatctaaatcattctttctatggttcttgaagctttaacctaaaactccatctttttaattctctcacactaaggttgttttctagatcaaattgctcattcctaggactcgacattgtagactcattaaaagtcacatcttactaataagaaatttagagaattttaaatctaggcatcatagtctatatatcatttcactacatttacatatcttaaaaatatttatacttcctcactcttggttccaacttaccttcactcacatgagcataagcaagatgacaaaaaattcttaaatttacacaattagaagggaactgaaccatatatcttcaagagtcctacaattactagaaattgaaggagatctattcacaagataataagttgaaatcgctactccagcttaaaattctttcaacaatcctacattgaaaagcatgcattgtgctatttctaaaagagttttattcatctattctgtaacatcattttgttatgaagtatgtctaactgtgtgatgtcttgcaatacttttattctttccaaactcattaaactctttcctatgaaatcccatgccattatttgttctcaagagtttgatatatttttctatctatttctcaatcaaagctttctattgcttgaacttcccaaagacatcatttttttgcttcaaaatatataatcgaacgtttctaaagtaattataaatgaagatcaatatatatcttccaatactaagtgatataacttgagaaggtctccaaagattagaatggatgtatctaaagtacctttagtcctatgaatatctgcactaaatttaacatggcattgtttcttgaatacacaatgctcacaaaaatataattctcccattttctgtccactaagcaaatcttctttgcttaatgttgttaacactctctcattcatatgcctaagctatatatgccacaatctagtagtctttaaaattgattttgaggtaaaaaatgcaattgcacctataatcgtgccaccttgtgtaaagaacattaatttttcttccctttcatcacaacaagagcgctctttgaaatccttaaaacttcacctccaaccatatatatatgtgtcccttagagtcaagtgtcctcaaagaaatcaaaattttcttcaactttagaacatgtcttacactagttaatgtccttataatgtcatcatgtatcttaatacaaattgtgtttattccaataaccttataagctacattgtttcccatgagaaccttcccaccatctacaagttggtaagtactaaaccaatccctattggtagatatatgttaatggcaccttgtatcaataatccactcatcacttgagttactaacattaactaaaaggacatttgcagtattagatttttcttctacaactgctgcatcagtaaaattagaagtttttttatttttattttttatcttttcctttagggtctagaaaatttctcacatagtgtcgttctttgttgcaattgaaacacttattgttttgcttgaactttgatttagacgtatatcaacctttttttgccatttttttcgttattgctctccctctaactaccaaaccttcacctaaactttcttcactactctcagacaccatcttcctactcagcatcatctatagagagagtatctctatcatacatcatggtatccatgaaatgctcataagaattcaaaagggaacacatcaaaattatggtttggtcttcatcatcaattcgaacatcagtattccttaaatccatgatattttaattaagctcatcaagatgatctttaatgaacatacttcctttcttttgaagagtgaataatcattttttcaaatacaaatgatttgtaagagactttgtcatatacaaactttccaacttgaaccataacttgacaacaacctcatgaagtatctcattacccaagcacaatagaataacattgtgcactttcttcataagttcacctttctctttatcaaacatcgttgttggtaaagcctttctattctttagtattttggataacccttgttgaactaataaggcacacatcttaatgctccataaatggaaattgtttatttcatcaaacttctcaaacccaaactttgttttcattctaggtctaatatatgctctactgtcaatttgttgtgaaaaaacatgacaaataataataataggcagaagaaaataaaagaacaaaaatagaaaacacacaatgatttacatggtttggcttaaagcctacatccatgggcaaagatgaaaaataacatctattattgaaggagaatacaaccctagaaccctcaaatcccaaagtcccaattatacccaaaaagaaactctctctcttagtcaaaatctcttcatatgtattttcctaattacataagaagatttcatataggaaactaattgtataattgtcaaagatacctatccccaaaagaagatttgataataggatatttcctctatgataatggaaaactcctttatctgaatacatcatattaagaactatcaatgacttgccaattgactcaaaatagaatttgagcactttccaaaaatatggaattaaagtgttatcccatgtctcatatgtatccaatgatccaaatcaaaatgtataatccacacctctctgctcaatttagtgtcaatatgcttacaacaaaaatttcattttctaaagcaactagtacaagatgtaaagatgaatgaaaagaaaaccataccttgtaagactatcgtaattctaatgagatgatcttttagttgtagtggtctcttgttgtttctcttctagtcaaccctatagagaacaaacgataacccaatagccttctcttacaatttctcttctaatcatccctacaaagaacaaacaataacccattagcctactcgttaatagcatctttctttttccaaatagtaattctccaaagccctaaagaatctccttcgatctctaatgaaaacttttgcatcctactatcgaaaagttttagtcaaatcccatcttagaaaactaagatttccttattagaaactatttccctcttaaaaacttaccaagattctttttttcttctcctctttctctcacaccgtattctccaaaaactctcactcctaccaaaaaattctattaagagatcctctctctttacaaaactaatccattttatcctagttccctacttccataaacaagctttgaaaaatattttcttcccaaaagtctcttgcttcctacctaaaaaataataattagaaaactatcacctttttcctctctcatccttcactaatatattttctctttattatttgtaacttttcaaacattctttttggatatgggttgggtgaagccattttttatttgaacatgaaaaaatcacttgaagtgggaatcaagatattaatttcaagtgcttgattcccacaatgtaaagtggaagctcaataggtatagaaatgggtaaattaatggtgtaaattcatattttagatttcatgaaggccatgtttaatttttttattcaagcatctagtatggaaaagggtaaattggaagtttgatttgaaggggaaaatgagagaaaacgactttgattttgatttcaagtagaaaattgatttggaactctaagcacaagtggcttttcgatttggcctctctaaatcgatttgaactaaaaaaaaaaaagaggaatcggttttcatttcgatttcaagtaagaaattggcttaaagacaacttcgatttctctgctatgcaaaaattgaaaatttttctttagctctacatgaaattcatgccgtacttgtctagtttcatatttcttaacttcttacacattgtttggggttctctaagtcatctttgtacatggtatgatctcttttagtactaagaaacactagaaagatatcatcatacttctcaccaagtcaaatacatagggatatgagtacaagtgtgaatatgtatatattgtacatatgtacaagtaaaacatagtgagttgcattgaagaataaaaataaccatcaattttgtctttgaacaatacgtacccactcaaatcctgaagcctaccctccaacatggtcactaatacatctcaatctaatgataatgatctcaaacaaaaatatgatgaaatggcataaccaatgtaaggagacaaaatgaaaaacaaaaatgataacaatttttccaagacatggtcatgatgaccaaaattaagggataacttgaaaaagatgatgaataatagtataactcaaagatgtgatcacgatgaccaaaatcaatagaaatatcatagataaaaggcaaaactcgagaatgtgttcgtgataaatgagtaaaactataaaaagaaaaggcaaaacacaaggatgaattttaatgacaaaaatcaatgaactgtagtaacaaaaaaagaaactcaagaacatggttgtaataaccaaaattaatgggactatatgataaaaaattagaactcaaggacgaagtcgcaataaacaaaatcaatgcaatcgtgacgataaaaagtggacatcaagaatacagttgcaaatatttaaatcaatgaaaccataaagataaaaaaatcaaaacttaagaatgcaatcatgatgaatgaaatcaatagaaccataaatgtaaaaactgaaactcaaatgggcgatcatgataacaaaaatcaatggaaccgtaaagatgaaaaatgaaacataaggatgtgatcatgatgatcgaataaatggaaccataaagttaaaaactgaaacttaaggagtcacaatgaccaaagttaataaaccataaaagacaaaaataaaaaatcaatgatgtggtcatgatgactgatgtcaatggaaccataaagataatatacatatactcaagaacgtaatcatgttaattgaaatcaatgaaaccataaagaaaaaaactagaattcaagaacatgatagtgataatgaatggaaccataatgataaaaataaaaaatcaaatccatggaacttaaaaaagaaagctaaagacacaatcacgatgattgaaatccatggaactaaaaaaggaaagccaaggacataatcacaatgatcggaatccataggaacaaaaactaaaaaaaggaaaaccaacatataacatctacaaaatccaaagtaatctctatgttatcttaggggtgaatctctcttattatctcaataaaaaaggttatgccctaatgtaaaagatgtataagctcctagtcaatttgtgctccctaagggtgaatctgcctaatcatctcaacatcatggttatggcataatgtagataactcattaaatcataaaggtaaagcaactatgtcccaatatacaatgtcaactagatctaggtcaatctctataaaaagacgattatgccttagtgtgcaccaataactctcaatcaatccccatgctccatgggaatgcatctataatctacaaatttgaaccaatttcaaacagtatccaaacaggagctatcgagcacaatgtatgatgtcatgagctcatgatagtcctaattaagacctaggatgaagaaaataaatgaagtaaactaggcccaaaaacctaatgatacaattcatgcatgtgatgtacatagtgtagtacataaggaaatctagaggtctttgaatacactaacactttatggtacaagagcgagaagaatgaatgaagaacataggcatactatgatattaataaacacacaaatgattgggaaggatgagggataagaatccaaattagtaagaacgtaagtatccttagtgatgaatgtaacttaaaagaaagcaataaagatatatgtataggttagactaaatctaacacccaagttgcctacatgcctatgatgggttgaggtccatacacgcttagttcaaaagactataaaaacaaagaataattttgtagttttttttctttttctttttcttgttttcctctatttttctttttattttctttctttcattgtttctttctttattttcttttctttttaaccatgcatccataatcatatgacaatcggggataataaggttgtgaaaactcacgataaagtgacaataataataaaaaagagtgatgaatcatatcaattgcactaagacaccacaatgattgaaaggtagaagcatatctcccatagccatgatgaatagacattgaagatgacaccttcatgaaatacacaatcttgaaagtcttatacatatcacaaaagcacactaagaggcccttcccctaggtacaaagaaaaggtggacatggtactaaaagaaaggcaaagtaaagggcctgactagatagcaagtggtaactttaaatgcaaggtgaattagggtaagtaaggctagtaaaatgatgataatcgatcatttgactacagtctcaaacatagtgttgttatgactatccatattgattggttctaagaattggtttccacataagtcttataaccaagttgtcccttattcttaagccatctcattaattatataaggcctacttcaagtactctctagcaaccaaggatcctacactcaactacacccaattgtctcaagtcatcttttccttaatctataggctctatcttaggtttcttctctcttgattagcttggcattgggtggaaagaggtaggtgatgctacgcaatgctcatgtagagaatttgtaggaccatgcaaagacttctggtgatcaaggtgaatcttaatgagatggtgttagtgtcaaaatatgcattttcgcctttttatttaatgaagcataatgagttttgaattgaaagtcaaatcagatgcatggtgtattaggtccacaatagtgtcctaaatttaattttaaacaaaagttcatgcctaaatccaaaatggtcaaatgaacatatctaataatgtccaccaagtcccaagagtacacatcttaactcaagatctaatgagccctaaagaaaaaataaaccgaaactcctaaaccaactagagtagtattaaatcaagaccatagataccaaatccaatgccaaaactatatcaaataccaaatttgatgactaatctcactgaaaacgaaaaatgaatcaaccataatccatgttgctcaatcattgttgtgttgctacaataaaattatatacaaatgcacttatgtgtgggcaagtgcttagccatgattctagttcacatcctaccatggtacaagtggctttgaaaggtaggttgaaataatatcccaagaaaaaggtcgcactagctaatggtgtgcatgcttttgtacacccccaaaaagatgggacaacttcacacaagcataggttaccacttgcatgtcatgcataaccttatcatctagggggtgtcctatgagtaaaggcttcatgctagtttgtgcaccttatgactccgaaattcatccacattgctctaggggtacatagtgtgtggtgtaggtgcattcaactatctagccaaaccatgaaagaacaaaaaaagaatgacatatacatatctgtgttgggacaaagcttatacaggtctttcaataattatcatatctccatacgcatctctgtacttttatatctccaatcctcaggaaatcctctaagaatgtcaagtaatgctctatagagtcttcattactccatgtgtacctacgaactagtacatctccaagccttagaaaacttgtcaatgatgtaatcatgtggtaattgccatcttctgtttctctagatctagtagcgatgtagcccaagtcctacctccatttctgaatagccacttagtcgaaataacaagttgtagaagacgttgatccggctaaatggtaatatataccaaattgaataatacatctcaaatgttcaaatacatccataacttgagtataaggagttggttgaccaagctcaattattcataaccggatgaatatacatgctatccacatgcacaaccaccaaaaaaaaataaaaaatagaggtagtcagcaagagtgtaaaggagaacaactaatcataggatcattcaatagctaaatccaccattccattactcttacgtgtccacaagcaaacataatataaaaaaaagacacacataagagggcatccatcaacaaattaaccatcatatatgcctcaactaatgaactcatgttcaagtttgaccctttaaccatcctcaatggaattgttattttgtggatttgcatatctatagccccatctgatagtgaacctttattgaattaatttttatttatttggacaaaaaaatgattttatttgtttggagtggtcagttactttatttattttttattaaaaaataatattttttatgaaagagtaaacaaaatagggaaaaaatcccaaatgactcagtaatttcaggccttgatcgcctcactcctagggcctggtcttctcataacactctgccaggcttctttttgccctgaaatagttgtaatctggtaccaagcttgaggaaagtgtaagtaaacagttgcaggacagcacaaaattgggtagcttcaggttttagaaggttatcattctctattgagttttatccgtatgccgaacaggttttaccctatacacgctagtatcttatgtacagactcatgtgatttcaaatgcctagttctattaagtttttgtcttattaaaattatttttgtacagagttcctgaaaaatagaacttaccttaaggtattcataaccctccagttgaataagtaactgaatctatagtctctgtattgtaatttatgaaagcctatctagttctagttctctctataataatgaattacataacatttttttcaggacacaaaagaggagattaac

SEQ ID NO: 10506 - DNA, 6744 bp, Vitis vinifera
  Intron number 8 from transcript GSVIVT01035878001 (locus G SVIVG01035878001) derived from phytozome v7.0 (chr-ID chr4 ; pos 5192452 to 5199195)
aattgaaggtaataaaatatgattttcttctagtctcattgcattttgttctattgcagctattctaactgaaaagaaaaaaaagatactccagtatgattgtgttggacactacgatatgaatttggctggaacatatccacattttttaggtaattacgtagatcgagaaaaagaaagtgacaaaatgggtgtagtctatatgtgcccctaagaaatgctcaacggaatgaaatgaaatgaggaaagaacacatctgcaacctaagattagattggaacctaaattatcagtgaaatctaaaaaaggaaccctcttatccctagagttttgaaaggctattgaggcttacgctttgaagctcacctcaaggtgagactctacaaattagccttgaaactataacctcaatcagggtaattgaggcttaagtgtcacaaggctattgaggcccaagccttagatatccaaagggttttcggcctttatgggtgtttggtatatattttataataggcaagtctcaatttttaatgagttataatggctattcttttgtggacttttgatatagatttaataagttttgtattggttccctacttggttaaatcttttcaaagtaaggacttagttaactcaatgaaccgtttaaatggaaaggaaaaagagagattgataagaataagggaattgatggctatccttgtggttgatctcatatatcatctaattattcatagataaaaaaggataccactaaaatgtgggcaaagaagaaggaaggatggatggatattaacaccaatggggaagatgatatagcaattgaatatgattatattcttggaggatcctattagtgttagcaagtgtaatgttgaaaacaatttgataaaatcatgaagtttatgtttttttattatttaattttcttgtgactttatgagtaatttttttgataattttttattattcgtttgtttaagttgaggcttatgcctcattctacctcaaggcttatgccgcacctcatttaggcaacacgtctcaagactacctttaaccttttaaaacattgattatccccaataaccttagctgccacacatacaaggaagcaactcaatgtcttccactttctatctgatgcatattagtagacatatccaacatgtttttttctctctcttttttcataatattctgtgtaacttatatatgtctctgtagatttttgccatgatatggtctctatgcatgtgttataagaagcataaaataggaagctttttgttcttgaattttattttatagttttgcattgcatgttttaataaccatggtaatacacgttatcttttgaagtttggaatgaataaaattgattttgtacattgctttgatggaattcggtccacaatgcccatttttcccccaattccatcattgatggttctaaatttctgagaaagtagtttgaaatgttatgtctgaaatatcttgagagaatatgaaaaactacctgtggttagagcagtgactttatcaatccttggcatggcttgctttcaggattattaggatatcttgggcaggatgtaacaagagtttcttggggagtaatattataatggtatttgattatttctaatgcataactactgcaagtttcattatttttattttattattagtttagtcaagagttgttcaacagatctgttgacttggaggtaaccttttgattgattcctaagaacaaggttctatgataagtatttttaatctgttaagccagtgactgaaatttgtgaaataatttattaggtcctttgcaagaagttgtggcaatgttcattatgagaagatatctaggtcgaaaggcacttttgctaaggttaaacatattttgaattttgctttggtggcctattgagagggagagagagtgttggaagtataaggaaggtgttgcttcgtagatttcattgatgtttggctgttcttagggtacaaaatatccttttttgttttcttttttgacatcttgtatatggtgttccatatttacctcttgtactcaggtatagtgcctccgtactgtcatgtggttggggccttgcatattttgcagatggaggaactagactgtgagctttttactgttttttttttttttttgaaggataaagaaatacaaaagaaggatgagctaaaaatacaacaaactaataagaaatatgtttgaagcctccaaagtatttagtaaacatatacaacaataaagtaccacatgagaatatacaaaaaacaattcatagctccaacattagaataatttccttccaaacaagacctattcaatgctcctctctttgctaacccacacctttcgatctacacatagaaaatcaatcaagttggacaactttaaggggaattccagtaactacttaggtgcaagaggcccaaaaggaggcaaataaataaatggtatcccaaagagcctttgaagtccttgccttgtcttaaaatatcctaccatttcttcctgccaaacaatcctaattaatgccgagacaagcagtttgccaaagaaccttgcctccaatggagcttcccaatcctttatatgagatgatcatcatgtcacaaaggatgacatattcttttgtttgtaatttttggtcttggactaagttgtatatagatgaagggcctaattctttaattaacttttttgattggttgggatctagatgaggatgggtgagattttttgcacccctctttcttttgttttttgcctataggccaattgtatacttcccgtacactttgagttagcctttgggcgccttgttttttattaatatatatttattctatgcttttacctatcaaaaaaaaaaaaggtcagaaatactcctcagaggaacccaatccaagttagccaatctaaatagtttgtaccataacctcaagtcaatggacaatgtaaaaaaaagacgatccaccatttcttcactctcaatacctaataagcaaacattggaactaagggctttgtagaatcttctcaaatgtagcatgtcattggcgtttaccttcttccgtgccattagccaaacaaaggtcttaaccttagatgagattttagatttccatagaaatttagttggatagaatggaattggatcagattgattagacaagactaaaaaaaaatgatgttatagtaagtaatcctgatgaagataataaccaaactcttgaatttgggaaggtcctaaccctagatcaactcaaaaggagggtttagaacatagctaacagatgtttcctttgttgtgatgaagaggagacgattgatcatattcttatccattgttccaaggcaagggttttgtgggagcttgtttttgcactgtttggtgtgatgtgggtcctttggctttcggctagagatactcttctaggttggtatggatcctttgtgggcaagaagcgtagaaaggcttggatgacagctcctctttgtttattttggtcggtttggaaggaaagaaacaagatagcttttactaatgaggatatttcgattcaaatgatgaaatattcgtttgtttgtaatctttggtcttggtctaagtcttatttagatgtaggacctttacctttaatcaacttttttgattggttgagttctagatgagggctgatgagtttttgcttcttttttgtttttgccttttggcgcctcttgtatactccttgtatgctttgggttgtcttttaggcgcctttttatcttaatatattttttctgtgtgtttatctgtcaaaacaataaaaataaaaattgggaagcatggagataaatacaaacaagtgagagaggacatgagtctttcaagatcttctatctccaagttagaaaggttatgaaaaaaattaaagttccaagagaaagggtaggtgaagccaagaattgatgagataggaaggtttttaattgtgacaattctgaatagacttcggaattgtgagcacaaagcttttactatttttgactttagtcctttattaattgcaaggaaaaaggcagtttagagtctttggaagaatcttttgttgatctctcctttcagttcaccttattttttagtgtttaaatgagaatggtttgaggttggtttgaagatcaggagtaggattcatgttttgtattacagttttccaatgataccattttcttctttttacaaggctagaagagaatggtgaaccttaatcatatccttaagatctttttaagggtctttgtctttgggatcaacaattctgaagttcctatatacctgccatgttcttggggtatgctcccctctttgattgccatcttttatatattcttgtttgcctttaaaaaaaatggcattctgaagttcctattgtgaatatacatattgaccttgctgtaaatttgatctttagaatgaattttctgaagttcctcttgtgactacgcatattggcagtggtagattagatctttagttcgcctttggcttgcttggtcctggttttagtatatttcatcaaatacttgggtgataccctgtgaatgtgtgtatatgtgtgtgtgtgtatttgataggcatttcatagatggttaattttgaatgttttgctgataccctgtgaatattgaatttttggacccctacggtagacacagtgagtacaggttggtcagaaggaggcttatatttatttggcaggctgagttgcccttatttagtttgttttaggtaatctttgtgtatctgtatttcaggaaagttgataattaatttttgtggtctgggtgggttttggatcagtaagacatcttgttgactggagtgttgtttatcttctcatgatagtcctgccttcttttgttgagttacattgtgacgggcttcaggtttcctcttctcaatatcagtcttggaattttaaccgtctgtaaactgaattatagaggtatttaccattcaacatccttttatcctgaggtgatatggattttaaggtacctcaaaggaaaaacttttaacttagccttcaactcacactaagaggagcactaatgatgtgcttcaaggatgaaaacaagaaaaccctttctgctgaatgcatgtattatgtgtaagaatgagaataagatggtggacttcatatctattcctttactgcgacattcaagttggtagaagccttttggtatggctgagattagttggtcacctgttcctaatcttctttgtaatggagccctcttttttgtcttttggtcttgttatgttttgtgctttgtgtcttttttttgttctgttttgggagagagatatttttctgtgctttgttagggacatggagttgaagttatgcttgctgttatctgtttcatgaaggggaagaaatatagtgatgagtatgggtcaagtggatagtgttgggccagtgcttagcttgtaattggtttctcactaggacatgttaaagaaaacattctctttaaagggtatgcttggtttggtaacaaggtcaacatttgttgcctataaatttcctgcctttcctagtgcctaaaaagttaaaatatctgtatttcaagccagtgaactattctttggaacatcatgaatatgttactggacagtcataacattaagcaatttatttgcttatcataaaaaaaaaaaaaaaagaagattaggcaatttgttcaccatgaggctaagcaagctggaagttttgttttggatgagatgggtcatagcattaactattaagtgatttataatccagataaaatttcctgttggctttttaaaggtattcagggaagattttatgggtagagcagtgctaaggatgcatcttgaagaggtatgtttgatctgcctgcttggtggaccctgatttgaaggggtcctgtctcttccactctagaccattatcaggagtgggaatgagagaaactgaaaaggacaggatgagtgcctcttaattggccatcttctctagctttgcagttgtagatcatttaagctacaacttagagtacttgattgtggcaattattctttcattcaagcttgacttttcgttggtcattatctccatcactcttctcttaggtggcgttcgctgtggaatttggatttgagctcccaaaacctgatccattctaatccattgctgcctggatttagaattcaaatcccgaagtgaaatcctagtgtgcaaattatatgagcatgctcacttgattttgaacttggaaaaagtgttgctaagtcagtgtgtgcaatccttcattctgtatggattttctaggattatgagttggatgcattatatatttccatttcctgtggagcttgtagtcaactcctcaagctttatttgtggattttctttcaaaaatgttggaaggacatctttatctccatcatttggcatatgcaaatggaattctgttgcttgtctggtttcattagttttttattttcccctttgtgtggtgttgaagaggggggaggatggtgttggtggtcaagggaagggtaggtgctaataattgattaaattatttgtgaaattgtttttgtagttatgctgcaaatgcagttaatgccttttctgacaacaatttataaatttcacagagagtagtgaaggaaaaaa

SEQ ID NO: 10507 - DNA, 4763 bp, Vitis vinifera
  Intron number 3 from transcript GSVIVT01035957001 (locus G SVIVG01035957001) derived from phytozome v7.0 (chr-ID chr4 ; pos 6488834 to 6493596 reverse strand)
cgaagaggagcaaaactgttcggcattacaagcaggtgggcataggtctcttatttatatttgtatattcttcagcctttaattttaaatgttttttttgatggagtagaaaggatatcttcttatgttcttttcatcaattttgttgttatttgtctgtcaaattattattatttgcttcatcgaaaggtcttactttgtgctgtccctgatgatgttgcagcattcttgctgaaagttgttcatgcagattggctggtttatatgaattttcttagttactctcatattgttccttcagtaaatactgcatctagaaagaaatattttaattttggatcattgtgtaacttctgatgatgcctatataatttaatcataaaaatctattagcacatgatagttcactcctctctgaaaagtgaatctattgtatttcttaatattgccctttaacactaaacacttcttggcgcttatctgaaacaataatttgccttgtatttccagctgcattgtgatcctagataacatcattctatttaacaatgagattcttatttattcattaccatcttgggaccaaattgtactccctctgaacagaacagatgcaatggcaccaagactttataagatgctgcacttaaatcttctcagtaaaacttcatcgatcagatgaatctaccacttctaatatgggtttttttgcaactaagcttgtctaatttgttagttcattgctgattttatggataatgtgtgattggtccaaactgattttagggacaatgttagctcatggtcaagggatgcatggttgaagggtcataagttcatgtagaagttacgactcatcagtgaactgaaaatttgagacaaggagaattttgaggatattgaagtgatgaaagttgctctctttacagacatcagcccaaaagattcttgtgagggggagggtgttttcacaaccgaattagcaatgttgagggatgtgaaaaagaaaggacaaaagaaacctcacttggaggaacttttatttagggaagagatacccggagagagagagctaggctaaaatgtgctaaaaataggggattacaattctaatattttcttaggatggcaaatggaagaagaaagtctgtagtgtctgaagaaagggtgttgctggatgactagcaaagtatatttgaggagattttgaactttttttggagactttacaacaaatcaaatgcgaatccttggaggatagaaggtttggattggtcctcaatatttgaggagtgtgttaagtagttggagcctccctttccaaagaaggaaattcaaggtgcaatgtttatagatatagaaaaggcttcaagcccatatgggtctaccctagcattttatcaaaaatgttggaacacaatcaaagaggatttgttgaagcttttttcataattcttttctttttgttttttgatagacaaaagtttgcataattctatagtactatagtcataaataagagcaccaatgccattttcattgtacttgcatctagagaatttagtccgccaaagcctctggctttagacctataagtttggttactagtctttatgaggaaatagccaaaacgttatcccattgcattcaaggatttctatacaaaagcattgatttgtttgaagatgcttatgttgagggaagacatatccttgagttagtctttgtggctaatgaagtggtggatgaaagaagacgttcaagtggataagaattttttgcaagatagattttgaaaatgcatatgattatgtggattgacatttcttaaatcatgctttagagaggaaaggtcttagtccaaagtggagcttatggatttgaggttgtttatcacttgttaattttgttgtattagttaataggagtgccaaaggttgagttacagtatctaaaggtttactagagagcttttcaccaattcttgttcatgtgttgagttagttggttttgaaagttgaggatcttgggttactagagagctttttggtgggtagagatatgactagggtgacttatttacaatttgctgatgatttcatatttttctttagaactacctagaagaattgcaaagtcttacaatcattctaatggtttttggatgcatatttggcctcaagtttaattaataaaaaaagcgcattggtggggattagtgctaaatatgaactgattttttgttttgctaccctcctagaatgtaggatgttcttgggccctagtttatttgggtctccctttgagtaggaatcctagagttgtttcgtattgagacctaagaagaaaggtttttttttttttttctttttcccttgatggtagaataatccttgtacaatcatattgatcttttatctccatttgtttctttcttgctttcgaaatcctagtaaaagtgaccactaggattgagggattatagtgagatactaagtagttagggtttaggaaaaagaagaagatggaccacctcattggattagagcatgtgtgtaaactaaaaagagatagaggtttgaggttagataggagcttcttgaggaagagagcccttcttggaagtggttgtggagatttttcttaaggagaacaacactttatggcataggatcatcttaagcatttatgttttggatgcagtgtagtcagtggttgcaacattgtccttggaattctaatggtccagttttcaccaatttctctaattttacttgtttctatgtgggaaagggtataaaaatttggttttggaaggatatttggttgggaaattgaagggaaattaacctcttaaacttcaatttcctaatcatttcaggtttgcaaggagtaaagactatcctatttcttctgtcatagttccttcctataattctccattttagagtttcaatttccattgggaactttctgatccagaaattgaggacctaacaatactcctttcctccttattacatgtttacctttcacttaccttcctagatgtgaaagtttggtcactgacactttcaggacttcttagtgagtttcctttttagtgttcttacaatttctcctatctttactcctttcttccttgtaaagtcaatgaaaagctccatctaaggttaaggcttttgcaaagtttgcaactaataagaaggttaatactaacgatatgctacatgtaagaagccttataaaactcttagcgtggactgatgtgttatgtgcttggagagtagtgaaccaattgaccatgtctctctttgttgctccataacactaggactttagcatagattgtttggtcttgatatggtttttattgtgggagataaatgctaggatttttgaagataagaaattcatgaagctatttaagatttggttcacttcctctcgtcccttttgacatctatcacttatcttttttctggtactccttattggattaggaaaatgtttgctactctaaaagatcttttgagaagacaatgcttgactggttacacccttcaattgtttcagtaaagttaactttttgatgggtgttctttgggtaatccttgtcaactaggtgtagaaggcatgaccagaggttattcaggtacagattgatgacttactttaaactttttggagtggattcaaccgttgaggagaagatattagcattacacaaaggctttctgcaacccaaaaatttatgtccattcaacctaaatgtagagggagattctactcttgttatttcttgggtgtcttatagggagagaggttcatggaagttagatagttggcttctgtaagattttagatattgctagtgaggtgggatgctccttctcttgggttttttgtataattaatcacactgtaaaccatttagcgaatcaaggagcattttgtagtatatgtgcattgtttttttcctatgatcctatctgcggtttgtttttgtttatttttttggagcaatatgccttctactttctgatcagtaattatgcatcttggaagaatttctcatccttttttgtatttatcattcaatgcaatacatctgtttctgattaaaaaaaatgtcagttcactgcctctctaaagaatattatgttggaatatgtccacaccttcataagattggtcttcttttacttttagaagattaagggctggggttttgatgttgctttgtcgtgggtctaatttaaatggcagtagcagtcctgaaaatggggcaatttaaagcctaaatcttaccacaattaagaacctggattatgaagcttggtgtgacattggatgcgtcactttttgttaggcactgttctctaatatattttctattgcctatccaaaaaaagagcttggtatggctaaattgtttgtaggctcgattgagttagttagggttaagtggcacctgtaatttcaatcatgaacaggaaattgaatttcatatatatatatatatatatatttaacttttctgtatgccagtgcttccactatggtacaacaattactaatgggggcttcaatggagtcagaaatatctttgggataggcatttctttggctttgatgtaattcaaatgtgcatttatgtttttccctatctcagttatatgatatttttttcccttttctgggaaaatcctttatattctgatccaggaagattgcgagctagttaaaattgacatccattg

SEQ ID NO: 10508 - DNA, 9421 bp, Vitis vinifera
  Intron number 15 from transcript GSVIVT01037632001 (locus GSVIVG01037632001) derived from phytozome v7.0 (chr-ID chr 19; pos 6383558 to 6392978 reverse strand)
gtttttggttaaagcagttgaccattgtgacagaggtaattactcctttttctactctattctctctccctctctctatgtgtcgtttttccctatagagcggttaggtttggtggagaggaccaagaggtttgctaagatatatttgattttgataaaaaattgttttcttgaacatattcactaaggagcatcttcaagtatgttttatcttatcagaaagaaagattactactgaagtggttagggttctatcctcagtaaggtcaaaatatgtctctctctctctctctctctcttacactctgtaattctctctaaattttgcatgaagtggaaggattggattatccaaaaatttattttctgttgtgctagactgtagagtattttgacaagttcagcgatttatgtacaagtttgaatagcccttaacatgggcatgtgtggtagcacctttcacccacatggcccaaggcatgtttggtgttggcatgtctaaactcaacaaggtactaataaaaaaaataaaaactcaacaaggtgttgtggcttggaaaatacattcatagtagaggttgtgtcttccaaagatgagcatgggtgggaacccttgaaggatcaaagagggctaagtgacatgagtggcaggaagggtgtgtgctgtgggtagcgtggtgctgcaagcacacatgacactgccaacatatgttgcaggacttatgggcgtcatatgcagcaatggaaacatgttatggcatgctcgtgtgggctttgacaaagttacaagtttttgacactttaatgatttccctaagtttctagaggcctaagatgaatattccaaatgatgaggtatttttctggattttctatatttagaaaaaaatctattatgcctgcagaagcatccttgatgtctcctgctaacagatttaaaattgctcagaattctcttttgggagggagtggtagtctcacttaggataacccaagggtgtgggctatggaatgatgtgggcacacctgagggataccaagattctccatggacactgcaaggcaccattagggcttgcacacacctaagtgcacagtgggttgggtgaggcataggagcttggacatagaggcatgaatggagcatgatattttggatatgggctgtttggctgaggcataaagcatgggattgtggcagacatttgtgggcagttattgaggtaactgatgcatggagttgttaaccctattcatcagcaaaatgggggtaactgatgcatggatagggggctctctattcgcttgcaaacatggggtcatgctggagagatgcatgggtcacttggcaacacttgaaggatgactaaagtttgtgggacacctagcagtactttaagggaagttaaggaccatgataaattgccaagacaggtggcagaacatgggcaaggtctctaaaatgtgtgcctttgattgtgtatgtataccctattgtgcatgtaaaaaggcggggaggggattagtctccatagaggcttagtgctatttgtaggccgtggtttcatttgttgtaggaggaaatagtacaagttgggaaagtgatttcctgtacttcctttgtgtggcatgtgttgctgtgtgtgggctggctaagatgagtcttagcgccattgcaagaaaaaaaaaattatgcaatagtgaattattgtggcacctagtgtgtatggcaggcctggttggttgctaaaattatttatgttatgtttctgaaatttggtagagtacctacttatcaatctctcaataccgctatttctcacatcccatgttgggagtaaatggtatggactctaggagtgagatcatgggtttttattgaagctagctggtctggactttgctatcaatccagagattttagccttactgtgaggctggaagaggctttctcagtgggggtatgaatcttcttatagctgtcttctggatcaatgctaggaaagaaggtcctttagctatgatcattggtgaggagtgatttcttatttatcataagcatggaggtttctttctgttgggagcctagacgctgtaattgggcagttcatgggaagaaaggtgccagttccctggttctgtttgtggagaattttttggttgataagcacatagcaaaaagagcctcaacaaaagcacaatgaagtacacaggatgtataaaaagggtgtcaatcaaagaaaggacaaaacaaagagaaagcaaaaaactcccctactcagcccccaatcaatcaacaaaatccactgtagacaatgtttcctgctttatactatgcctaacaaactctattaaattataaataaaagaggatttgagcaattgctttgattgctccacgtctttgaattctctttaatttctctccttcgtaattcaaaataaagacaaaggagcagccattgatgcttttttctgcttcttcccaataaaggacttgttccaagttaacaaagtcagtcttgttgaatgcttattgacttctatgactggagacctaacattaatgggttgtcatttgagtccttgatttgagaggaggctaggtgtttgtagtctctttctttgaggaggaagtcttcttagccctatcagctttgaatggggacaaagcctcgggtcctgatgggtttactatggctttttggcatctttgttgggattttgtcaagagtgaggtgttgggcttcttttaggatttttttttatcttgggcattttgaaaggagcttgaatactactttcttggtcttaatcccaaaaggggggtgcagatgacctaaaggattttaggcctattagcttggttgggtgtttatacagattattggccaaggttttagcaaatagactaaaaaaaatggtgggaaaggtaatctattcttcttagaatgcttttattgaaggaagacaaattcttgatgcaatccttattgccaatgaagccattgactctaggctaaagagtggttctaatgacattctttgtaagctagacatagaaaaaggctataatcatgcaatttcttattagcagttttggataagatgggttttggtcataagtggattgggtgaattaattagcgtatttctacaaccaaattttctgttttgatcaatgggaccccaactggattcttccatagctctagagaattgaggtgaggagaccctttgtctccttgtttatttgttttcgctatggaggctcttacctttctttttgataaagccaggaagggggttttatttcaggtttcaaggtgggaggtagaggtggtgagggagtagaggtgtctcaccttttctttgcggatgatactttgattttctatgaggcttttatggactagcttttgcatcttcattgggttttgatggagtttgaagcaatttttgtgcttaagatcaacctagaaaagagtgagctaattttagttggaagggttcctattatggaggagttggcggatattcttgggtgtaaggtcgggttgttaccttccaaatatttttggcattcctttgggtgctacctttaaattgacgacaacttgggacttgctagaagagagggtgtagagaaagcttgcaaggtggaagagacaatagttgtccaagagggggacgcttgactcttatcaaaagtactttgtctagccttcccatttatttcatgtccatttttgttattccaaaaagggtgtgtcgtggaaaaacttcgaaggggctttctatagggagggggttctcttgaaaataagccccacttggtgagttggctcaaagtttgtaaacaaaaggtggaaggagggttggacattcataatctttttgttttgaataaggctctcttaggcaagtggacttggaggttcatgtaagaaggggagttgttgtggaagaataatcattgggaagtatggggtggaaaaagggggttggtgctctttggaggtgaggagggtcatggcgtagggttgtggaaggctataggaagagattgggatgttttcataagcaagatctcttctgttgtggggataagattttggaaggacatttggtgtgggaacacccctttgaggacctttttcccaaaggatgcttgggtttatgatgcccgggagtaggttgaaaatggggggctatggaactctcatttcataaggaatttccaagactgggagttaggttgtgttgaaacacttctttttgagtttgcaaggtaattcagtgaatagggaggtagatggcaaggcaatgtgaatggttacaaagggtgacaagtttttaattaaatctttctatgatgggatggttcaaaggggtttagaacctttcttggcaacaatcgtttggaattcttggaactttaattcttggttctgctcgccccttctcttggaactttaattttcatcgtaacctttccgattctgagatagaagatttagaaagcctcatgcggtcacttgattgtttgcatttatccccatcggtttcagatgcgagttcctggtctttatcttcttcagggctatttacggtcaagtttttttttctagccttgtcccacctttccgattcctctccagttttccctactaagtttgtatggaattctcaagtcccttttaaagtcaagtccttcgtctggttagtgacacataagaaggtaaatactaatgacttgctataattgagaagaccctacaaagctcttagtcctgacatttgtgagttgtgtatgaagcatggagaatcagcagatcatcttttcctatattgttccttgacgatggggttgtggcacagattattttagttagccaagatggattgggttcccctgagaagcatctctgacatgatgtccatcaattataaaggttttggattatccaagagagagatagttttgtggcaaactgcatgcattgttttaatttgggttgtgtggcgggaaagaaatgcgaggatatttgaggataaagtaagggatgcagagaatctatgagattccattcacttccttgcttctctttggggtttttgttccatggtttttaagggaattccccttaatgtgttacaactagattggctagcagtgtgtaggtccaacgggttggtctagcttagagagtttgtttatttttacattgtagcttcttgtttttgaattcttgtcgtttagttttttctttggtgggaggattcctcatccttctcttgtacttcttatttctatcaatatatctctttgtcgtttcctatcaaaaaatattcttgggctccaacaaaagtgagtttttttgtttgggaagcaatgtggaaagggattctaactatggacattctgaagaggggagggtagactttggtgaacaaatgttttctatgcaaaggcaaggacgaatcttgcgatcacattccttcttcattgttctaaggcaatttttttatgacaattggtcttcttgtcgtttggagtggtgtgggtgttgaatacctcagtccaagcaatgcttcttagttggcacagccactccattggtaagaggagaaagaaggcatggaatgttgcttctctttgtttgttttggactattttgaaagagaggaatagaagggctttggagaatgttgagcttttagatcaagagctaaagttctcttttttgtttaacttattataatggtctaaaaggggtttagggcaagagtcctctataattgattttatcgcttggttaggttgccattaaggggagcgatttcttgtttttttctttggattgccttgtatacttcctgtgtacttggtgtttggctctttaatctatattgctcttttgcctgtcaaaaaaaaaaagtcagtcttgttgaagaatggatcatccaaaatatcccaaacaaggaataaagtagctgccacaacattcttgaatcctgttgtttattttgaagaatggatcacccaaaatcccttgagtcgagggattttgtatgtttggctttgcattttattcttgagtactgctgtttttctctttgttcccttctctgtgagcttcttttgaagaatatatcattcttttgttgtaatgccttctgttcttgttgtgttttccattaaagagaaaaaaaaaagcagcaatcttaatttttttgaagaacaacttctgttaaaaatgaagcatttacgatctaagatggaaagataaagagtcctgcaaggcaaaaggaaaagaattctaaccaaggaaagcctaaaatctgcctcaggccatgtgaatggttccagaagtctcaggacaaaatctcctctaaactcctcaggagtctcacctcctcttttagctatggaaacagtttcctcttgtgctctctagcaatccacctgtctgcactcccagccacgaataaatatacctaatttcctgcagtatgggtcttggatttccagctcttctatcttcctctgctgcttcttcatgtatgcatctaatactgttggtctttgtgatgtggtcttattttcccttgagataaccttgaagggccttgaatgttcatttactcctattaagggaaaaaacttttatttttctcctattcgtttgacttgtttttatttatatgataacaatatcattagatgaagaaagggacaaaaggctagtacacgtgaagtacacaaaaaccgctaccgacttctgaaaaacattactatctgtgaggttcaaggacaggtctggttgagggaagccaggacaagtttatatgtgaaataagctttaagaattttttgaacttcaagaagtcaactctacattcaaaaaatctatttgttctgttcaagatgatcttatttggacctccatttacaatatgcaaatcacacgaggaatccttaaccgatctaggtgtaatgcaaaaaaatccccaacaagggtaagaagagattgtagggttctagaaccaccacacattaaaaagaaaaagatgaagttcttttcttcttaaaagagtgctaaggaaagggggcacacccaatgcatacaagaagtatgcataaaagataaaacaaagaataccaacaagtagcttccttcttcttccacctattgaaagagtgcccaggaaaaggttgtcttcttcttcttctacctattgaaagagtgcccaggaaaaggttgtcttcttcttcttctacctattgaaagagtgccaaggaaaagggctgtaccttacgtatacaggaactttacataaaagacaaaacaaagaataccaacaggtatctacaaaaaaggcctcaaagcccaagttattctgtactaagactatctttgaagtccatcattgagaattttcccatctctaatgaaacgttggatcattctaagagggatttaatgaagctcatctttgacctctgatttgtgagcttttcttgattaaagattctgtggttttgctttttccatatgcaccagaacaagtgcaagggagccattctccaaacatggtgtcttttcttatacgatcccttcaatttccactcaaggagcagatttctcattgtagtagagatcaaagattgctaaaagtaaagtccataacataacacctttgtcctctcatagtgaatcataatgtggttactagactcttcactctccctgcataaattacatctattaagtgttatccaaccacaatccccccatcatctctctttcatttatgtgtaagttaacatcttcccccatattgcttcccatattgcttcccatattgcttcccacattcctttggctaagaagtccactctagtttcagctcatgtagaactacagtacaactttacactgaagtttcccttcctatatcctctttccaagctaagatgtcttttccttctttttattattttacttttattttattattttatttttattgttttatttatttttatatttctttcctcctaaagggattcttcactgatctaggcaatgcaaaaattttgcaacaaggagaagaaactcatcaagttctagactcgccttacaatcaagaaaggcaattgattgatcctttgccttttattttttatatttttttatttttttattttaaaattttgaaaattttaaattttaatgttattattttattattcaaaattttaaattagaattttttgagcttaatacacatacagcgccattagagccattagtggtccaccatcaaatcactatccccttttgtcaatcatacaaaaaatgccactttggaaaagggccttgcatccccacctctaaatccctcaacattcaatgaaaaatattaccattaaaaaagctatcaggacatcctctagaaaccaatatttcagtctcattccttataaaattagtggcatataatcctatcaatgaaaagctaaagctcttccagttctagattttgaaacaatattattaagaggcaatatgatccaagttgaaggctgggaaggacaaaagtgatatggattgagacagttatagaagatatattggcctattaggagatgacatatatatgtatatgtgtgtgtgtgtgtatcagattattgaagcataatccttgttgatgtatatatgtatgtatgtatatgtatgtatgtatagctattgagtaaattcgattatgaagtaggatccttggtgtcaatgatcacataactctttctcttcttagggcagataatatgtcccaggttctgacatcaagatcactcagtttgagttcacaggccatttttgaatattatctgcttaaatcaacttgcagttagtcactattatatttgtttattgaaatcattatttatcttgtctatgaatttagcctataaaaaaaaaaagaatacagatcttgtctatgaaattgacataattttctttgctgtaacctacaggcagttgttccttattgtgaaaagtttgtaggatatttccataattttgtcatcatcttcatatcattgttgttgtcatgcttattcctgttacagtgaggtatgcttgttttatgaaataaatgaaatggttctgtgggcacactggagggagtatgctgtggtatctgtgttgtctatttgattttctagcattagcaagaaggaaacaatatgtttttgggcagttcaattactttaacacttatattgttttgtgttttgcttctatacaatcaatgttctgtggactagtagatattggagatgtggattgtagatgcttgctccattcttataacttttgtttgtttatcttgatataggttatcaata

SEQ ID NO: 10509 - DNA, 1115 bp, Vitis vinifera
  Intron number 8 from transcript GSVIVT01033256001 (locus G SVIVG01033256001) derived from phytozome v7.0 (chr-ID chr8 ; pos 22146854 to 22147968)
taggaccttgaagccaattcttagcaaggtaccttagtaataactctttatgatattgcataatatctaaatatgagtgcaactgtaaattggaatatgcatggttactataatcttgtaaacaggatttggatgtgattctctgttttttaactgagactgaattttgcctatttatttgcaaatctcatcacgtgtatttgatcttttcaataaaatgtaggaaatttacaactagctacagacacaaacacaagatacatcttgagatagctacatggtgttgaacatgaaaaaccctaggtagcagtgtacttgtattttcttgtttcatatgtaagacataatgtaggtgaactaaacaagaaacaggtccagtacacaacattcctgaacaattctacattgtttctgagaggctgatgattcatagcctcgtgattgtctcaagataatatatgctcataggtagcagtgttcttaggcaaaaattcattaaggctcttgcttcatagtttctttgcttccaaagctggatgcttgagctagttcctcaaccagaattcaatagaataaattgaatgtgctcttaggcaagcatctgacatgttaacaaaaatctagttcctcacccaacattcgagataaaaaattgagcatgctgttccttctctattgactttaaatctctctaatattgcgtaattcaatagaataaattgaatttgctcttaggcaagcatctgacatgttaacaaaaagctagttcctcacccaaaatttgagagaaaaaattgagcattctctttcttctctattgactttaaatctcttttatattacgtatttctaacttgagggaaaatgtagttggtttttatcacctcttttgctatgacagtctttgatacttgctaatcatcagactatttggaagacacatggcacttggttgtgacatcttcataggtgccctagttgtgaatcctatctgttttacccagcagtctcattctctatgtgtccattgcactgtagtttgtttcaatatcagatccattacaatagagttgtgcttaaatttgtgcaaaacgttctcttatggcaggtgatag

SEQ ID NO: 10510 - DNA, 19349 bp, Vitis vinifera
  Intron number 2 from transcript GSVIVT01014038001 (locus G SVIVG01014038001) derived from phytozome v7.0 (chr-ID chr1 6; pos 9617844 to 9637192 reverse strand)
cggtaacaactttacgattctatcattttattttttgtttatgctatttttatttttatatatttttttttgcaattgtttgagctctgattttatgggaattcaattttttccatatgggaaaattgtagaaatcgttgttggttgtcatctttgtttaatgaaatcattggcaaaggttttatattttttttgcaattgtttgagctttgattttctgggaattcaattttttccatatgggaaaattatagaaattgttgttggttgtcatatttgtttaatgaaatcattggcaaaggtgttattgttactggatttttccattttcctagaaggtttaatttttaataaacaaatgtttcaaattgaaatttgtactgggaacttgagtaattttctgaaccaaatgttctagatgttgagaataatcggtgaactttttctgatattctgaatagttggtaaaatctcctaatagatagggaattaactcgcctctctctctctctctctcggggcaactgttggtttgtggtgaaatcgaagtcctttgaagtcttagtgaaggaagttcgtgggaagttaagaggaatcattgtggagagaagcaggggtttctcatcttggatttggtttgggtataggagcctaaggaggctgctggaaggtattgaagaatgatggaagtctaggaggataaggggagaaagttcaggttggataggcgcgtcaatggggcgagggggttcgtcctgtgcttagtgctcgatttgaggcaaagagattttgtttagtgtttcctgaaggaaaggggttgcttaggggttgggccactttagctgagaaacttagatcccttggggtagttacttttgttgaagcaaagaatgcacttgtgcctgtagttggtaggttgaaaggagccttggtagtatggggaagagtgagaagagggcctttgtggatgtggctagagcgccgactagaaggataggtgatgctttatggcttcaacttggtggcaggaagaagtggagtagggaggaacagttgggtcgttgtttggttggtaggtggggagatgactcgattttggagacagagttgatctcgttaaggaggtggggagagcgcttgtggaacctcaagagaggagtgaggttgtaaaagctgggaggtgctttctttctattggagtttgaagatggggaggaggtagagagagtgttgaagaggggggtgcgacgtttcaaggataagttgttgcttttggagaaatggagtgcgggggttggttgtctgcatttaggaaatcatgccaaagaagtttgggtgaggatggtgggtctcatgttacatttttggaatgggaaggtgtttagaaaaattggagattgttgtgggggctttattagggtagacgaggatacaaggaggttttcttagctgtaatgggcaaggattttggtaaagtcagaggggaaagagcttccgaggacgttgcaactggtggtggatgcttcatgttttgctatccaactatggtgggaggtgctgccatgggtgtttgtagtgttgccaatgaacaaaagtcaagggagcgaggggacgaaggttagggttgatgatgccgatgtttcacgcttggggagtagcgtggggatggaacgggagcctttgtgtgtcgaaggggttggatcggactgcatggttagaaaagccaaggtcgcagacaatggtaacagtgatgggtctgcaaaaggggttgtggtctttgacggcatcgtaggctttaaggtggaaaagaaaggaaagaggattgtagggggagagtctttttgtgatggggggcttacaggtggaaagggccttgagcttgttaggatgggtgattgggacaaaagggtgctaggttttttagttcaagagggctctttaaagtcttcaaagagtgggccagcccagttcctattagatgaagagggctgcgggtcaaactcaatatgggagttgggccagcccagttgcattgtggaatggactgtgggctcggattgggtcagtttatgggtgattttaaaagagggtagggcttttaggagacgcctcttcgctgaattttggggagctgaagaaatcatgtttggtggagtggggcttgcagaggcaaaagagggttgtcgggcgcctgatagcggtccttcagctgatgtgtgccttttggaggaagcttccaagtactcttcccttgtgcttacttcttgctgggtttttgggggatgagtctcttcttcttcctcttctcttgtctctgggttagagggggctttggttgtggtaggggagggtgatggtgtggctggcgatttggtggcaaaggaagggagttgacagtagatccgttgtggttgctttaggtggaagaggtggggaatggacagggagtcgaagtttctcgctcgacgaagaaggtgagtcatgggttagtggaggacgaggaaggggtagtggagtcgtggaagtacaactgtttagcacaattttgccattgcttgggaatgccaactgagagttttgagggggaaattttgatgcttcataagagaatgaatgagagaagagaatattttgagaagttgattgggaaaaagaggaaagggcagaaaccctcaagatctgaccgggaactaaagaaattagagtgttaggtgaattattatcagacaggaggggcttgggggggaaccaacttgtgttagatgaagctttgagttctttcgaggaatgttagaggggcaaatgacggagataagggaaagatgataaaggctgttattaaatcccaaaaggtggatttagtttgtctataggaaaccaaaattcaggaaatgaccatgggggttgtgcgaagtattggggtgggaagatgtctagattggggggttgtgaacttgagagggggtgggggtgggggtgggggctggggcgggggcaagggcagggggggttgtggtgttctaggacaacggagtgttacaactgttagacatggaggtgggaattttctcagtttcttatcgtttcaagaattgtaaggatggattcttttggagctttataggggtttatggacccacattgaagatggatagggaagtattttgtagctagctaaggtcggttagaggactgtggagtgacccttggtgtgtggtagacgattttaacatgatcagattcccttcggagcgtagtagaggaggttgattgtccccaaccatgaggagatttttagaggtgattgaggacttggaattgagggacctgcctcttcagggaggccttttcacctggagtggtggcttaaatgactaatctaaatcgagaattgatcgtttcctcatttttgaggagtgggaagatcatttttcagggactgttcaaaccgttcttgttaagccgctatcagaccacttcctggtccttcttgatggaggaggggtgaggagaggccccactccatttagatttgaaaacatgtggttgaagaaggagggctttaagaatgttttgaggacatggtgggagggccttaattttagtgggtctgctagtttcatcctggttgaagagctgaaagctctgaaaccacttctgagaagttggaataaggaaatttttgacaagtatgaggtgcagaaggagctagttctgaattgagtggatttttgggataaggaggagagtgcacgccctctacctttggaagaggaggaatctaggaaggaagctagagagaattataaaaagtgggttcttcttgaagaaacgtcttggagacaaaaatcaaggaaatttggttgaaggagggggatagaaacacgagcttctttcataaaatgaccaatgctcatagaaggagaaaccaaatggctagagttaaaattaatgtggtgtattgaggacaaagatttaagagaggaagtgagcagaactttctagcttctgctctctaccaatgatgattggaggcttagcttaagtgagctgtcttttgagaggttggaagactttgaggtgacaggtctagagaaaccttttaagtaagaggaagtgtttgaggtactgtcgggttttagagtggataaagctccaggcctggatgggttctccatgtctttttggcagttctcgtgggactttgtgaagattgagatgatgaattttttcaaggatttctatgaatttggttgttttttgtggaacttgaattcaaccttcctagtgttgatcccgaagaaagggggggggggggcactgtataagtggttggctaaggcgctggccaataggctgaagggggtgctagctaacgtgatttcaaaggcccaaaatgcatttgtggggggtaggcaaattatggatgcaatgtttattgccaatgaggctatagactcgattttgaaaagtaatgagggagtgattctatgcaaactggacattgagaaaacttatggccatgttgagtggtcattttcgttatcaattatggagaagatggggtttggggagaagtggttggagcccttgtttctctaggccttttaatgattgagagatggatgaggtgaggtggaaaacttcttgtgtttgagtgggaagagagtgattgtgaatgatgaagatagggtgaggtgggtggaatcgaaggatgacaatttttcggtaaagtctctttacaaagccttagagtcggacttaacaaagtgtttcccaatgaagataatatgaaaatctagtgtgcagccaaatgtaagcttctttgcttggaaagcgtcatggggaaaagttctaactttggatcaagttcagaagaaggatttggttttagcaaatagatgttatttgtgccaagcatatgaggagtccattgaccatcttcttctacattgcgaatggacaagggaagtgtggaagctgttcttcattttgtttggagtgtattgagtgtttccttccttggttagggaaaccctcttggcgtggaaagggtcttttgtgggtaagaagcgtaaggcagtttggaatgtggcccctttatgcttgtttttgttagtttggaaggtaaggaacagaattgcctttgaaggcggtgtattgtccatgcaaaagctgaaagcgttttttgtatatttactttggttggagtctaaattgtttataaaagatagtccttcgacgctaattgatttcattgattgagtgggttcctgttgagggaatgttgttttttgtacatcttgttggatagttttttgttttagctgtaagggggtgagtgtctctttcttgtacatcttaagccgatattttaacgcctttttgtaatacaattctcttataaaaaaaaaaaagaagatattttgaataattggtgaactttttttttttttaaattttgatcatcctaaagcattcatattggtgatggaggaaagttgagggagggattagacattattttataattttttttttttgttaactgaggaaccttttatggctaagcctttaggactctgcatgggaacccaaacctttgggtgctaactgccctgcaacaaccaacattaggtaaatttagggtatcatcagtgacaggattcgaatccaggaccatatgccacttactaggaccacactccctaatccctgaccaactaggctaccctgacaggttagacattattttgttatttgttcatattttactttgtaaaagataatataatgtgtttacacaaatgcatttacacaatgacagtctgcaaaacatctaagcaaacccttgttactcaatggaatattttttttatttataggaaaccacgcgtgaatatattgatagaaaaagaagtacaaaaggaggatgaggattcctcctgccaaaagtaaaactaaacaacacgaaaaaataacaatacactaggccgtcccattggaactattggaactacacactgctagccaatcaagttgtaataccttaagggggatgcccttaaaacccgctgaacaaaaagcccaaaaggacgcaaggaaatgaatggaatcccaaagattctctgaattcctagctttgtcctcaaatatcctagcatttctttcccgccacacaacccaaattaaagctatacacacgttttgccacagaactacccctctcttggacttgccaaaacctttataattgatgaacatcatgtctgaaatgcttttcggaggtacccaatccatcttggctagctgaaaaagtttgtgccacaaccctaacatcattgaacaatggtggaaaagatgatttgctgattctccttgctccatacacaacttacaaatgtcagggctaagagctttgtggggtctcctcaattatagcaagtcattggtacttaccttcttgtgtgccacaagccagacaaaggccttaactttgaaagggacttgagatttccatacaaacttagtggggaaaaatggagatgaatcagcatttgggacaaggctgtaaagaaagacttgactgtaaacaatcctgaagacaataaggaccaagatctcgtgtctgaagcggaagtggataagttcatacaatctagagagtgcatgaggcgttctagatcttttatctcagaatcggttagattacgacggaaattaaagttccatgagaaagggtgagtcgaaccgagaattgaagatatatttttatccattactactcgaaatagtcttggatattggtctttaaagatttggtccccccaccacaaatcttcctaaaaacgaattctttccccatctcctacgataaaccgagtatacttggaaaaatcctgaaagacttatgcaatggccttccaaggacagcggtatgaccatctaattacagtattggcatcccaaccatttgagtgtgtcctgtagatgctaagaatgacctgatgccatagagttgtactctccctaggaaacctccacaaccatttccccaaaagagcgtgattccttaaaggtatcttcccaatccccaaacccccttttaccctcaacttgcacactgcatcccacctaacaagatgatctcttttgccttccccaacccctgaccaaagaaagtccctttgcatcctctcgacttttgcagccactgaagctggaatcttaaacaaagaaaggaagtagctagggatatgggaaagacaagagtgtagaagagttatcctaccacctaaagataagtaagccttttgccatccgtctaatctcctagagattctctcaatcactggatcccagaatccacaagcagttggattccctcccaaaggaagacccagataaagtataggccaatctgaagccttgcagtcaagcatcaaggctaacctagagagatgattctgatcaaggttgatgccaaaaagattactcttgtcaagattgaccttaagcccagagatttgaccaaacactaacaataaactcttaagagtttgcagttcttcctcactagagttagcaaagaggatggtatcatctgcgaattgcagatgggacaccctacatctatttctacctaccctgaagccctccagcaaacttctttcctcaactttcaacaacattctactcaacacatctgcaataatagtgaacaggaaaggggataaagggtcaccttttcttaaacctctagatgccttgacccactctttagcatcaccgttcactagaatagcataagagaccgacgacagacaacctctcatccaactgctacatttagaactaaatcctttcttctccaacacatgatccaaaaaatcccatttcacatggtcattagccttttcaaagtctatcttgaatacaactccctcctcccctgatcgccttctctcgtccataatctcattggctataagaactacattcagaatttgtctcccttgaacaaaagcaccttgagtggagtggatggtctcgtgtagtactcctcttagacgccctgacaagacttttgctattaccttatatagacaagtgatcaaactgataggtttaaaatccgaaatcttctttgactgactctttttgggcaaaaggactatgaatgaggcattggtgttttgattaataatcccgctattgtgaaactttgcaaacaccctctctaagtcttctttaatcacatcctaacaatcctgaaacactgctatggtgaaaccatcaggccccggcgtcttatccctatctaactgaaagatggcattagagatctcttcttcagcgagaggggcatccagcctagaagcactctcttctgatataggggactaatcaataccttctactctccatgactcaccaggaggactcgagtagagctttttgaaataaagtaatatctcctctgtgatgctctcggaattatccaacaccaaacctctttcattctccaagaatttgatgaaattcctgtttcgtctcccattagccactttgtgaaacaacttttgagttacaatccccgtccttaacccattttaccttagctttttgtctccaatgaatttcttccctcaaaattaattcctttagctctccttttcttacaactctttgagccgcaagatcagaagagagagccccttcttgttcaatggcatcaatgttagctatttcatccaagatggtttttttcctttccttaagcattccaaaagtattcttattccaatctttcaattttgccttaacgaattgtaacttccttgtgaacttgtgaccttcccaaccatttcctacaaattctctccaccaactgctagagcactctttgaaactatgatgttgcaaccacatattctcgaacctaaaaggtgttgggccccacttgaacggattggtatccaagacaatcagccaatgatccgatgtccatctaggaagaacttcttgaaggctttgagggaatgaaagctccgactcatttgaatagagaaaccgatccaatctcttacacaccggtgactcttgcatgtttgaccaagtaaaagaggcatttcgtaatgggggatcatgtaattcgcattctcttataaaaccatcaaaatccctcatgctggaagtgaatccagatccatccagtttttctgatcttctccttataacattgaagtcacctcccacacactatgaaggaaaagtaaggccaaaaaggcctaacagctccacccaaaaatccttcctaattgaggggttgtttgacccataaactacggacaaccacaatggtccgtttccatccaacaagaacttgactgagacagaaaaagatcctattaccaccttctcaccgctcattttctttgagtcccaaatgatcaaaatccctcctgaagccccgcatgccgggagaatagcccattccttattcctaaccgaccagacactacctacaaaccttctgtcgcacacctctctttttgtttccttaaacatcactacatctggattctgaagtcgcaaaaaatccttaaccaccctcctctttttcctagatcccaactcccttatattccagcttatgatcttcataaaaacacctcacagacctcacaaactttagccattttgctgggggaaagaccttctatttggaacccactcatctgggagaattctgagtctccctggctaattgcacccagaataggggctccatgaggcgagctgtgattggtcttatcatacttaaagctctcagacaacagattcaatctagccagctgggacattgcttcaacatggttaggattgccaacatacccaagacgatagtccccaacttcactttttttttgaacaaatttcagttaacactcggtttttcgtaggaaattgggaatgaaaggctgaaatggagagatcgggaacagaaggactctggtatggaaaagccacacaagagaagggagaacgtaaaggcagagaaggctgagaaagaatggtgagaagatacctggaaaaattccacttccgtcattctacagaacccctcaaagttaagccctttttctttgtttgcgggataagaaggatgatccgagactgaagatccactatgagaacaacccacaaagcccttaacacctgctccgtcttctcctatggcaatattgcgcattttctccttcccttttgacagaaaaggagccctaagcatattcctttgctttgtgttttccttcgtcggcgtcgttccttcctcggaacacccttaaaccaactgtgttcccgcttcggaggcgtcttccaatggaagagtattgctacctggcggcgatctctcagtcgtgagtggctctcttcggcttcgatccccttgtcggcatgcagagcttgaaggaagtagaacattccacagcttctttgaaccacacttcaccgcggagcccctccgttgattttcagaatcctcgtagcctaccgtcgccttcccctttgcagaatgagtagctctatgtgacgggcccttcgaaaatctgtcttgcttgccttccttctcttggcccagcacttgaatcgggcctttcccagggacttccctcttccagcccacatcagtttcagactgtgggctgggcttactaaaacaatgggcccttgtcatatgtttggaggcccaaatctcatccacgagatttgactgggctttgaccctaccagcctgccttggcccagcaccacttgctctctggctttttgaatttgaactgaaagacgttggaggccaactgtttcccactgtcgtcctgttcgttccacgtgtcctcccgggagcattctcagccttttgaccacctctccactccattgttctgccaactgccccagccgaggtcccctttccaaccgttgatctatcctcctcttccctctttctgccaactgtccccgtgtgtgcctcagccaaatgctgagttgactcacccatctctctaacctgcatgccgtcttccttcctagccactgcgactgagactgtgaaatcccaacccccatctaacacctcagtcaaagcgggaagcaccaatctttctttcattacaactctcaccctagctttgcttagataaaaaagtttcagcgttcgccaatctatctctgtcaccgccccccactactccataattttcttcaagtgaacctcagaccataaatgaaatggtaaaccccttaaatctatccaaccttccttaaatttctcctctatttctgaattttcctttggcaaccatcttctcaacaagactgtaaatccacctttaatcctgatgaaccttgactcgtgtagtgagacagcttcctctaaggtttctacaaaaaacaatccttttccttcggtgaaagggacgactgtcaccacgcctttgtgccctagccttctcgccatagcccggccaatctcagcccagttaacagaaccaacatgacattcgcacaccacgacccttgcccatctccctactgaaacaaggccgcctctcctcggtctttcttctttgactacattcgcggaggaccgttgcaagggacccgcaaatttgtgcaagatccttccttccctgccctgctctgccttcccttttcgtcaaaacccgaggaagggaccaccaacattgaatacaacacatcttttaaaagttcccatcccctgccattgtccctcttaggtattaccagaaaggttgacttccttttggaggcgaactctgataatcttataaacctgtcatgaacattgaagcaaacctccaatagatgaactctggtctttcctctaaattttctgttgaaacccataaaaatcttcatctcaatggcctttgtcaattgttctatcaaccaactaacctcttccttctcaaagcctaagacgaaaacagagcctttactgtgctctgttagtgaacaccatcttcctccgacctcacccttgaaactaacctagaaggtcttcctctccactgagaccttcaaggtccttcccatgatcggaatattaggatattcctccacttaggtgtagggtcaggttagttaagagcggagctgcctcttgaaaaatcaaacagaagtatgctttatgtgacatttgagcttgtagcctcctacaaaagttaccaacgtagttaccataaaggaagtagggaacttacacataattcctaattttttccctcattggaataaatttttagctcaattagtttgtggagtcaacttttgttctattttgcatgtattttctttctagattcacaaccctaacatggttgctagggtaggggtttacttttttagaatttaaggagtggaaagacaaggaaaaggataaagcagtgagaaaaaggaaaagatgaagaaaagatagaaaagtgtagagtctcaccaaggcatcctagtccgctaaaagagaaacatcggagtttactattggaaattacaaggtacaagaaaaaaaaaaaattattcagtgttcatcacttagtttcatcaaatagccttataagacttatacccaaaagacttgatggactataggagaaaaacttaatcatcataaagagttacaagaactctaattcttttttaaaattaattttcacttaaaggaaactagaaattttagaaaataaaaacttttaaaaaactagaaaaagtttttagaaaatagaaactactagaaaacaaagactttctagaaaatagaaacttccagaaaataaagacttttagaaatagaagttttttgaaaataagagcttttggcatatagacagtttaaaagtataggaacctttttttttttttttgtttaaaaaaaactactgaattctgaataagactcaaataaccaactagtaatgaacttaactctaaataaattaaatctccaaagttacctaaatatccttgagggtgtcatttaggatttatttatttctttccatttctttttgtaggtaaatattgtaggactcttctccatcaattcttcttattttggaggaaacttgatctcaagttttagtgatatttccatagtttcaaaaggcgtgcctaggtataaggtgatgtggcgaggggttgctagccttcgcttgaggtgacgtgcaacattgttaaagaggcatgacttaggtgcaaaaggcatgagccttgagcttagctcaaggctctccaaaggcgtgccttagccttttttcttcttctggctaaaacgatgtcattttggattaggttgtttatttatttataaatgacagaataatgatgttttgaatcttgctccttttttttttaaagccaatatcaaaacatgttgttttggtttaaaagtgaagaaacacaacccaaattaggctttgatgctatcaagaagagaagacggaagaggagaagaagagatggagagagaggagtggggcacatggtatacctggtggttgttactgttattggattcctcaatggcgtagtgcactcatgacccaccaccactgatatttagggatttatattcagactttttacgtgttatttatttttatcattttatgataaattgataattagataattatacacttaaagttgaaattacatatttatctattttttttttttttttttagataagtgcgcatatatataaaacgaggcaaaaagccacaaagcatacaggaagtatacatagcagcctgaacaaaaaacaacactcaccaccccttagggaacggcaagccattccaaaaaacctaaaagcgaagaggactcctctcccatatacaccttagcccaactccacaagttacaaacaaaagaattctttagattctgaatagctagagagccccccttgaaagctaatctatttctctcattccaaaccgtccaaaaaatacacaacgggatggaagtccaaatccttttcctctttctcgggcccctccaactgactaacatctctttgactttctctgggaacacccaattagccccaaacaaggccaagacaatctcccagagaacccttacaactgtacagtgtaaaagaatatgatttacattttcctcttcacaaccacacaaaaaacaccgatttggaagataccagccccgtctttgaagtttgtccaaagttaggaccttctcccaagaagcctcccacgcaaaaaaagcaactttggttgggaccttgtccacccaaatgctctttttcgggaagataatgacattaggccctgtcaacaacttgtaggcatctctaatccgaaagcggccgtgtccccctcctttccatatcactgagtcctcttcaagggaaatcctcaaatccctcaacatatgcaacagctgtcctaaggcgtccaactcctaatcattagagtttctagagagtcttatgttccaacctccttgaccaagactagaatcccacatctcatttaccgaggcattcctttgggccgccaaagcaaacaactggggaaaagcttgggacaacacctcatttccgcaccaatggtcagtccagaaactaaccttagtcccctttcccactttgaactctatattatcccaacaccaagacgactccttcaagatatccctccaaacccccaccccaaacgttccgcgggcctcctttgttctccaaccaaatcccacttggccatacttcaccccagtcaccttcctccaaaggaattcttcctcaacggcgaactgccaaatccatttacccaacagggccttattcaagaaatcaattttccgaatacctaggcccccactctccttttgggtacacaccacctcccatttgattagatgaattatttttaatttatttattatccatttattatgataattatatcatgaaagttttaattgatttatcgatatatatttttttcactttttttaattgatttaggtgatatttttattttatgtaatattttatttcattttatttatttggcattgatcatctacttatttatttatctagcaatctatctatttatttatttatttttgattggcaaacacacaaaaagcatagcaatctatctatttataatcataactaaagttataaaaggtttatttatttactgataatatgtattcatatatttactatttttattttgaatttttttttgggaagttatatttgcatttgccaaaattctcttttcatccatcctatttagacatctacttaaaaatttagaacttattaatacatccatcttataattttaaagatacccaaaacacttcccattcttctctccccaaacccatcttcttctttgtttttctataaatctatttgttcttaatcataaaccctaagagaaaatcatcttctcttaaactcatttgataacagaagagtatttgaagcacgttcttagccaattgtaatttttttttttatacattttgtttgaatctatataacataccatatcaatatcttttagggcttattctttgtgtatttttgatgaaaagcttgttgtaagaatagttggaaaacaattatgatgaatttagaaatgatttgggagtgagaaatcatgaaaaaagtgcaatatggatgaaaaaaacttactctattgtgtttggacttggaaggtcggacaccatggaaaggtccagatttggaagtctaaatgttgagtaaatgttcagaactagaaggccaaacacaatagaaatatccatcacataaggttggacatggttcaattgtttggtagatagggcattgggaggtatagttcaagatgtctataagagtgtccagatgtatagttctgaacattattagtatgcttgtaagtacagtgttggacatttataaaatgtccacccctacaatgctgacatcgtttgcgacaccttcttcgttcaactcaaaaaatgcgaaaagaaatgtaaaaaatgttataacagacatatctctccacttgtaccatcattggagatgattatttgcttatccattggtaagaaacacaacttttgataaattttgttaggattatggagagattagaagagaagaagtgaaggaggaagaagagagtagtttagggatttcattaaggggcatttttgtcttgaaaaaattcattaaaagcgtggatgtaaagagagttttgatggatgcaaatattatttcccattttcttttgttaaatgttaatgctttaactaatatttgataatatgtatatgagacagatgcttggaagtttaaaatctcttgtattatataaagttaaaatctcgcttaatctttctctttgtggtattcttcaccttttgactttatcttgtttccacttttttttttttaaaaataatttattatttggtctatgccatgcattttcccattgcttaattatgaccattctacccattaggccctacacacttcttttactcccactcattagacaagtttcttgttttacaactcatagcaacaaaaatggattccatgcattttttctctattcaatcattatgctattatgcatggtcccactcatcaaacatggtttactttctctctttgtatctccactaacatcatataatgggtcccacacaccacttctcttgctattttgcctctgtaacacctaggccactattcccatcattcacttttctactctactttacgcaactagcataaaacatactataatccttttcatgggtcccatttatcactatgtaagactattccatcactcttctcatcatatctccactacaatattataatgagtattgtttaaactctcaaacaccttacaattcccattagatgcctttcttatttcaattctagtaggcaccactcaatagtccttcttgcccttattcacattcattttttattttaatttttcctagctatcttagactctcaaaactcttttttattggcgctctatttttctcatgttttaattcttttttttttctttctactaaattctatattttataaatgctattggatggtggcacctcattaaaaagtttgaaaaaaaaaaaaattcgacttcaaaatataattatttgaaagatcctaggaatataaatgcagtaacatgtttattttataggcatgagagaaaagtggaatattttgtgctaaacaacaccacataggaaaaagggaaatgttgtggagtgtttaaaacatctagaggaagtaggagaagagcttgagcattacagattgatgaaaatattaaaaaagtcaactataattcttttcttgagtttgttggcttagaaaacattgttgacattaataaaaaggaagaacttgaaaaagtcaatttgaatggaaaaaaaaagtggctaataaaagaaatgatgtggaagtaataagaagatgaagtcaataacaaaaggtcctattgatgctgttctcagaagttggaaaaagtagttcaactttgaaaagagggaaagatgaagcaaagtttcataaataatgtgtttgataaaaagaaataggaaagtttatgctaatacattggtcaatttttctatcaagcaggtatatcatttaattgtgttaatttagattgttttaaatggatgattgaagctatcgagtaatatggtatgaatatgaaacctctaagttatcatgaattacgagttccaatcctttaaaaagaagtggaggacatgaaaaaattgttgaaagatcataatattgcatggatgaagtgtggagtttctattatgtttgatgggtggatgaatagaagaaatctaacctagatgaattttttggtaaattgccttgttggaacaatgtttatagaatccattgatgcaagttcatttataaaattggggagaagaatgttgtctaagtaataattgataatggatctaaatatgtattggcaggtaagatttcatttgatcaagttctttaggttttattcgcatcatttaaacattatattatgacattatttatcatttttacttgttatgctttttatgataaaaatttagacaagaaagttcttagaggcatgtagttaatgctttttataataaaaattcaaacaggaaagttcttagaggcaaaatgactacatttatagtagacaccttgtgcaactcattgcatagacctcatttgagaagatactaggaaacttcatatggtgaagagtacttggatagtagccatttcagtaattgtgcttatctataatcatgcgggtgtgttatacatgataagagagttcactaagtaatgagaattggttaggcctaagcataacttgatttgttttttcttatcctacaaagtatccacttgcaaaagtgcaatttgacattgatgttcacttttggcaagtggttaatggtgaaagaagcaaagggaaaatatgtgttataaattgttttgataccttcattttggaatcactttgtgtatattcttaaggtgatgagtcctcttgttaaaagttctttgacttgttgacaatgaaagaaaactagctatggggtacatacatgaacctatggatagatgcaaagagactataaaaaaaggccatttaatgagaatgaagttaaatacaaagaaatcttctctatcattgacaaaagatgggaatgtcaactccaccatcctttgcatgcagcgggtcattttttaaacctgaaatttttctatgacaagcctcatgtggagtttgatgaagtgacattggggttatattgctattgtacatatatgaagctctgatttttcttttgctctctcttgtttatgtgttttgcttggataagttcatggagaaacaatgctattgtagtttactctaaaaaaacttcttaatgacacaaccctgatatgtgggcaagtattggttcatttagtacctgtaaaatatttgtgcatcatcatgtatccaggttggtccactttgcatggattttatttatgaagctaactacctaattttttttgtcattaaagctttacttgtgtcatattaatatattattttctttctctaaatttgattgtacttctcattttgttctgagtttttcgggtctcatttgggtttttgtgcttcaaaatggtaattacaattgtttctttttctaaatacagcttt

SEQ ID NO: 10511 - DNA, 9098 bp, Vitis vinifera
  Intron number 16 from transcript GSVIVT01028455001 (locus GSVIVG01028455001) derived from phytozome v7.0 (chr-ID chr 7; pos 7820722 to 7829819 reverse strand)
agaaaacttggctgagttagagcaatatccaaggtgtggttatattatttctttcttccttcctctatttttttttttttaaaaaaaaaaattacttggattttttttttattcacaaactatggggacaaaatccagtttttttaattgttggtcttttccagacaatcattctttttacaaattgacaatttttttttttgataggaaacaacaatgaattatattgaaaaaagattttaagaagtacaaaagaaagatgaggaatcctttttcacaaattgacattaatgacataatttagaattatgccattatatttgttgctctttgatggataaaagatatatttttcaatatactactaataataagagaaggaaagaaaaagaaatctagagtagaactgatatgagagggaaagaaaaaaaaaaggagggaaaaaagagagatctagaacccaatcatttaacaaatggaaaatgacactaaccactcctgaggtttgaaattattacttggacttcccttctattttctgatattacattgatctccttaatcagactttatcccttaacagaaaaagacaaatttgccttaattaccttgttgaagagtcatcaactccagtttaatagaggtaggctggagtagctagtaacttggatattagaattttctgattactgtaatgagcatgaggggctttggacaaaaatggattggttggatgacattttgtatcttcagtttgggcttctttgtgctggttaattgtgcactcatactggtttttttccccaagtttgagaggtttgaaaccaagggatccactcttcccataccattcattcttgttccataattgtttagttgcttcatttctagagcagcagaggttttttttttttgtttttcgtcaaaggtttctaggtagagggtccttgaggaggaattgaagtttggcttattctatttgtgatgattcttttttgtttttgttttttttattaggaacaagagatgtaaatactaatattaatgaaaacatgagaaggatgaggagttatccccacgattacaaaaaaacttgatcttaatatggatgacctcctctactatacaaggagtctatgcagaaggcttaggctaaaaacatcattcctctcaaggatctccacaccctttttatttacgcatcgcaagctagtttagttggataactcttaaaggaatgcctttaaaagccttggtgcataaagcctagaaagagaaatagaagtgaagtaaatcccacaatccctatgttgtccttcccctatcataaattttttttgtcattctctctcaccacataatccaaagcaatgtgtgacaagctatttgccaaaaaatcttgcttttactggaactccccaaacccctatatgaaattatcatcatatcacatatactcttgggtggaacccaatcgatcccaacttgtttgaatagatggtgccaaagctctaaagtcatcaaatagtatagaaagagatgatcaatagactctccactttgcttacttagaacacaccaatcaggcctaaggaatttgaaatatcttctcaactgtagtatattgttggtatttaccttcttgtatatctctaaccatgcaaagaccttaaccttagataagactttagatttggagacaaagaacaaaatatgaagtattagacaatactataaagaaagatttgattgtgaataatcgtgaagaagtcaatgaccatgctctcacatctggggtggatgaatacaagtgcacacaagtaagggataatatgagtctttcaagatcctcaatctttgaattcgtaaggttgcaacgaaaattaaaatcctaagaatatgaagaagaacgaccaaagatagttgaaatggtaagattttttattgtgacaagaccagatgacttatttgagctagcttcttatgtggtttgaggcttgttcgggtttgagaatctatttggagaaaagtgagctaattccggaggggagggtgcataatatagatgacttggccttggagttaggttgtaaagtgggcagtctcccttctcgccatttgggtcttcctttggaggctcccttcaaatctgtgacggtttgggatggtgttgaagagagatttcaaaaaaggctagtcatgtggaaaagacagtttatctcaaaaggggggagactcgctttaattcgaagcactctgtctagcatgccaatctatttcatgtctctcttttgcatgccaagacaagtgaggttgagattggagaagattcagagggactttctttggggtggtgagactcttgtgcaaaaattgcatctagtaaggtggaaattggttttgcttggagaaaaggaaaggtggtttgggtgtgagaaatctctctctaatgaatatagccctcttatgcaagtggagttggcggaatgtcaatgaaagagaggccctttggaggcaagtcatcagtcaaaagtgtggtgaagatgatggggggtggcattcccacgaggtgagtcagaggttcggtgtggggttgtggaaatctattaggaaggagtgggatattctaagtagcaggttggcattccaagtgggtaatgggcagagagtgagattttggagggacaagtggtgcggagatgagccactatatgtgtccttcccttatttaccctttctttgactaaggaagcttgggtggcggatgtttggaaccctgaagatgaagggggtggatgaacccctcttttctctagggcatttaataattgggaattagatttggtggagtgttttctacaaacgattcaagcaattaaggttcagagagatgtggatgatagagtgatttggacaactgcgagatgtgggaccttttctttcaattctctctactctattttggagcctggagattctcttttgtttccttgtgggagcatttggagatcaagcacgccacctaaggtggctttctttgcttgcaaggcatcttgggggaaagtcttaactctaaatcaactttaaaggagggggcactatttggcaaataggtgttttctttgaagctctgaagtagagacggttgatcaccttcttcactgtgcaaaggctcgggttctttggaatcttcttttcttcctctttggtgtgtcttaggttctctcctattcagtaaaggaaacccttcttgggtggcatgggtcatttgtgggtaaagctcataaaaaggtttgacaaacaacccctttatgtgtattttggacaatgtggaaggaaaggaacatgttagcatttgacaatgagacgttatcgattcaaagattgaaaatttcttttgtatgtaatctgtgatcttggtctagggtgtttgtagatacgagccctatttctcttgttagcttcattgattggttaagttctaagtaagggcatgtgatttttttcgttcttttcccttcccctttaggctgagtcattaggcttttactgtatactttgacgacactatttttggtgcttcatcttttctttatatttggtttttctttacctataaaaaaaataataataaaaaataaaaaataaagattttttattgtgacaactttataaagacatgaaaattgtgaacacaaagggtgatcccgtccccacaaatcctcaaagcgagttcaaatgagtgtaacttgaaaaaaccctagaacacctgtgcaatgtgaccatctaactgtaatgttaacatttcatccattaggacatgtcccataaatacttaaaataacctgatcctaaaggccaaaactttgcctatggaacctccaaagtcatttccctaagtaagcacaattcctcaaagagatcaacctaagtcccagacctccttactccttaagcttacacactaagtcctaactaatgagatgatcttttctaccctatttagctcttgaccagggaaaattcctttgcaatttctcaatttcagacactactgacgttgaaatcttaaagagagataagacatagttagggatatggaacaaatatgtctgaattagagtgattctacctcctagaggcaaaaaaaaaagtcttttttcatccatccggcctcctttaagctttgtcattcattaggtcccaaaatgcaactgcctttagattcccccctaatggaagacttaagtaagtgaaaggccaatttgagactttgcattcaagcattgaaccgaagccaacttgataatcaaatcttggcttatgttaattccatatagagcactcttgtctaaattgatctttagtcttgataaattcctaaagcaataggattagtttaaggttttgcagatcttccataaaaggtctagagaaaaagatggtatcatctccaaaaagatgattcttttttgttttgtgaggctgatagggggtagttgcttcatcttcgatggaatcgtttgtgcttcaaggcaatctagggcctcaaagttaatctttacaaaggtgacatcacacaagtgtgcaaggtggagaaggtgcattagttagtttcatggtttggttggaaagtaggctggttactaattatttgggtttgcctttcaaagcctccttcctaggacctggttgaggaaggatgatagaaaagattgacctcttagaagtggtattatttgtctaaggatagtaggatgacactcataaaaagtaccctcactagtctcctatctacttcatgtcttcttttctggtgccaaggaggatccgttgtagactcaaaaagattcaaagacatttcctgtgggaaggggagattacttgaaatacattccttcagaaaaggatggaggaatttcctttcccaaactagcattttagtgggacatggttgtagggccaagttgggaggtagtataaaagaatatcttgacattaaatcgacttattagataagagtagactcttactacttggtgttgcctttggaagaaaagggaggagatggctaatcatttttaattcattgttattggacctctcacttgtggtctttaatgttctctctttttagggtgtttgggatctcccttgagtttctagggatgccttactaggttggtgcagtagcttcaagggaaagagttgcaaagccagtttggaaaatggcttcatatgtttgttctggctagtgtgaaaagtgaggaatagatgaactgttggaggtatggagaatttgattctggttgttaaaaatcagttaatcaactctttgcttttatgatctaaaggttctttatgtgatgtcaacttcttccttataggttttgttgacagcttgggttgctatagactggcattgtatacatgtgtgttttttttttggttggtgtggtgcctcttgtattccccagcatccatgggttgcacccccttctgtttgccacctatttgctattaatttgaccatcaaaaagaaaaataattttttttcttccccaataacctttttcgtatgctacccaaagccatatccctttccctcattttaaaattcaaatttctttttttgaaaaaaggatgcaacagcacacactagctgctgtgcagcacccatagcacagcaaagggaaaattttttcctttaggaaaaaaaaaaaaaaaaaggaaggatattaaagaccccaaccctgttggttgttgccttatttatcccaaaatcataaatccaaccccatcatcctaattaccaaacccttaaagaaaacatgacagagaacaattggatggggattgggactttcttttttattttgaagataatgataaggaagatgaggaagatttttgtccttgactcattgtgaattagagctttagagtttgatttcaagttgaattggattaatttggtgaatattttgaaattaattaggatcaatttgatgttaattaggatttttttgtgggttaatttaaaattaatttggttaaagggtaaattgggaataacctcaatgcattccattgtcaacttaactataagttgttgcctggggttgatccagtcatttgactagagcctcaaggaaggggatcattattctaggaaatagagggtaggctattttaattgacctttataaaacatcagagggtgactccactttcaaagtccttagttgtaaaaactactctctcatctcttttccctctttgtatgccttagtggattcaaaagaggtgtgggtagcggactgttgggactcgttgggggaagaggggggctggaacctgcggttctctagacctttcaatgattgagaggtggaggcggtggagaggttccatttgaccatacaaggaaagaggttagtcattgatttggaggatagggtgctttggaaagagaataaggacaggaaattttatgttaaatccctttacagtgctcttgaacctagaagtgcagttccatttccgaggagcatcatttggagcccttgtgtccccactaaggtggttttttttgcttgggaagcttcataggggaaggttctaaccttggatcaactcaaaaagagagggtgacccatagctaacagatgtttcctttgttgtgctgaagaggagtctattaatcacgttctaatccattgttccaaggcaagggttttgtgagagctactatttgcgatgtttggtgtgatgtgggtccttccactttcggctagagataccctcctaagttggcatggttcctttatgggcaagaagcgtagagaggcttggatggcagctccactttgtttatttgggtcggtttggaaggaaagaaacaagatagcttttgaaaatgaggaacttttgattcaaatcatgaaatattcttttatttgtaatctatggtcttggtctaagttgtgtatagatgtaggacctttacctttaatcaacttttttgattggttgggttctagatgagggttggtaagtttttttgtatccccacttcttttttgttcttacctttaggcacctcttgtatactccctgcatgctctgggttggcctttaggtgcccttttctcttaatatatatttttttctgtgtttacctatcaaaaaaaaaaaaaactactctctcatcatcattgtggattccttccttacaaaattttgcttcttgtccttccaaataggctgaagcagagaactcttgatcatcctctaaataatttttttgattccagatttggaaccctcatccccaagaataaaaattttccttcatcaaatacatttcatgcataacagaaaaagaaaaatggattatccacttcctatttgataagatgatttagaacaatattcatttctggctgcctagtaccatagttgtactcgtaaaatgtatcaatatatatgtgatacatgatgcaatgatatatacaccttcaactattttcatacttttaagaaaaatcaagttcaattccttttgaaagaaaagaattattatattaattgtttaaaatgtacaggaaagttaggaagtaatcataaaagagaaaggtaaaataatcttacattgaaaactatatttgttgacattaaaaattatatgatgaataaaatttttatgttctaaatttttttttcttttttggatttttttttttttttttttttttttgacaaacatgaaaaattacacatacaagtgtatatgcctagtcagactttagaactaaaaatatagcaaaaattccaaaaagcttatttttgtgaattcattagtaagccaatgcaataaactcattctgttaaattgaatgttttaaaattctagcattcaatgttttcatatggtctagcatagtttaccatttaaattcgactatctttcaagtaattggttatatactactctagatgcttccaatatacatgtacgcatatatttttgagatttatttatttattttgatgagaaacaaacatttgattatcatgggttaagctagtacaaagaaggatgataaatccttcccccaagtacaatgactacatagctatggtcaaaagtagaaaaaccatctactctagatgttgttagatgtgcacatctaaaatggttaaaaatatgaactcaagaacttagggggtagaaaatccaaccataaaaggaatcaactgcttagcttcccattttgttttctacttatttttcactacataaaaaaaaataaaaaaaataaaaaaaaccttaacagtacatgagacgaaaatatagaaacaatatatgaattgcaatatgtatcaattttcattaaattgtattatatcatgtgttgtaagttcttaacaaccatacctagtacattaaacaagcctgttgaaaaagattttcaaccagaaatgctagaagaaaatgggtcatggacccttgtcttccatatttactcttgtaggagtctcatattagaaagccaaagatgcttacagcacctgcttctcaattttggacagttctcctaaatatggcagccaaaccgccctgccagctatatagattcctctccctgcagctcctaagttgtacatgtttgtaatttccccctgtcggggagctcctcccttactagagattcagtacccagcatgggtggttagattcaacttcctcccaaaacccctagtctgttgaatcctatatcacttacttcattagcattggcaggacaatcagattctgaagtttgggttctactctcatgatgactccctcattctacatttttacttgttctgtatttgaaatcaaccaaagttgattcttatatgttttaatatctattgagaaaatacaacactgtttacctttagaatagttcattttatttgttgtctcgattctatcagaatgattttgctcttggcgcgtttaggcatgcacaaattactgttatttgaagtgaatggttttaagatttatctgatggttgcttctcactaaatgcaggttcagacaa

SEQ ID NO: 10512 - DNA, 9364 bp, Vitis vinifera
  Intron number 5 from transcript GSVIVT01036957001 (locus G SVIVG01036957001) derived from phytozome v7.0 (chr-ID chr3 ; pos 9580841 to 9590204 reverse strand)
ttgcctctttccttgtatgtaactttgtaccgatgtttccctttatggtcaatttttttaatctaagaatcaggacttaaaacccatgatcttcattcctgtttatagaatgactatatttcattagaggttttcatgctcccatgatatgtcatcttatggtttctggttactctgctgttacctgtgctatgacattccttatgttttctgcattcaaatttgataaaatcgcaatgatatatatcctttttgtttggcttttcttttattcctactgttttttgaatatcactagtatatcacaagtactattgcttcctcttctttaattccattaatgagatgaatatgcacctatggacccataagatgatcatgcagaataatattattaggtttcatccattaggtttcactgttgattgctcagagctaaatagtgcaggaggttataaacttgaagagtgtaaggcagtgcagatcaatagttcactggtggtttgactaacagtggctgcttatgaaagctggattgttcatatgcatggaaataagaggattgctttggaaccatggtgtggtaggactactttttttttttttgataggaaatgacaaaggaatatattgataaaaaggatgtacaagagaaggatgaggaatcctcccaccaaagaaaaacaaaactacaaggaatcaaatacaagaaaatacaaagtaaaaacaagcaaactctctaggttagaccaacccattgggattatacactgctaaccaatcaagttgtaacacgttaaggggaatccccttaaaaaccttagaacaaaaagcccaaagagaagcaaggaaatgaatagaatcccaaaggttctctaaattccttgctttatcctcaaaaatccttgcatttgtttcccgccacaccacccaaattaaagcgatgcacgcagcttgccataaaacaatccctctcttagaagatccaaaaccgttaaaattggtagatagcatgtcaaagaagctccttgggggaacctaatccgtctttgctaactgaaataatctgtgccacaaccccgtcgtcagagagcaatggagaaaaaaatgatctactgtttctccattcttcatgcacaatttacaaatgttgggactaagtgcaagtcattagcatttacctttttgtgtaccactaactagacaaaggacttgactttgaaagggacttaagaattccagacgaacttagtagggaaaactggaggcaaaccagaagattgtgataaggtaagaaagaaagatttgactgtaaaaagtcctgaaggaaataaaggccaggatctcatatctggaaccgaaggtgataaatgtagacgatcaagagaccgcatgagactttctaaatcttctatcttagaatcagaaaggttacgacaaaagttaaagttctaagggaaggggcgagtagagttgagaattgaagaaataggagtatttttatccgtgactactctaagtattcttggatattggacccccaaaggttggtccccccaccacaagtcttcccagaatcgaattttttccccatctcctaccacaaaccgattaaacttggaaaactcttgggagacttgtgcaatggccttccaaggtcaacgatgtgaccatctgattatagtgttggcatcccaaccattggagtgtgatccataaatgcttaaaatgacctgatgtcacagagctgaaccctccttaagatatctccacaaccatttccctaaaagagcgaaattccttatagaaatctttccaaatcccaatcccccttttgccttcggattacacactacatcttagctaaccagatgatctcttttgccttccccaacccttgaccataaaaaatctctttgtaatctctcaatttttgttgccactgaggcgggaatcttaaacaaggagaggaagtaatagggcatatgggtgagacaaaattgaatgagagttatcttgcttccaaaagataaatatgccttttgccacccatctaatcttctcgagatcctctcaatcacaggatcccaaaagccacaagccttgggattcccttgcagaggaagacccaggtagagtataggccaccccgaagccttgcaattgagcaactcggccaacctagagagatgattctattcaagattaatgccataaatattacttttgtcaaggttaaccttcagcccagaaatatgcccaaacactagcaaaatactcttgagggtcagcatatcctcttttcgagtgttagaaaagaaaatggtatcagctgcaaattgtaaatgggacacccttgttctgttcttacccaccttgaaaccctcaaaggcatttatttcctctgctctcaataacatcttgctcaatacatctacaactaaagtgaacaaaaaaggggataaagggtctccttgtcttaaacctttggatgtcctaacccaccctttaacgtttccattcactaggactgcaaaagataccgaggacaaacaacctcttatccatttcctccatctaggactaaaccccttcttctccaacacatgatccaaaaaatcccaactcacatggtcataagctttttcaaagtcaattttgaagacaactgcttcctcccctgatcatcttttctcatccactatctcattggctatgagaattgcatccaaaatttgtctctcttgaacaaaagctccttgagaagaatggatagtttcattaagtacccctcttagatgccccactaacactctggctattatcttgtaaagactagtgatcaagctaataggtcaatagtctgagattttctttgacatgctttttttgggtatcaacaccatgaaggaagcattaatgctttcgataatcccgctcctgtgaaactctacaaacactctcactagatcctccttgatcacatcccaacaatcttgaaacactgcaatggtaaagccatcaggcctcggtgccttatccttattcaactgaaaaattgccttagaaatctcttcttcagtaaaaagggattccaacctagatgcactctctccagatataggggaccaatctaagcctacaactctccaagactcttcaaaagggctcgcgtaaagcttttcaaaataccttaagatctcctatttgatgctctctgaattattcaacattagacctctttcattccccaacaccttgatatatttcctatttcgcctgccattagccactttatgaaaaaaatttgagttacaatccccttccttaacccatttcaccctagctttttgtctccaatgtatttcttcccttaaaatcaactcctctaactccccttttcttaaagctctttggactaaaaattcaggggagagacccccttcttgctccatggtatcaaagttagctaaattaaacatgatactttttttcctttcatttagctctccaaaagaagccttattccactctttcaatttggccttaacaaattgtgatttcctcatgaatttgtgaccttcccacccatttccttgaaactctctccactaacttcctaagcgctccttaaaactaggatgttgcaaccacgtattctcaaacctaaacggtgttgggccccacttgaacggattggtttctaagactatcggccaatgatccgatgtccatataggaagaacttcttgaagactttgaggaaataattgttcccactcatttgagtaaagaaaacgatctaatctcttgcatacgggatactcttgcatgtttgaccaagtgaatggtgcgctccttaaaggtgaatctattaattcacattctcttataaaatcatcaaagtccttcatgcttggggttaaactagaacctcccaatttttctgaacttctccttatgacattgaaatcgctgcccacacaccaacacggggaagaaagtccaaaaatgtttgaaagctccacctaaaattccttcctaagtattgtgctatttgggccataaactgtggataaccataacggttcgcatccatccaatgtgaacttgattgagaccaaaaaggaacctattaccatctcttcactacgtagttttttagagtcccaaataatcaaaatcccgcccaaagccccggatgccggaagggctgcccattccttatttctaactgtctaaacactacccacgaaccttcgtcacactccgccttttttgtttcttgaatcatcactacatttggcttttttgatctcagaaaatctttaaccacccttcactttttccttgaacccaaacccctggtattccaactaattatcttcatggattaaactcacagaccttaatcctccaatccaattccaacaggtctcacaaacctgtggagcatctgctcttcctcctggaatataccttaatatccagagactttaaaaccgcacgcacttttgccattttcctgggggacagtccttcaatttggaactcacctgatgaggagcctacagtaacaccttggctaactgtaaccaagttggaggccttattaggcgaaattggtttgggtaaaaatgggttaacactctcgatcatctggtaaggataagtaggctggatcacctccattacaagattagggatgccaacagaagattgacctacagaacctttgtcgtcttttttggaaaaaaattcaaagattgctcgattttccataggaaattgagattgaaaggttgaattgggaagattgggaacagaaggactcggaaaggaagaagtcaaaccacaagaagggggtatagaagacgagggtgactgaataggtgtaaacgggattacctccaaattttccgctactaacaatccacaattccccataaagttaagccctttaccattgatttcaggcgtagagggcaaaatcatgactgttgagccacgaagattggaccccactcggcccaaaaatccttccttgtcttcgttggaggaaaatttgttcagagccacttcatttcttgacgacgaagcccctttccccaaacaattcttccgaaaccttggaaatcgacgagaaaagagaggactagcactagatcctcgattcgcctgaaaatcggccccggaagcctcttcctttgggtcctcttcgctgtttgcctgattcttcccgtgaaatacaggctcgctgcacattgaagaccttgtcagctctcaaagcttggaggaaaaagggtagaccacaacttctttgaaccgaacatcaccttcttctttgcggaactaatcgactgaacctcaagaaatacataagctgttttcccctttcccattgcagaaggatcttcttcctttcgtaatgacaccaccgtcttatctgggtttttttctcttaggcttaggcccaaccccgtcgggcctctggaattgcagcccacttttgcatattttggaccaatcttagacaatgactgggcttcctcttgtaggcccgatagccctcaatagcggaggcctcgtcccctccagccctaactcctcccgcttcctcagtcccaacaagcccatcgtccgttttatttgaattcatattgggcagcgatggaatttgaccacccttactacgtgtcccctctgaaagaaacatagccatacccctttctccctccttcctcattctgctatcttccctgacacgacatcttcccccagctgttgatctgactctctccccccgccttcctccacctgtccccgagtgagatgcaaaagcctcctaagtcgactcaccctttacgctacctctttgaccgtcttcatttccgaccactacgacggaaactctaaacacccaatccccgtctgtcatctcgatcaaagctgagaggactgacctatccttcattgcgattcttaccctcgccttgctaagatcaaacagtttcaatgttccccaatcaatttcagtcaccgtcccccactgctccacaattttcttcaggtgtacctcagaccatagatgaaatggcaaccctcgtaatttgatccagcctcctttgaacttcctctctatttccgaattttccttcggcgatcatcttcgcaactggactgtattccttccttcaacccttaaattcctctggagagagagagcttcctttgttgtttcaacgaaaaatactccttttccacttgagatgggtacaatcgttactacacctttcttccctaagcttctcgccaccgctcggccaaccttaacccatttaacgctatcatcattgcgttcacacaccatgacttgcgcccacctcccgataggaacaaggcctcctcctcttggtccttcaccactgactactttcgcaaaggaccaatgcagaggacccatgtgattgtgggaaaatctttcccctctatattgccttccttttttgactgcattcgaagggtggaccaccaacattgaagacaatgcacttttaatattctcccatcctctgcccttctcgcccttaggaataatcagaaaagaagattttctgttggtagcaaactccaagatccttatgaaccttctgtggttgttaaagccaacttccatcaagtggacacaacattttcccctgaactttctgttgaatcctaggtgactcttcatttcgatggctttcgtcaaatgttcgatcatccatccgactgcatccttttcaaaacctaagacaaaaacatagcctctactgtgctctgtaatcgagcaccgatttcctccgtgctcgccttccaacctaactaagaaggtcttcctctccacaaagaccttcaacgtccttaccatgttgtcgatgatatcatcggaaatcaagatcccaccaagagtgtcgaacctccaacacaattgttgtggctatcgctacccctcctagatgtcattattatgagcatgctgaaatttggaactcggattactgaatcgtatttagataagaatctagaacatgctgaatgatcagtttgaagtagagatgcctgctagtaacaaatctccaggaaagatcgtgtagtaggattactgatttagacaaactgccatcctatttttgattgtgattataatcatgttttgatcagaaacaaacattttcaatcgataaattgattggaaagccataagcaaagagtgggatcttttgagttgcagaatctccttttcagtgggtaatggtcagatagtgaaattttggaaggataagtggtgtagagacgagccactttgtatttccttcccctccttattttccatagctgtaataaggacatgtgggtggcggatgtgtggaactcaatagttgatgggggtggttgggttcctcatttctctaggtcgtttaatgattgggaggtggaaagtgtggtgcgctttttactatttattcaagcaaaaagggtgttgagggatgaggaagataagatgatttgaatggttacaaagagtggaaagtttttagtcaaatccctgtattccgctttggagcccagtgatccttttttttgttcccttggagcatcatttggagttcttgtgtgccacttaagatggctttttttgcttgggaggcgacttgtgggaaaaccttaactttggaccttgtccagatgagggggttttctttggcaaatagatgctttctctgccactctgaagaagaaactattgatcacatccttctccattgtgcaaagacaaggagtctttgggagctattatttactctctttggggtatcttaggccctcccctcctcggataaagagacgctcctcgggtggcaaaggttatttttgggtaaaggttgtaaaaggccttggaaggctgcccccttatgtattttttggactgtttggaaagaaaggaacatgcgtgcttttgataatgctgagttatcggttcaaatgatgaaaaagtctttttttttttttttgtaatttatggtcgtggactagggtgtttgtagatgtggactctagttcacttattagtttcattgattgactaggttctaaatgagggtaggtgatgtttttttgttctttcccctccaatcttggctaagctttttggtggccactgtatactccctgcatacttcgggacgctatttgggtgtttcctttttatacatactcatatgttttacctatcaaaaaaaataaatcaataaatacatgaaggataagcaatccttcaaagatgtacaaaagatggtagaaagtaaccaagaactagaaccaaaaaaatgagcccctccttataaaaacctgcgtataaataggagaaaaaacattggacactcaagggggaaggaaatgtccaacaaaagaagccatatgatttgctttttgtttgggtaatgaatttgcaacttggtttgttgaataaggaatccaagagaaagaacaacccaactcatttgtagtgtttgtcaaacttccataaacccctttccttttcattctcacccaagatattacaattaacagaatctctctttacaattagattgaatagagataaagcttttgcctggatcaaacctttcaatgatgccaatgtctctgcctcaatggctaaacccattttagtatgcttagagaaagctctcgatactgtaccaaaatgatctctaaccacacctctaaacctatctatctagggttactcgtcgaatatccattgaagtttaactttattgaatctactggaggggataactagtcaatcatttctttcttcttcaaacttttttccttttttttgataggcatttctttcttcttcaaacttattgagtggtaagcactaaaagatacaatggaatatcaacaaaagtcttggtgtttgaagcccatatggaagagaaaaagaaaatcaagtcccaaatgacattcaccaatatccatctacccttgaaaatccttgcattcctctccaaccaaataaaccaaatcaatgataaagcagccacttgccaaaggatcttccctttcgaaaggcatccaaagcccttaaaggaaatttctatatttgtgattaaaaattctatgctgctttctttattatggtaatccctcatacaatgcactctatttcaactcagaagcttgaatggctatacgccatggcataaaattatccatattttcacaattattggtgctttatagctaataatgctgtctgttttgatttgtttcagtctaatattcagcgagcacacagcaaacgttggag

SEQ ID NO: 10513 - DNA, 2946 bp, Vitis vinifera
  Intron number 4 from transcript GSVIVT01030194001 (locus G SVIVG01030194001) derived from phytozome v7.0 (chr-ID chr8 ; pos 10653009 to 10655954)
gctcccgaggtttgcttcttataatgctcttcattatttaattaatcaccatcattcagtttgttaatagttgaagcatgtgatgccccattgatgtctaggttggaatgagatgacaaacttgattaccacagatgtgattataatttattttgaattagggatttcctagaccactctggctacctgagttgggtcatctatttgagtactatttgaatctttcttttcttttcttttctatttttttttttttttaagtttcatctataaggtcatatcatctcttttgtcatatgccatcatgatttttatctgtctcaatccatgtttctttggcctttctcttcctcttagctccttattggatttattctttcatctttgctgctgcatttcttaaccccatatcctagaaacttctatgaagtaagaaagccttgatgagtctggtgaaagaataagaagttgaaaaagaagcatgatgctaggaacaggatctaaggaaagatattcatgttaattttttggggacttgactggtagaaacaaacagatacagactatttgatataaaatatctagtttgtagcaaatgatgcacttccattgatggtttttgagaagaaatttcggattctggattcctttatgtagttagaatgcggggtttcagaagaatctaagttgcaaaaaattctaattattcctctatttttgaatgtccaatgtaaaacaaggaagaaggaaataataaaggcccatttgatgcagactttcttctttctattgcttaaaagtactatccaactatcaatgtgttttatagtgtgtctgattataggcaaagcaatttagagtaagatatttgggatctagaaactcctttcaacaaagtcaggatagcagtgctgttttttgaagtgaggttacttgacaaagttctgaatttaaattctgttttactcattgaatgacaagcttttctttacttctcaaagaagcactttacttgaggtaatagctcaccaaatgaggcctaagcatgaaagagaaaatataactcaattcagttgactcaagctcaaagaatttgaattatttgatgtaaattgaccatgtgagatttgttggtccactgagtggttaatgttaaatgattataaaaaattacctccataaaaactcgaaagacagaaaattcttgacatgaaaatttttatttttacgatagactaacctaacatgtgtaggattagttgtctgtggtttattttgtcttccaatgactccctctttgctgctcacgctctttttgagaggtcctctcaatcactcaactgttggctgtgcacgcattttagcttctccagaggtagcatttatcattatttgataatttgtatttaaggcttgttatataatttttaaataaaattttatacttcgatttatgtattagttcatgtgcattgcacatggcccataacttgtaattcctaaaaaaaataaaaaaaatgaaaaactctgaagaattaaattgaactattataaattggttgtgggattgtcagttcagaatattggaagcatatagctctgtgttacaacatggagcttgtcataattaaaaagaagaaacaactcctgacgttaggattagccctttgcattctacagaggcaacgaagttgtgctcaagcatatggcatggatgcagattaaggtgaaaatgtagcaattcaacttggatttgtatgattttttacccctttattcagagatttatatgactggttcatgttttttactcagtattcatctcatttatagttgaggtggggtagatttatgtcatgtctcttcctaagtttgggtaaggagcagactgatgttttggacttgttattcctcatttaggtcataaaatgatttaccaagctgacatacttttgggcacctacaccaaagtaattgcattattgctttgagattatgcttttggtagaagatctagatatgacagattagtcccgtgcctattatagctaggataatcaaatgattttggattgtttgattggtaagaaaatctttcatacaagcaccagcaaatgttttcagaacatatgatcctgaaatcatttgaacaagatgtttcaattgtagcctatctttgagtggtagtgtacacttgtggacttgtgattcatatattgttatggtgcttctgttccaaagcttctgattaccactcctgggccattcacatttagtgaccatgccttcattattggttgcaaatagttcatttctggtatattgctacagccttaactaggtctggtggagaaactggattggtttcaacgaagttgtgatatgttcagaaatcatacctaatttacttcctcaaagaacaaatgttcatttctagattctctgggattcattcttttgatgttctcatcacaagtatgttatgtgtgtctagttaccttctcctacttcagaagttaatctgatttgactgtatccataggcatagactgtctcataaataatctggaaaatagttacgctcttttttatgcttcctttttctttttttctttttttgctccatctatttcctatgttgcaggactcttgaacctaagatgtttcttggcaaaacacatcaatgcaaacagggtgctggttgtgcaactcttggtgctttgttgggattgaatcgagttgtttatgtgtttactcacatgcattttattttgatcttttctttctttttgaaaaagggaaattaattatcattctgtgtaagaaacacctgtaatttggttgtgacatatatgtttgtctccgctcatttgtcaaactgtttaccaacaacttgagagtgcctttacagctgtacagcactgtgacattgcgtcagggtgagaa

SEQ ID NO: 10514 - DNA, 3271 bp, Vitis vinifera
  Intron number 3 from transcript GSVIVT01016469001 (locus G SVIVG01016469001) derived from phytozome v7.0 (chr-ID chr1 3; pos 3590531 to 3593801 reverse strand)
ctgtcttgctgagcctatttgttgttggtgattgggtaactttcttcttttaaacttcataaagttagtcataattttgctagtgcatgaacgttatctaacagaattctgagacgtgtgcatatttctggattcttgcagtctaattagaagagaattacttagttattttatctaatttgttttcctaattttgaagatctgttgctcacaagctggggcagttgcacatatcaaaacaactagagaattttttaaatgacattaaatggaagaaacaaattatcaataaatgaatccaaatatgttgaccattgcttatcaaattttgtgattttgagttctagtgtaagtagctttgtatctcaaatatgactctgcaagggagataatgttaggtactttgattgctttttgtgaagttgcagcttttctttatgcaaccttctctttctcttgatttctgttaacaactaccaattaagttttctgtagttctgatcacttaaagacagtctctttctgaactgatttttattttcttcctcttttctcaatccatttaatgcaaagtagaacttttacatagagtatgttaagataccaacttccccaaaagcttaaattgttagaatatgcacccacaatgtatatggggctaatacccttcttcacatgttgtatcatacttgcacaatggtctctcacaactttataatgcatctacacagttaaaagaagttcatacatatatagcgtcaaaaactttttctcctatccaatatgggatatcacaatcaacccccctcccctccatgcatacacaacatcctcgttgtgtcctgtaggattgtagggtcaaacaaacaaacaaaccttacagggccaaacaaactcctacaacggggatggagatgactttaatactatttgtaacaacatactctcccaactgtatagatattatccgctctaggctctcacagcttttaaacccttctacaccgttaagaggaacctatacatatataatgttagaagctttttccttcatctgatgcgggatatcactagacaaatcaataattatgaatttcagataaatagatgggagaaatgagcattaggagaaatgagcacttgagatctttaattaaacgtcgctctaataccatgttgatgttaccaactttcctaaaagcttaagttgttaggatattggcccataatgtataccaatgataactgagtatttaattatgtagttttggtttgtttgttttatggcacatgcttgaatttttgagaaactattttaatcagggtctgcagtttcccatttcaagtgagtggaaatttgctttagtgtgactgaaaagactaaatgcatctatcaaaactcaacagtatgcaaacttgtttatgaagttaactccaatcaagctgattaaaatagaaattcaaactaaagacaagggaatacactttccttgtgacctcttctatgggcatggcttatatctcaaaataagaagaatgttaatggcagaaactggtgtgaaatcaacaaaacagaataaaattaccagggttttcctagtggtggattgaatagaatcttaatcactaaaaaaatttcaaaggtccacccctggctcaaacaaccttggaaacccaacacttctgagtttctcatagaccctagggcatgtttggaatgttggaatagagaaagggaataagaaatccattccatttctcactcattattgtgtttgcattattattgttattattattattattattttagaattgtgaatagaaattggaagttcattcttatggaaaccaaatctcattctttctaagattttgatttctctcttccacatgatattatgattcacctccagtttcattctatttccattcctattcttgcataccaaacccaaagagaaacctttcggtccatctcaatgtatagtcaatgctttccatcgcttctgaagcaatcacattctctcttggagctcctgccctggctttgaagtaattaaacaataaataaggtttccttgattcatgtcaaattatttgccattttttttaatcattgtcaggttcattgttgtgtatctttgtagtgtgttttctttaagcatcaaattacccattaaaatgacagaaatcaaagctaacttgcaagctgtgtctgttgtctccatgggtgtgccaggggttatttcacaatgggcatcctatgttagaaaacatgagcaacctgccttcattgtagattaacaaaacaagaccagggtttacaagcctctctctagtctatgtttaacccattacagatgaatctgatcaatatactcccttaactcttattatttttatttttttctaatttcaatctctcttaattgcttctaattttagtctattggtcctaccctgtacacaagagaacctacaaaaattgctccttttgaagggtcctttgtgagaatgcaattatttcacattgagtatgttgtaatgcacttattatatccttctgtccctttttacctttcaatttctacaaaacatttacagttttggcaccaactgcaacaccagaagaaattaatatgaatatttaaagggtttacaaattacacttgagttttccattgcagatggagccaaacttaattgcatgggaaaattgtaaattcaagcccaccatgaatgttgtgaagaactactgaattatttgaaaaatgccaaattacttcaatatattcctgaaataataatatctgttattttctatttttctttgtgtggcataccccttcccatggagtccaaaatcaaaatcaagtgcatccctaaatcttttttaaaataaataaataaattagttgaactccattgttaacactcttgacttttgcacgatctttttcccgtttcattcctgagttaagattgattcccatgaccaaataatgcctaaacatagactctgtcaatgtgcacaatttaaccaatttgccatattgtatagcattgagatagggaggttttaatccttgtagccatcaatgtgcttcactggatactaatgcagagagttctgattacttggagaatcagattgctgtttggaatcataacatttgtttccattcttttgatataaacttaactaattactgcaataataatctaaaatgcaggtgacatctctgctctcgcttgcagctgcaagcgc

SEQ ID NO: 10515 - DNA, 4508 bp, Vitis vinifera
  Intron number 4 from transcript GSVIVT01023903001 (locus G SVIVG01023903001) derived from phytozome v7.0 (chr-ID chr3 ; pos 2575868 to 2580375)
gagactgtgaggttgaatcgacgggcgggtcggaggtggagagagtggagagggagggaggggagaggggagagagaagtgggtttgggggagagtttgaggcgagagagagaagtattcacgaagagagcatccatcgagtggcggtggaggtggtgggagtggggagttttggagggtgtgtgactgtggaatccaaggggaggaaaggatggagatttggggtggataagatattctatccattttctttttgatcctattcctgggtatgtctgcaaattagtattgagcgctagattttcctaagtccacatatattctccttcttttttttttatggccacaattttacacaattacacataataaaattttgtaaaattaaagaagcaaaaactcaagtcaaattaaagttgaaaagagaatgtaacatatattttcttgtttaaaaacttaattctaattaaatttttagaattggcttacaattagggatgcaatggggtgggttttttgggtacccaatcacatggaacggttcagtttttgtcttctcccattaaattatatataaatttaatttcatttattttttattttcctaattttaatatatagtttataataaaaataataaaataattttcaataaaataagttataaaaatttgtaataatttaattatttataaaatatatttattttaatgttcaaaaataaaggattactctaaataaataaaaatacataagaggggagtgaattggagttaaaaaaaaaaatctttttaaacacaataaaattaagaacaagaaacacaaatatatataaagagataaggttatagaaaacaaactcatatctatagtgctttgacacttccttacctacaccaattctcttcaagctcttaaccgaatgaaggttccacttatacttgaagtatcaaccaagcttctaatcactttttacacttagagttctgcttcaattggctcttacacaatctcttcaagtctccactcacttaaagattttaacactcaattaacaagtttgaatctgtcaacttagctcaacaatgactcaaatacaattcaaaactaggatgaatcacaaaggtgcactaaagaatatgcaaataaagatttaatgcactaagaaaagaatgagaacttttatggcaagaacaaataggtaaacaaataaatgcaggtgttctcttactcataaatgaagtaaaactcttaatttataagtttctaacatcgagtgccaaaaaaccaaaaagcagcctcgatcggtcgagctggggttcgacagttaaaccagttcactagccattgaagtattaaatgtttggcaggtgatcgttaccttcgatcgaacctcaaccgaacctcgactgggaagacaaatccctcgattgagaaagaaatgctactggaagagagataagattttttcatctctcgatcagaccttgatcaagaaggagtaatcggtcgaccggtaccctagttggttgagcaggttggctagtgcctcaaccggttcaccatttttggcccaaaaacctatattttttttctagtctttttgcttctagcacttaggtaatgtctttaggtaaaataatatgtcaattttgaaacaatttgcctaagatttatttgatagaactcgaattttgatggaaatgtaactttaatgtataaatcgagttttcaaatatggaaatgatatgaaaatcctaagtacacccatacattcatcttacatatgtttcctatgattaaaagatctttcaaaaatcttgatattgcattcattaggttctttgatgaatttttaaattaatacctgaaattctttataattcaaaccaattagtaacttaactatcatttgttattatcgaaacatgattaggagaatccttaggctaagaaatataattaaaaaagtttaaaatatttttttaaaaaaattaaaaatctttcaataaaaaaaggataaatggggtggggcaagtatgagaatttctcataccgccccacttggcattgtttaagttttttaatgcaatgaaaattaaaattattttaaataaacaaagcggaattgggatagaggtaactcaccgcctttatttttgacccattataaaaataaaatcaaatcaaatgtccctacacattaaagcccacacttaatgagatgcttaagcccgataaaaaagcttatttgaacactttaactagtaaaacgaaaatgatagctaataatttatcatcaacatatatgggttgactttaatactttcctaacctacaatatttatgatcgagcatagggtgcaagaatttttttcataatcatagttgagaataaaacttttataacagtaacattttttttccttttatattacttttttttttcaaatataaaatcttttgccaaaattggccaaccgtggtaaagagcacatttgacttttcaaaagtcaactcaaataggtttttttttggagtctaaatatattgaatttatctaaaatttaaacaaaaatcaataaaaagatgtttgcaaacaaatttaaaaaattatgtaaataaaatgtgcaatttaacttaaagataataattttccaaaacatgaaaaactatttaacaaaaaaaaaaaaaaaacaaaagagacaggtcttcggcctaaaagtacatattgggctctttggctcggctggagcccatttctttaggcattttcactccaaagacatcaccaaaccaagaccctagtttctttatttagaatttaaatgaaatattaattccaaaataattatgtaaataaaatgcgcaatttaacttaaagataataattttccaaaacatgaaaaactatttaacaaaaaaaaaaaaaaaacaaaagagacaggtcttcggcccaaaagtacatattgggctctttggctcggctggagcccatttctttaggcattttcactccaaagacatcaccaaaccaagaccctagtttctttatttagaatttaaatgaaatattaattccaaaataaatgaattattaattctaaaaaaaattaagagtattgaagcttccaatttttttattttttgacttataaatccaagggcttttaaacaaatgtgaaggttttacgccaagagagagacgtttgagaaggcccatgagagatattgggcttgtttacaacaacatgggctatggtgctggcaaaacttggatacatccaaccaggcccaacacaaaacctcttccacccatggttgataaggcccagcaaccctggaattggttttgggctttactataagctgaagttgagaaatgcttcataatacatagaagtgcttctttaaataaaagtagtgcttatggattatttaaataaaatttaattttaaagaagctcaatttcaacctaaaaaaagaatcaatataatttttatatatcaatcaaaatatatttttttaatcaaaattttaatttttttaaaaaatatactttagtgtaaaaatgattcatggaaaaaaatatttatttttataaaaagataaaaatgtatattttcaaacatatttaaaaatcaaacttgtcaattttcccatcttccaatgataaatattttatttgtgattttccattaaagcgcttttaataaaaacacaacaaaattggtatgacctaaattttatcacaatcacaatcacaattaaaagctactcttagctaagaatgtaatttttttaggaaaattatttttcaaaaatatttgcataaaaaaaataaggttttactttatgtttaaaaataaaacaaattttttttaaatatgggaagatatttaattggaattcaattttgaaatgttgtgattgtaacttttccattaaaattaaaaagtcattctgaatcacaaaagctaaatttcaggacaaattggaaccattaactattactattgactgtgaatttatgaacgattcttaaatttgaatcttaaattgtgtttccctaatgacacaagggaatccaaattgatacataactaattaaaattgatttttttcaataaaaaaatccttcgtaattttccaaaataaatataagagtagattgtggagtgattttgtttaaaacacttttgtttatagtggtttttgttttctttagacatatttttaatgagaaacacttaattttattatataattaaattttttttaaaaaaagaaatcatttttgaaaaaacaacctaccaaatgattatccatttttttaaaatgaatttaaaaaataaaacaaacacccaatgaaataatattttgatctttaaaacattcaaaaaaagaaaaagaatttattctaaaattaaattgtttttcaaaaaccaactttttatatattactcgtgaagcagaattttgtttctaaaaacaatcgaaaacaatt

SEQ ID NO: 10516 - DNA, 9189 bp, Vitis vinifera
  Intron number 2 from transcript GSVIVT01034930001 (locus G SVIVG01034930001) derived from phytozome v7.0 (chr-ID chr5 ; pos 188917 to 198105 reverse strand)
acttttggtttgtattgactatttggtcactaatatcccatcccttttccgttctaagcttagtttcttttaagttaaaattttcaataattgattgagcataatggttgattgagttgctttgcagctaactttaggggttgttgcttctcatgagagaattattaatggaataattctttgactgccaatggtaaatcaacccaaaagggtatttaatttttaagagtttttgattaataataaacaatttcaaatttatgttgtactttgtcgttggatcttgaagttgctattacttttcagtttgaattatttgacaaatgcaataattttatcatgctattgctttttatttttttggtagaatttacatacttcaattattttggtttggtaagtaaaacgtagtgtttgtagttaaagggcttctttgtcacctgagatgtttgtttcattgctgcagtagtataaaaactaggaaaatggaatgattctgataatttcattttgttctaaaaggttccaggtggatgccttttttgggcaggatgttttttaattttgaaaccttggtaatttcaattcgaagtgctttaaggaattctttttagttgttttcgatagtgaagaaaaatcttgggacgctataggcccaaaagtatgaaaattggatggtttgacttaatacttgttcttcaaatgctccaaactgagggttcaacttttttattgtggtattcgattttgggtgttataattgaggtgaaaggaagtagatctgatgtaaaaaaaaaaaaaaaattgctttggtagctagtattgagaaatagaccaggctacatgatttcatgcacttcatctttcatttagtgaaggattggttgttcttgtcttgtttagtggcactgaaacaaaagtattgcactgccaaactctcacaccccagtttttgcgcctatgcctgttggtcctacttatcaaatacactagcatatgaagcaagccagaacctacaagtgtacatctaaactgctaaacaaatggaatgaagtgttttcttttgttacaggcgcaaaatttgtgttcatttttttctctggctttggtagctagtataaggtttctctctgactttagcctttctgtcttcatgattgtgttcttccaaatcaacttgagaagtttcaagagcatacttcttaccagatgcagtattagatccaagttcaagagccctatcaatgagatcctcaagttgtggattgacagaagaaacatgtattccagaaatatcatctatatgctcactatcatttccattcaacatattcctctcttcaagaggaacttcaggcaaattgatggatccaacattggaggtggtcaattcattatgagcagaactaatttcagacaaacctattttacaaaaaaattgcaagctaaataattcagagtgcagatatgctgttcactcctaccttaagacacaataaaatgaaataataccaaaagaatattgaaagatgaccaacttacagtgaaacatcctgcttggctcaaagtaagagggggtactggatgttcaggcttgtggttctcgatcacagtacttgaagctccatgtagatctgcatggatatacctaattcataatcaaatgagcaatatcagaagaaacaacagggatattaagatttcagattttttttttttttttaaaaaagagggatattaagactccacattattggatcaattcatattccataataacaataatcagctgagggataacagcaagctgataaaagctgaaatcatggaggtctatgaattagataagacacatttcataaaatcatatttccctttaatcctaaattcctaaatcccatttcataactcagagaattaataacgtctaccaatgtacatgattgacatgaaaagagacaagaaagtataacttagaataaacatttgtgaagattaattcataaagcagaaaaggccgcctcccctgatgttaataggagaaacaggtctattaaatctcaaattgcagaggtatgggaataagttacgtgagtgtgactgaggtggtttccacaaagtaaatagatgaagaagaaattacctggcattagaaagataactaaaacctgtaagcttcagaaatactttcaccaaaatgctgatgactgtattacaataagttggaaattctaagtctttacacaactcttttgagtcttctcattcaaagaaagtgtccaataaaaaataaaaaataaaaaataaaataaaataccaaactaaaataaaataagtactacaacaacagacaaaaaacaaaaccaaataatagacgatcacttaacaatatttaatgaatatgcacaataaatctttttattggtttaaaacttcaatattaatttgccaagcagatgccctgaactcatctgataatgaggcattagttgctcataaaatcagaacaatttctgttgaacctatagatccctttctaacatttttgttttcatataagtgaagaaatttacgatggttcatgtttgagtctgatgtctttgagttgtgcctggcgaaatggttatgctgcttgttaccatgccttctaaatctctaaaacttgtgatatcttgtgtaatgtaacaagggcaaggatgtgagcattgagaacatgcatcaaggtttcactcatgtcttcgagtcaaccttcgagagtgtggaaggcattgcagagtatgtgtctcatccagcccatgtcgaattctcaaatctgttcctgctccacctggagaaagtcattgttttcgactacaagcccattacagtccatctctgaatcaaaaggccaatgacaattatcaattatccggccagtttaatcttgtaataaagttaatttgccatatgagcaaactggattcaggttttgttgaacccttcaaatcccagtttaaaaaaatgcagacttggaattgtggattttgaatttttttgagctaatttctttagtgaatgttgaagttgatggtcttgtttgatgatgtgaatttgaagtattaactggaagctggttgggtgtgagtggacctttgagttccttccaaaggtgggtgtgagtttctcttgaaatttcttgtaaacggagcttcaatttctctttagatcacactctcctcactgtcagtcagggcaacctgttaaagatgaagtgtatagattgtggcaaaagctcttccaaatgctaatccattagccaaatacactttgcgacttctacttatgactcatgttttgctttctgactaaaaagaagcaaaatattatgccaaactgactttaaattcaatacttagcaaaagggtgccaaaatgtgctgtgtaaggaccatactaggcaaatggtagatttattaaacaattactcatacataaataagatgagaaaagttgtctactaggtctcattattcaatcatttatatgaactaaaatctgataaatcttgactccattttataccacttttgaccctaataacaaaatgacatgtgtaaagtgcatgtcattaaaatttttacaaaaacttattaaataggtaaaaatgatgtgagaaatactcacatgcattttatacatatctaaatattacaacttttttatgatttattattaaatatcaaatataatttgttatttaatgaattgtttaactctatctaaaaaaagaaaatcctatcaactacccttatactctcattattcatatatacaaaaagggatactaatttaatttgaaaattaaatagtttcaactaccatattacaaaatatttgttttaataaatcaaatttgaagatcaaatttgaaacattttgagggagaaaatttaaaatttgtattctatgaagaagatgaaagatttcaagtatcaaatgtattatttgatattttttatttagagtttttttgtatatcttttaacttagagttttttgttccattttcatttggattgctgattgttggctttttggtttattgtttggggctctcggtgtccttgtgggattaagacccatagattctaaattttgggagtaatgtctcaattttctttttatttttattttttttgcgtaaagatttcactttggatgctagctttactcttctttaaatctaggcgtgttccaagtaagttgcacactctcaaagtggaaatattcgcataggttagaaaagataaataattactatgaaacatttttttttcttcctaaaagaatgaaatattccactaaaacaatatttaaaatttgtgattcgaaagaaatatttttttccttgaaatttgtaattaatgaaatgcatgcataaagcacactccctaagtgaaaatatttacataggttaaaaaagataaataattactataaaatattttttttcctaaaagaatgaaatattccactaaaacaatatttgaaatttgtgattcagaagaaacatttttttttttctgaaatttgtaattaatggaaatgcacccaaaaagcacaagaaaaaaaaaactatgaaacacattttttttcctgaaagaatgaaatgttccactaaaataatattttttaatattattcaatattttttaatttttataaaagaattcatcatattatataattggatgttgtaaagaactaaaacttctgtgttgcatttgattattttattttttttggcatgggagttgatcggttggtagccacatagcaagttttttttttattttttattcacaaccctaacatgtggcaaaatgctattggtggaggattggaggtatggtaccgaaaagcatatatgggtaccaaagcatgacctaaaaagcatgacctgaaaagcatatgccaaaaaaaataccattggtggaggattggaggtatggtaccgaaaaacatatatgggtaccaaagcatgacccataaagcatgacccgaaaagcatatgccaaaaaaacatgtttcctttgtttttgactttttttccactgtttagagaacaaaatgagttattctttgtgtttccaatccttcgttctcacattccttgttgtcacctgtgaaataatcctcctctgcctcatcttctctcgttccagcccttccatcaacattagagagtatcttatttcccttgtttccattagtctcctcatcttcctcgcctcaatcactcgcaaaatccgatttgcttctatcaacgccatcatcaatcctagtttctattatcaaattctttaaagatcaatagtaaccttctgctgtaagctttaaacatcatttctttttttttttttctttttttttctatataatgttttgtttcttcattttttcgttttttttaattgaaaatttattgtttacatagttgataatagaaaaagattttttcttcccttttatccactccatttcttaattaattctcacaagctttttctttacagcaccggtcacaagaattccaaccctatcaaatatggagccccaacggtatttatattaatttcaacattcttttattttcctttataaatcagtataaattaacatattacttttattttcagagttattcaaataaaatcaagagaggagttaagagatgagatccacctcgtcgcccttgatagcattgtgagtcttacacagggcctcgataacattgtgagtctcaacttcttgtgtgttgcctcttcatttttgggactctcccttaccactatagggttgcgtagcatggatggtcatcttgactgcgatcccaatataaacacgatcaagagcttgatgttatttgaggtcatttccttcgccttttttctcacatcatcattggtggcttatgacttgaagataatgatcagtctcgtcaatgctgcagaattaaatgaagagtttagaagccacttcaacagaaaatctattcgaaaagtgatgctttgtgtcatcttcagctcaatcttgggatgtctttttctaattctctcaatagtgtatatcctccagattcggttaggaattttgagtcgtaagagtccatctacagtctaatgagtggttgctcttgttattattattagttgtggtgttattttccatgttgctattactatctcggcgtttttatatgtatgatttttggtttatattagtatgtatgaaacattattaatgtatttaattagaatatgagtatttaggtttgtttgttttcatctactgatatgtatgacatattatgaatgtgtttaattataatatgactatttggtcactaatatcccatccctttttcattctgagcttagtttcttttaagttaaaattttcaataattgattgaatataatggttgattgagtagaatattgtatggttgtgaattattattacttttgctctttcagctgcccgaccgcctcaaggtcattgtttagtgacatttcctatattttattttatatattttgaaatattcacataggttagaaaagataaataattattataaaacacattttttttcctaaaagaatgaaatatttcactaaaacaatatttgaaatttctgattcggaaaaaacatttttttttcctgaaatttgtaattaatggaaatgcacgcataaagcaaactccataagtggaaatattcgtataggttagaaaaaacaaataattactatgaaacacatttctttttcctgaaaaaaaatgaaatattccactaaaataatattttctaaaattattcaatatttttcaatttttataaaagaattcatcatatcatataattggatgttgtaaagaattaaaacttttatattgcattggattattttattttatttttgcatgggagttgataggttggtaacccacatagcaagttttttttcctaaaagaataaaatattccactaacacaatatttgaaatttgtgattcagaataaacatttttctcttgaaatttgtaattaatggaaatgcacgcataaaacacatttcctaagtggaaatattcacataggttagaaaagataaataattattataaaacatatttttttcctaaaagaatgaaatatttcattaaaacaatatttgaaatttgtgattcggaagaatcatttcttttttcctgaaatttgtaattaatggaaatgcacgcataaagcatactctataagtggaaatattcgtataggttagaaaaaataataaagaattaaaacttttgtgttgcattgaattattttattttatttttgcatgagagttgaccggttcgtaacccacatagcaagttttttttttcctaaaagaatgaaatattccactaaaacaatatttgaaatttgtgattcagaataaatatttttttccttgaaatttgtaattaatggaaatgcacgcataaaacacactccctaagtgaaaatatttacataggttagaaaagataaataattattataaaacacatttttttcctaaaagaatgaaatattccactaaaatatatttgaaatttgtgatttggaagaagcattttttttttcctaaaaatttgtaattaatggaaatgcacgtataaagcatactccataagtggaaatattcgtataggttagaaaaaaaataaataattactatgaaacacgttttttttcttgaaaaaaatgatatattccactaaaataatgttttctaaaattattcaatatttttcaatttttataaaagaattcatcatattgtataattggatgttgtacagaattaaaacttttgttttgcattggattatattattttatttttgtataggagttgaccagttggtaacccacatagcaagttttttttttcctaaaagaatgaaatattccactaaaacaatatttgaaatttatgattccgaataagcatttttttcattgaaatttgtaattaatggaaatgcacgcataaagcacactccctaagtggaaatattcacataggttagaaaagataaataattattataaaacacatttttttcctaaaagaatgaaatatttcactaaaacaatatttgaaatttgtaattcggaaaaagaatttttttttccctaaaatttgtaattaatggaaatgcaattattttattttatttttgcatgggagttgaccggttggtaacccacatagcaagttttttttttactaaaagaatgaaatattccactaaaacaatatttgaaatttgtgattcagaataaatatttttttccttgaaatttgtaattagtgaaaatgcacgcataaagcacactccctaagtaaaaatattcacataggttagaaaagataaataattattataaaacacatttttttcctaaaagaatgaaatattccactaaaacaatatttgaaatttgtgattcggaagaagcatttttttttcctaaaaatttgtaattaatggaaatgcacgcataaagcaaactccataagtggaaatattcgtataggttagaaaaaataaataattactatgaaacacatttctttttcctgaaaaaatgaaatattccactaaaataatattttctaaaattattcaatatttttcaatttttataaaagaattcatcatatcacataattggatgttgtaaagaattaaaacttttgtgttgcattggattattttattttatttttgcatgggagttgatcggttggtgacccacataacaagttgtttttttctaaaagaatgaaatattccactaacacaatatttgaaatttgtgatttaggataagcatttttctcttgaaatttgtaattaatggaaatgcacgcataaagcacattcccaaagcctctcataaaccctaaaatcaaaccctaaacaccaaaaagaaagagataattttattttatcaaagggatcctcagcaaaaatgcttgtaattgtcatcagattagatgatctgccatcacaggaacccacggaattacactaataacaacagaaaatttttagtaaaatatttattgggaaaaagataaaccca

SEQ ID NO: 10517 - DNA, 4946 bp, Vitis vinifera
  Intron number 1 from transcript GSVIVT01021307001 (locus G SVIVG01021307001) derived from phytozome v7.0 (chr-ID chr1 0; pos 3788235 to 3793180 reverse strand)
aacgtatggttcttcttcctgtcaatgtattaatcctgtaagttctgttctacaacatatggtatgtcccaagctcaaatagtttccctgtagccagctggtagccacaaaaaggaaaaggggaaagttttgttttgttttgaggtttgtagttgattctgtgatcaatcttgtctacccagaaacaggacatttagacaaggtctggaagtattcagaaatgaatattttttatgggaagtagtacttatgtctacattgggacccaaccagttggaccacagactaacccgtggcccaaaaccccatattcgtgtgttgagcccatgggatgcttggtgagcccatagtgttcttgaaattaaatttttgttgtttaaaatagaaaatagtttttaactgagaaaatatgtttggcgtgcttttgataaaaaatagttttttattcggataataggtttatttttggaataaatttgagatgtttttgtacacaccaattttcccaagtaagaaaattttggacaaagttgtactttaataatacatttataatttgaggggacaatctctaatatgccttctaattattcttacaaaggcaaacacgttttttaaaataattttaatgtttaattttgaataaaaagggtttcataaataaatcctatagtcatccaatgaaaaaaatcttcaagtcttcaaatttcttcgaaaaatcgtcaatgacttcaatttttcaaaaaatcttgaattttaatgggatttttttaggggctttaaaaaatttcctgggccttcaaagtgtgctttgagacgggagaaacctttattttgatattatttcttgattttctagagatagtaatttcatttatgaggataattattatttatttaaattatcataattatgatatttatttgtattgttacaattaaattttactttaatgttattgattgattttctaaagataattattttatttattatgataatatatattttaattattataattaattaattataacgattataatatttatttgtattcttttaaatttagagttttttttttgaaacggagtgtttgcatattattagaccattattgatatgtgacaattaatgaatccataaaacttgtacctctaccattttcaattgttttttatcgagtgttttgaatagcaattgacaagatgaaaaatattactgaaacgggttcattatacataatgtgtagtaattttatgagtaagttcagaaaactattctttatatttgagtttgtaaataaaattttgttccacaaagctaataaatttgagaattgtttttgaaaatgttccactctatatttgtgacattttatcggtattctttctacctcttttgtgatactattttttttacctcttatttacatagcaagtaatgattaaatatcaaaattggtagtaatgatatgaagaatgggatatttttattattagtctaattaagaaattggacatcatctaagaagctattgcgtaaataaatatataaataaaatgggtccaagcaagaccactcaatagaatatagaatatgtgtcatactctatctagaacatttgtaagtccatataacccaaattaatgtaagaaagggcccattttgtggtgtttttaaaatgaagaacaaaaaatagtttttaaatttttttaaaaaataagagtgtttgaccatatattttaaaaaatagttttttaaaataaaaaccaaaaaacttgtttggatgaaagaatttgtattgtttttaaaaataatgtcttatttttattttataattttttaaagttaattaataataatatgaaatcaaattcaagtttaatcttattaaaatataaaagttagatctacaatcacatatgagttaaagataaatatatatatatatatatatatatatatatttattcatttattctagtgaaacaaaaattactataagataaaaataattttaattttcatttttaatacaagtcaaatacgtactttcattattattattattattattattttaatttcttgtttgactatgatttcttatacttgtttttagaaattgtttttaagttaaagaactaaaaagagttttttaatatttgattaaaaaaaatgtatttggcaagctatttttataagaggattttaaaaataaagaacaaaaagacttgtttggataattttttttaaaaaatttgttttgattttgtaaaaacatttaaaattcaatctatataatattaattaaataaatttcatggaagtcttattgaaaatgaaaataattttgtaattatgaataaattaaaaaataaatagtttttagtaaaacttaaatagtaatattataataaaatcataaattatatttttagtagaaaatatactattttattatatgttagaaatatatggatattgacattttgcattttattttattatatttgttaaaaatgaataatactatttgtcaatagtatttgatttaaaatgaataataaatacagtgtttattttttaacatataaatgagcctagtttttttattacatacgcacacatttagtactcaattttgaacataatattctgaaacgttttgatttaatgtacaactagttggatgagttcttttattgtaaattatgcttaaaaattaaaggatttattacaaaattaaaattattaattatattttacttaatttataatttatttagttagtgaggaaaaaaaaatagttgtgtgtataggataaataataaagtcatgactcatgttatatcaactttcatctcttattttttttttcaatgattatatctatttttgagtttcaaattatttttaaaaattgttaaactcattaataaatttaataaaaagtgtcacttgatttgaagttcatttttatggtggaaaaaaaaaattataaagtataattatgtgtagaaaaaaaataaatagagtcattataaatcaatttttatccataaatttatggtattaataagtttattatttgaattttaaattattttaaaaaattgttagacttgttaatgaattcaacatattaagtcttatttaatttggaggtcatttgcctagtgattttttttaaaaaaataataattttatgtagaaaagaaacaatatagttgttttaaaccaatttttgtttataaatttatggtttattgagtttattatttaagtttaaaattattttaaaaaattaatgaacatattaataaattcaacgcagtaagttttattttatttgaagttaataataaagtaggtgtgtttttctattatttttaaaaaccgataaaaacaacttttacttgtttcataaagttgttttctatttcattatatttttaaaaattgaaaataaagaacaataatcagtgctattaaaaactgttttatgttttaaaaaacaaaagatgagttttaattttcatcaaaatttattgatatataaaggtctctcatcatcttctatgtcaatcacgctcttggaaaaagttaaataaatcatagactatacctttgtaatgaaaactaacatcaatggagataaataaaaaatattttacacctcttctagatggagatcatccttgaagttgaaaaagctaatttaaaatctttgttgactgaagagtcaagaaggaaaggaatgaagccaagggaaagattggacttttgtatgcatcggtgcatttgaataaaaatgggacaaaaaaggtttggttaatatgcatataatatatgaatgaagatgaccatagccatgtgcacaacgtctttaacaaatgaaactacctaaaacagaatagtcttccaaaagtgatgggaggaggaccaattaaaatactcttcatgctagctagctccttccttttaggcctcccaactccacttctctctctctctatattgaaattagagaaaaataaaagaaaacacataaatttaatgtgattcgacaaattgcctacatcaacggaaacatgaagaaagactttcactatatcaaaatttgagttacataaccaatttatcgttcacccttaacaataaaaatacaaacttgaatagcaaatattgtcgtttcactccgtttcacttcgatatttgcccaattttctttatatatatatttcactcaatataagccgcatactacaacatgtatctctcctaaataaataaggcatcttgtatcccatttaacccatttaaattatgtcatatttaatagtcaagtttatgtatatgtctctatgattaatgtttcaaccatgtttataactaaatcgatctatttatttaaagataaatttaaaatgaagttaaatggtttaaaaatataattagattaataataagattcttagataaaccaattccaattaaattcatgttattcagattgacctagaaattatctatttattaaataggttatacaagttaacatgaacccaattaaattatatattattattactattattttatatttataatttttttaaaattaacatataatatattatttaatattgcaaaaaattaaaaataaacattcatatgaaatatataaaattgtaaaattaaaacaataaggattccctattagcgatagggaatttattcccccaatgggattctccgtccagtctagtctaggacggagaatggggcagggatgaggaataattttgaaaaatgggacagggacaagagagccttcctcgacccagcccctcctcgcttaatttatatctctattggcttccatttcctcgcaccatatccgtaagcctcgccttacctgcctttccttttctttcct

SEQ ID NO: 10518 - DNA, 2205 bp, Vitis vinifera
  Intron number 15 from transcript GSVIVT01027385001 (locus GSVIVG01027385001) derived from phytozome v7.0 (chr-ID chr 13; pos 15446004 to 15448208 reverse strand)
ttcaaagcagcaggtcctgctggaggaggtgtaatgtgagtgttctcttcatttcattaattttgctgttatattttcactatgatgcctggaatccataaaagctcttactcagggttatgaactgttcaaatcaaaagaatgagttccaaaaggtcttgcactgaagtttttttagtcttatttcactatttattttggaatattagaataccagcacatcatagattcccaacgactcagaaatatcattcccatctccatctttgtgggaaggcaaaaatatggagtatagtttgggagctaaacttaaggatcgctatactttgttcttactccatattaaaatgaaaacaaaattttgagatcttgctttgatccttgttatgcttaaaagttagaccttgtcccttgtcaaagaccgagaagcatatgaattttgaatcgtcggggaagttgattgtcaatatcgtagataataaaagtaatccacaaaaataaataaataaacaataatattttacatggtttaataatgtatttacatctagaaggaggatgacaaaaactcagtcctaggtgctgatgaaagagagttccaaaaaagcatagatataactactaatatgagaagattcaatataatcaccgataaaatataatcttatttatatccataattttaggatctatcattaaatcccataattttattcctttcttcttgtcaataccctccaatgagcttgacttggacaaggccttatgaagtttggttaaaaaggggccttaagattgttatccacgtcactgaaaaatatatgaataataagtatgtataataaatatacaaataaaatgaagtagaaaattggaacttacgaataaggttgattaaggctaaagtttgactttatgtccttaaaacaaatttgtctcactcaagtgcttatggtttattaacaattgtttcctaagatacaataataattttcttgtaataggagcacttcaaataataagaaataacaaatcacttggtgatttgtactcttttgtgtgccaaatatttggtagaaaagataaataactagatttgaagttaaagaggacttgaatgacaataaaggagaaagagtggagaaaatgaatgaaaaggccataggaggtccctatttataaatttgatggtaacctttagaagagaagtgtctttaaaatactagatacatcctttgaagggttgtgtcttaagacaccaaacacatcctttggaagaggttgtgtcttttaaatacaagatacatactttaaaacaagttgtgtccataagaaataaaacatcttccaaggaaaaaaaatcctaatttttattcacctatacgaattatatagcatttatttgatttgctttcaatccactcctaggatattgacttttgatgccattgaaccatctaggaaattatggacttcttaggttatgtttgattcttggaaagtactaaggaaagaaaaaatgctaaggaaaatgattttatcatgtttagttgtcttagaaaaaattccaaagaaaattaaatataattaaatttagttagaaacttatacatttttaaattatttaatctttatattgatgagttaaaataaataaaataagtttaaaataacaaacaaaaataatttatcaaatttaattcaattttttattttttttcattttttctttccctctacttttactctttattttctttcccttacattttccctcaaattttctgaaaaccaagcatactcttactcttctacactagttgattccttgtcatgtttgcccatcatttcctaacacaaaaggtttagatatcgacatcttttttattgctttccctccttccttaacttgtatcaagaatcctgttgttctactcatagtgcaggtttgcattgggttagtggcctatgaaagctttgatcccaatgatttagtgtagatagggagtcatatttagccactttccctaaatgttgtctcacttgatttcatcttatccaaattatattccatttattttattaaataacaattgctttatctaaaagttgtttttccttctacaagattgtaccatttggttatttttaatgatgctggtatttgtagcttttcttgggcacaagggcgtcagagagctgcct

SEQ ID NO: 10519 - DNA, 980 bp, Vitis vinifera
  Intron number 1 from transcript GSVIVT01032818001 (locus G SVIVG01032818001) derived from phytozome v7.0 (chr-ID chr1 3; pos 507402 to 508381)
gcgacattaatcctccgctctcgactgctcttggggtaattcttgattttcgttttcattttttttttttctgtactgtgtttgattgtgaagaaatgaaaaagaattcagaatctgaggatggaaaaaggtgctaaaattagctcaaatgagttgaaagacttgcgctgggcttggttaagtgggattttctattctttttttttttttctttttttttttgtagggtcctaaattgtgaatataattcagtttaaaattttgatattctgggaaagcaaagggcgtctttatcgtttgaataaattcgttagatgtgttgatcgagctgattcaatttccgttaagcatacgaggtgttcttatggtaatactggcttggtttagttcgatctgctttcaattatctgtctaattatttgcattccattttagttgttcttgccttcttggtatagttggttattggtgattgccgtgctatattcttcaatattgtggtgggcgaaaggcaaaatttaattattggttctttttctttaagatcgaagtaatggtaatgatctatttttacttttatggaggatgtcatgggaactgcttagaattaggcattatgcactcatttgtgtaagcaactcatagtaaaatcctaaggattcgaggcttgttagacagtgcttttcacaatatccaaatatctaacccattaattgatgggcatttgattttctgaaacatgtttaatttcacaatttctcacttctgcgctagaaagttcactattagttcgatatgcagatcaagttagaaaatggctttttagttgttcacagaacttgcggtgaaatgtaggggagatttgttaaattgtttcagttgcatcctcacctcaattgatattattttattactacaacacttcacggtatatttcgtattgtatatttcataataattttccttgttccaggtgcatc

SEQ ID NO: 10520 - DNA, 1990 bp, Vitis vinifera
  Intron number 1 from transcript GSVIVT01012177001 (locus G SVIVG01012177001) derived from phytozome v7.0 (chr-ID chr1 ; pos 751904 to 753893)
ccatcgatcttggcggttagttagtgctctcttcttctgcgtcttcttgttgttgatactccattaagccctgtttggcttctcagaaaattttggaaaggaggagagaaatccaaattttgtttgtaattaggtcatcagaagatttcgttgttgagtagaattcttaacttgaggaaacgaattttgtttcttttcttcttccgatttctcggcagccaatcagagggctgttctgtggttctaatttttttggttttctttgggataaaattggtgtattgttgaactgatcttgcctgttcaatacaggctgaaaattcatcagttattaattcaaattgagttgttgttgcaccgaattttcgattctgagtgtgaataattttctaatggagcttggtagtggatcgaccactagcagtctgtggcagaatctgtgtgaatgatgatatactgtcaaacagagtatacacaatcaaataccggaacgatgacggggatttgaagtaagaaaacctaaaattctacgaaactaagtaataaatgtgatttatcagagttcttgttcttgaaaagttaaaaggtgattttcatccatcagttacaagctaagttgttggccaggttaggctaggttattgcttacgaagtacaaatttggctaagtttaatgtaaaactaagataaagattcacaaggagtacagtttagttctctacagattcacaagcctactacttatcttaccctgtgcaatggttcctttatcatagccaaattttatctaagtcggagccctttccacatgctaatttttacatgaatcaactgcaagagttttggcttgtaactggaagtaagcaattataaaaaatatttgcacttggtagttaatgactagctctctctattctaagtttggagttcaaggagtcttttgatttgttactgaatctgacaattttaaacctgcttgagatgtgcactataatatatttatgcatgtaattgtattctagaagaagagttggttatattgagaaatatgaaactcatttttttctttttcttttccagcatctgtgtttgttcttatggtgttttctagttagcacacatattttgtcgaattaccattttcctaaaagtttaaacttgcagtatttgggaccacaatgtatattgtgggctccaacatcttccctcacctgtgactctatactagggtggagagacacataggcacacacaggtctatagataaataaacaagaaacaacctcctttggacttaataaagtagggaaataaacctacggtgagatccaaacacatgatctcctaccaaacaaggttttgataccatgttgaactactaattttcctaaaagcttaaacttgtaggatttggacccacaatatatatcatgcactccaacatacttgcttattaattgatataggtcataataccatttaaaccccaacataagccaaaattttgccctacaaatgagtttgcaagaaaaaaaaaaactaatgcaaggttggaatttatcatatatctagcttcatatttggttaaggtggtttggataaacagtttttaaatttatgaactgctgaaggtgttcaaatgactctgaatgctgccaatctcattgtgtcagtgacttcattttcaaaatctgtatttatataattcaccttgaaatatccatgtaaatcacgtttttggccatcacaagtttattattagccttttcgaaatattttcaagctgcatctaagtgattaaaaatattactgattttgcactttcctaatttacttttatgtattctttagtgttatatatatatatatatatatatatatatattcatatttagaatgttccatatagctcattgcttatattatacatgctggctaaaattatttatttgcttgactgacactgagaaggcaatcgagccacttgcag

SEQ ID NO: 10521 - DNA, 6225 bp, Vitis vinifera
  Intron number 1 from transcript GSVIVT01021824001 (locus G SVIVG01021824001) derived from phytozome v7.0 (chr-ID chr1 4; pos 6901580 to 6907804 reverse strand)
aactagacataatagaatttagtcaatttcctcaagtgcatacatcttagcttgcaatcaatttgttagtcatctgcaagtaatgttgcttgtgaagatcaaagattgattagaaatcagagctgacttatacgatgttcaattaagattggatttgatttctatggaaactatgtggaatgggtattttgaataaatgggtttcaatgatagtcttgatcttcaatcgactctacctaggaatggaagaggtggctttggaggtgtgattggatgtagaatggttggcctgattcccataaattaagtgaatgagccaatccactcatagtaaaatcattggagtcatgccacaagataatattatgcatgaaaatttaacaatgaaagaaaactttggttcaaggtagggtgtagaccatccacggactcgccaaaggcagaagctgttcttttcattgaaaaggttattaagcccttgggatgacaaatcaaagaagtgtctcaaatattggatctacatggaatactatatccatcattaagtgattcctataatcgattgtcagtataacctactcttaacaagaatcttgttccatagaaaatgatatgtctagtgagactatgtgtgactggattgatgctaaacgctaacccatgtaagatttcatgttgccattgtggagtttaagagcctctcagaagatattttttgtccatgtactcagtaaccatcatgaaacactcatctcctgcatgggaataagggtgaagcgactagcttacagactcctggagaatgagcagcaacccagggattttgatatggaaatgtacatgcttacctaccccaagcccccattccagcattggccaccctggtgtacatcttcgttcttctaatacttttattttccttatgatcttatatgttgtaaataagtcttcaaaatctttttactgaaataattctcagtttttaaacttcatccattcccttctagcatgcatttacttcgtttcttttaataattttccctttttctttatttttaataagcatgaatagattctctcattctagaaataatagaattttagatgattaatttatgcaagataaattgtgcaatggtggggcccaacatttgtggcactcttagttccaattgttatacttgattgatgtgtattgattttaccttgctacatgatatatcttaaactggtcgttgcacactaatcctatttttcatgaagagatcaactcactactcaggtacgcttacttttctctctcgttcgtttgtttattcttcgatctctcattcctcagtatccattcacaagttagttaattgtcatacttgtctaactgattagtagagactcattcttaagggcttagaggagtattacagtttatcactataccttcccaataggtaaaatgaccttcgaatcccaacccggttttcacaaaccatattttccttttaggagtcacacctggggttttctttcttatttggttttccctttaaaaaaataaaataaaaataagtgacaactccaagtcttttctaaaaatcaaaatttatttttatttttattttttcacaaataaaaagcaaatcgtaccattgaatggagacacatgaaaaatgaggggtccacaatggtacattattatatacctttattttgctttttttaaccattataaaattttttttttactacaatattttcttgatagttttatttgtaaaactagtaatggatttatgaaatttatttaataaaaaatataaaaatatatttttattgtaaaattaaacatttcaaaatttatgaaatctatataacaaataatatatttactttatatttttaattattggaatgaaataataattttacaaattattatattatatattattattattattattattattattttggataagttatttataatatttttaaaatgataattaatgaaataataatatataattaattattatattatttatacgtattactattaatattattctaagttgatagattattgatgatgatgacaacgctaataataataataattagaaaagacaaagacatgaattgtagttacgatacttaatattaaacttacagcataaatatacaaaaagtacaatacattaaatatgccttaatttcgtttttttaacaattaccaaaataatttattattataataattttttaattattatattataaagttaaataactcaaaatttcttaaatctatttaataatatatatatatatatatatatatatatatatatatatatatatatatattaatattttcttatgagatatttataatatataatatttttttaattattgaaaataattaatgattaattattatattatttatatgtataatattaatattattcttatttgataggttaataataataataataataataataataataatatattattattattattattattattattattattattattattataaaagaaaaagatataatagagaaaaaataaggatatacttgagtaaaataaaaagtataagggtatatttgaaatttgtatttaaggcttttgaagacttatcatcgtagataacccttgcctgtcattatcacactcaattcactaattttccctataacactaatggggtgtcacatgttggacgtagggtgtacgttagcatgtaaaatatgagtttaaatatttaatcatgtactaagaaaaagaataaaactgagaaaatataaagtaaggatatacttgactttaaagtgaaaaatatgagggtatatttgacttttgaattttaaggtcttacttatcacattcactccacctatatgataatttcccctatgtaaaaagtatgacgaaatatttgacatttgtattttgaggccttttgaaaacttatggaagcagataacttttaccaattattatcacactcaatccaccctatatggtaatttttcctacatgaaactaacgggatgtcacacacataaggtgcatgttagtgtttaggatttgacttttggattttgaggttttttcctagtagataaagtggggatatacttgactttaagatgaaaagtatgagggcatatttgacttttgcattttgaggtttttttttgtagtagatagcttttattagtcattatcacattcagtccaccctagatggtaattttcttatatgaaactaatggggtgtcacgtgttttgcatatagggtgcatattagtgtgtgagatttgaatttaaatgtttaatcatgtgctaatgcgttcattaacttcatatttattatatttgttcaaattagaatttaccaatatgtagaaataatttcattacttcaaagctagatcaattattacatcgaagtcagataaatttaaataaacttagagaattaaaataacgcacttcaccatatttctaaaattttgaatgaaataataaagaaaaggaaaactagaggataaaaaaggtttcagttatttaattgaaaaaacaaaatgattaaaaattaatcaaagtggtatctccatttcctctatcatgctaatgtgaatgcattatcaatttaatttttcattcattttcttgagtcaacctttttttttttttgcctttgcctttgcctttagtttgctacctttcaaaagctttttcttgataccattctccatattcatggcagtcttggcttcctattactttccaccggtctacccatgttggattttaattcaataatttattccattttcataaaaactttcagccattttgatcttagattacttttgtgaaacctaaagaaaactactcttttgaaaatcattctcaaaccaagtccctaagtgcaccactataaataaatatgaacctattaaaaaaatgttcttatttaaaaataaaattaaacctatattcctcgttcatttttaagataatatgaaaatgtaatattacttcaaaatcatataagcttttaactcatcattatatttgaggtagttctagatattagattatttaatgtttgaaaattaatttttataataaataattatgcatattgtatttaaataatatataaaatgatataatataccaataattcaattatatttcattacattaatttagcgtttgattgcatatttctctctcgatagcaaaaagtttctttcttatcaaattgacatcactacaaaagctgtggtaaaataaaactgatatcaaaatagattaaaaaaaatgtcataaataaaattgttttgggagtgcattcaagttgttttaaaggtatatatacatacatacatatatatacatacatacatatatatatatatatatatatatatatatataaactaaatgatcttaattttaactaaatgaaggtctatgtaatttctttacttaatgctatgattaaggcaataaatgattatgttgaagagtggcgtagatggaacgagtggcgtagatggaacaattattattttaattattttcaaataaatgtaataaaataaaagaagtagaagcaatgaaaagaaaataaactaaaatgttagtagaaataatatgatattatttcattaacaaatctcgcttttgtaaaatttaaatgattgcagaaaaaaaagaatataaatatttaattatgtactaatgtctctctcattttgtatttattaatatgcaaaaataatttcattacttcaaagttaaattaattattatttgaaattaaataaatttagatagaagttagaggactaaaataaattattttatctccgttctaaaattttgaacaaaataattgagaaagcgaaaactagacaataagagaggcttatgtcaattgactgaaaaaacaaaattattaaaaattaattaaattatcccacgccctaatgtcaactctctatccattcaacttttccttcgtcaagtcatctattcattaacaaaatgcaccaccttaacaaaatgcacatttggattaatgtagatatcaaatttaaaaatatattttcattgttgacatatccatgaaatattgtttttaaactttaccttgttggacaaggttttttagagaagctgatgagacacttacaactttgtaatattctaaccatattccaagcaatagcccctcaataaaagtcagtcaacatctttttttcctggaaaaaaatataaaagaaaatcctccggatgcataaaaaatggatctctttataagtgaagtttcatgaaatagaagactatgtttgggaataaaaaataaatattgaaaattattttttaaaattttatttgatagtaaaagtgtatttgaaaattttaaatatttttaattaaaataacttttagtaattgtattttatttttaatcattctcaatataattatttctgacaacattatttagaacataaacgaaaacaacttaaaacgaatcaaagatggtatctaaaaatattatatttttattttttaaaacaaaaagtcacttttgattttataattgtcagatgtatttttttattattttatttaaaggaagaatattgtttttaaaaatagttttcaaaagacgtaaagtcctatttgattactattttagaaaaaagttctagaaatttattttttaacattttataaaataaatatttattttataatattttttttttattgatatattttaaaaataacttttatatataacattttcatggaggaatagtctatgaaacatccaagcttattcaccacctacctccaccttaattaacaaaatgtagatttcgatcaatgtagatatcaaatgtgtgggtgacggggtcaatgatttgttaaaagtcaatactttgttttaattataaattagtaagtagaccccatgaaatatttttatgctttaccttgttgaagttttctagagaagctggtgagacacttccacgtttgccatattctaatcatccaagcaatagccctcgataaaaaaattaatttgcataaaaatagaaaatcatagaagcctccatcattacgcatgaatactggcagcgtaaacacaggagc

SEQ ID NO: 10522 - DNA, 11000 bp, Vitis vinifera
  Intron number 10 from transcript GSVIVT01018143001 (locus GSVIVG01018143001) derived from phytozome v7.0 (chr-ID chr 5; pos 7009327 to 7020326)
gttttattgactttagggtccactgctctaatgtattaagttatatgcagaactcgacccagtctgcatttccattagtatagttccttgatgcaaatatgcagattcattatttgtactgatggaaaaagcacatatagtgctgttccatgtgataaatgcaacactttctaatttgttagaatggacttagaagagaatgtttctcccaaaaactgtttctcccatttctcattttgttgggttgagtcgtatcaaatcacttgggcaccaaacccaacttcaacatctcccatttctaatttgtgttggtttttaaattatttatcaatttttgaggttttaaatttttgagtttctaaagcaataagttgattttgaaggctttgaaaatattgggttagggctgaaacggtttttccatatgcatattataggttttgattaagaaaatcttatagttttaaagaccaaaaattatttataataacattgtgttcttaaaaaggattcacgtattgtatgtgtttttcttaagaatgtacacgtgtgagcttaaaagtcaatcatggatatgagaaaaacctcaaatccattctcatggttccacaaataagcacctagaccctaataagaccgaataagatctcagttgatattaaaaaaaaaatgtatgtgtagacccccccgaggagcaggaaaagttctctttgatgatgattttttgctgcttttctgacggctctcaagtgggctgctctcggggtcggcgagatgggatgggtagcagagagcaaggaggggcttgttgaggaagacaccaacggaggagaaaaaagggagaaaaggtggaggatatctgcaggggggaagaatgagaaaggaaggacgggcaggctttggggatcacatttctattagaaaggggagctctctcaggtgcgggtttcatgagttttcgatccatgtcttctgaccacatcgtgtctcatgcatttttctggtggtttagatttcatccaatgttgggatgcattttgctttgctatactctcatttgtttttttctattatttcatctctgtttttgctttgatatcatttgagaatatccattcaagggtacacactttgcaatgtaagaaatcttgcaaagagaagagcttaagagctccatatgcacactaacagcattaaaagtggagatcctttcaatatattggataagaaacggcacacagcaatcatgcatggccatcctcgctgttctcataccttgaaacattcacacccattaaaaccgtcctctacccttctatcactcatacccattaaacccattttctctcactacctctcttgttcatccctaccatgcctgcatagccaccattcctcattcccctcgcacctcaagtccgtcaagcccacccttctctcatctctatcgtttctttgcacgtgcatggagtcccctgcacatagctaccccgccacctcccgcatgcatgaagcccttgtagccgaggagaagaaggagcacgtggatgcgtcgggaaggggacgcgcgtcagcttccgttctctggcagcttttccgacatggtggcgtcgccgctgccgccgcggtgaggtggctgtcggtgctgaagccaggcgcaggggagaggaagctgggaagaggatgaagttggttttttgggcttgactaggtttgggcttgagggttgttggtggatttgggcttgcccatggtgttgggtttgggtttaagtgggagcctagcccaagcaagctgatggaagtcaatgtcttctcaataaatgggttgtgacggtgatgggcttgggcttgggctttgctgatggacttggactagaccagggttgctagggtgattttattattattatgggctttgggcttgatggatgcatgttatcatttgttattattattattaattattgttatcattgttattattattattattatggttattattattgttattattattattattattattaattattattatcattgtcattattattattattattgtcattattattattattataattattattaaccattattatcattgtcattatcattattattaattgttattatcattgttattattattattgttattaacattgttatcattgttactattattactattgttattatcattattcttgtcattattattattattatcactatgattattattaattcaactctcaaaatcttattactattattattacctcaactttcaaaatctatttattcttattatcatgaatccaaactttcaaaatcctactattattattactaactcaactttcacaaatctcattactattattattattaactcaactttcagaatctcattattatcatcattattatttcacactttcaacatctatttattattattattattatcatcattaatccaaacttccaaaaaaatctcattattattattattataaactcaactttcaaagtctatttattattattattatcatcatcaagccaaacttccaaaaatctcattattattattattattaattcaactttcaacatctatttattattattattatcatcattaatccaaactttcaaaaatctcattattattgttattattacctcaactttcaaaaatctcattattattattattattgactcaactttcaaaaccttattattattattattattattaattcaaactttcaaaaccttattattattattaattcaaactttctaacttccaatttccaagcccaatttataaaaattcaaccttcaaataatatttcaaaattccgatctttaaaattcaattccaatttccgaaaattctcatactcactttaatctatttaattattattattttatgtattataaaattccactttaaacaattctttaaaatttccgactttcaaatttaatttctaattccaaaattccaatattcacattaatctatttaattattgttattttgattatttatttcaaaactccattttaaatcaaattctctaaaacttctaatttccgaattaaattcttaatcccaaaaattctcatgttcccactaaattatttgatcattagtattttatttatttatttatttcaaaactccattttaaatcaaattctttaaaatcgctgatttccaaattaaattcctaatcccgaaaattctcatattctcattaatttatttaatcattagtattttatctcccttttaaatcaattctttaaaacttcagatttacaaattaaattcctaatcttgaaaattcccatattcacattaatttaatcactaatagtttgtttatttatcttaaaattctattttaaacaattctttaaactttctgacttctaaatctaatttccaatttcaaaaattccaacattcccattcatttatttaatcattattttcgtccttattattattagtccatttatttatttcaaaattccatttttaaacatttttttgaatcccaattttcgaacttaatttccgatttctaaaattctaatttccttcaagtttgacatcctaaaattccaactcttaaatttaattctcaagactccaatcttcaaataattttcgagactccaatttccaaataaatctcaaaaacccagtttttctctcgaacagttttaattccactccgatttttaaataatgttctatttcttttgatttttacacaagcaaaaatgatgaatcttcgtgattccgaaataatgggattcgtgagattaattcatgcaatataaatcgggctttggcgggggcccgacatatgcgatttccttatgatggattgattgtttgtttgatttaattgccatgcatgatcgattttattttgttctatgacatgcttcgaaattattccttaattgtacgctaacctcacttcttgatagcgctttatagatcactgtccaggtatgcgtccacacccgcttgggtcattttttgtatgcatgtttagattcccacatgtacacgatcactctgagtattcattgattccctcatcaattgccattgactgcttcattttattagtagagactcgactttagggacttagagggctgctatggtattttaccgtaccttcccgataagtaacctgacccccgagcccgatccggtttttcgtagatcaccttttccaaaataaggagtcgcacttagggtttttctttcttattttgtttaccctttaaaaataaaacaaaaataagtagcgactccaagtcatttttttaatcaacaaatcaatttttcaaataaaaatcaagctcgtcatctagtgggaaacgcatgagccgaaatacggggtccacaatgtgtttttcttaacaatgtacatattcttcttaaggatatatgtgggcttgaaaataaatcatggaggtggggagtgggcttaaacctattatcaatgttccaaaaatgaatacttaggtcctaataattaaggtcaaatgggatcgccgtagaaaaatgtaaatattttttggaagaatgtaattgtcaaaagtcaactatagaggtgggaaagcctcaaacccattcccaaaattccaaaaatgaatacttagaccctaataaggctaaatgaagtcctaatccactttaaaaaaatgtatgtatttttttttagggagaattgggctttagacccatttggttttgataattaataaagagttcatcaaatacccataattgattacaaggatatgagatgagaatagacaaaaataccccattgactcatttttgtctttattctaccatccttcacatatcactattctttcttatttaaccatttttagatttttcattatttttttaaactcttttataaataattgaaaaatcaacattatttttttatttttaaattataaataaaaaaattatattaatgattcaaagactattttggaaaatactttctaaaaaaatattaatttaaataaataaaaattacattttacatttatttttatcttttatattttagaagtaaataatttaatgattaaaatactatttaaaataaatatattcactattttatttttttatattaaaaattattttaaagttttttttactattataaaataaaaaatttaattttttttaatcttctttcttccttattttaataacttttttaacatgacttttagtaataagttatatgaaatgttacaaatttgtttattaaggatttattttaatgatttgaattaattgaaaatttattaaaataagaaaaagaaaaataaagaaagaggatggatggaaagtttttattttaagtactcaattaaaatgttttcatatgacctaattttagaagtgaattatatcaatacataatagagattgaatttttcttatataaaatggttgaaaggtatatttacttattttagatgaaaacaagtagttaaaaattatatagattatatttgagtttggttttaaaatatttttctagtttttattttttatttttaaaaataatttttattttctatattgtctatttttgaaaatatttttaattaaaaaatgaaaagtattttttaaaatgaaaattgaaaaccttgtttagtactatttttttatatgaaaataaaaaaataataaattttatttattcatttattgcaccactgtacaattatattacactaattgtacaagggaaatatactaagtgtacaaaggtgtacaaggctaccatttgtgaaatattataatcgattataagtcattcctttattttttttatcactcatgaattgtacacatatgtcatgcactttatttaatttccgcatggaaattccaatatttttcctaataataatatttggagaaaaaaaattttgaccttaaatcatctaccatcttctcaactaaataattgaaaatatgattaaacactcctacgtgaatacataacttaggagggatataaaatttgtgtcactgtacaagggtattacactgacgggaaatgtactaattgtacaaaggtgtacaagattaccctttgtgaattattttaatcaattctaaaccacttttttattttccttgtcacctaaggattgtacgcctatgtcatgcattttatttaactctcacatgaaaattctaatattttccctaataatgatatttggggaaaaaaaaagttgatcctaagtcatccatcattttcttaaccaaagcattgaaaatattattaatacacgtacatgaacatataacttatgagaaatatgaaatttgtgtcattgtacaagggtattacactaactgtacaagggaaatgtgctaagtgtacaagggtgtacaaggctcctaataggttttgtacaatttttaaataactttgaatttgacattaagattattgatagttcttttttctttttttaccaaactatgtcattaagacattccttacaaaaattaacacataagaaataaaattaaaattaatcatattagaattgttcattataagtaaactaaatgaaatatatatttttactattttgcctttataaacataatttcattattatcaatagagatttaaaaaatcatatttaaatggaattataaataaataaaaattatttttataacatttttattttttaaaatcattaatttaaattatgaaatttgttttaaaattaaaaatatttgttgtaattatagttttgaagatttcatgatttttatcatattactttgaaaaaattgctttaataagaaagtatttatttaatggttttaaatatttaaatctttattcaaaaatatttaggattagtgtggagagcaattaggtaattttggaatggagaaattttaaatatttttgaagactttaattcggcctattaccctatttacactttcaaaattattggaaggttggtaaattagtcttaaaaatattgtcttcttgattaatattatatatatgcatgtgagtgtttacataatttttgaaaaaataataaacaccatgtgtctaatttgcaagttagaaaaaaaaattaataatattttatgaggtatttaaaaagtatttattatatgttctataaatttaaaaaaaaaatataatatttgatgatatctaatttacaagttggagtaaacaaataatacaaatattttatgaggtgtttaaaaattatttaatatatatgagaaataatataagtttaaaataaagaatgatatttattatatattatataagttttcaatatatttaaaaaatatttattatatattatgtaagtttgaaaaaaaaaaaaatatttgatgaggtatttaaaagttattcacttcaaaaatgtatttgataataataatttttaaccatctttcatatttgaggaagaaaaataattcaagttgattctactattaaataggtgagagaagggcaaaagagtcaaatagagaatgagaaaggtgaggtgagtgattacttttttcatttaatagtcaagggtgttttagggattttttaaaaacaatatccttactctcaatttctactcttttattgggtgttgggcttaaatatgaaacttatatggaccatacattaatttttgggcccagctgggcccaaaacacaattttcccttttttttaaatgtctgtatttaaaaaaaaaatgaatgtaactttttagggtatgtgagcttagaaatcaaccatgaaagtatttttcttagaaatatacatatatatttttttcaatcaagtactaattactttatttgtttttttaaagggtttatttgtaccatagattccaaatttattttctcaaaatattttttatcactttaatattttattttattgtaacacagtaaaacaaaaatgtgtattaattgttttatttttattaccttgaaatgtatggttatagtttgtgatacaaaagccaaaagttttaaaaaattctatccttttttttcttctttttttgtttttaaataatgtgtgcatagttgcacctaaaattgtcattggcggatgtagttttacgacgtatccttaaaatcataataaaaaatatccttaaagtcatagttattgattatatatagttttacaatatattattaaaattaaaatcatcaattgtgattttgcaacatatccttaaaacatataaaaccacaacggatggctatgattttaaggatatttttaaagtcatggtcatcaattatgattttaattatatataacacctcgatgattatgtgattgcaaataactagtttggtaaatgttttgaggaaattggtttgatttggtttttgtgaatcaattttgacttaacttcatgatcatttttagttctgagttagctatagatttgtgtttattttgaaccaaaaacctattaatttgagtttatattagatcttaagtttaatttgtttttaagattaattaaaatcaatatggatttactgttaaaaaatattgaatatatttataattaatttgattataatataaattactttaatagaatttaatataaatttttttatcaaatatcaacaattatatataaattttaaaatatcggttatgtttagtttttatcggttgagagacaagaaaataaaaaattaaactaacaaggttgatttttaaaattttaaaattgaatcaatcctttttttttttatatatattgaaaaccgaaccattataatcaattttgattgattgcgattaatttatcattttttatttttttatattttgcttacaccccaatcatggtcctcgaggtaacaacactctagccggcctcttagcctatttattttaaaacaaattcattatcattcttaccccccgttctttcatgttattcctttacatgaaattcctcttcataaaattatttgcctaaagtcttctataaatccatataattgcttcatgtgatggaacatgtgtggctgccaaacaaatgattaggctcaagtcttatcatgtttggtagggatggcaacgaggcgggtttttttgggtacccatcccgtcccgcccctaatgggacggagtttaaatttaataaataagtttgggacttgtattagatttttttttttaaacgtgtgacggattcgggtattgccccatctagccccgtttacatataaaattaaatttaaaattaaattaaatttaaaatttaaaattaataaaataagttataaacaatataataattttattatttataaaatatatttattttaatgtaattaaaaattttaaaaatatttttttttaaaaaaaaaaagctaaatgaggcgggaatgagaattgtttttaataaacggggcggggttaggataggggcaactcatcccgaacccgacccattgcaattcctaatgtttggtcattgaaaatacgaagaaggaaatcaaagaaaattatgcaccgacaaaatgggtttggtttttaatatcagaaaataatttcaaaattatttcattgcttttattttcattatgtaaaataatacttttcaagaaacaattctacttttgatcttgcaaacccccttgggaaataagagaaaattgtgtttccatacacttatataaaaaaaaaaaaaacataatctaagtttataaaatacaaatttaaaataattatttaaaaataattaataagtattattttggagtgagtgtatgaaacttaaattgtttttaaagaatttttattttataattaattttacatatgagtatataaaaactcacttttttcgaggaaaaacacgacaactatgaggatagctgctatatactatgtctcagaatcctgctttttttaaaaataattttaattttcattcacgaaaaataacttcagctttactgtttcttaaaaatgctttcctctttaggtgctccaagtgagcctcattctgatccattccatcattctcaaattaaatagaattttgttttataccgtgaagcaaataccgtcttcaaaaactccaaaactattgtttaaaactatttttagaagaaactcttgaactaagaagatcattcaaacacgcaacaagcaaaaacaaatggaagaagccaccgccattaacgtctatatccggacctaacccgaatacatggctgagcaaggatgtggtgtatatcagataatgccaaatttagtaccatagtagaagacgcaactagcgaccaagtccgtgcacggtgcaccctcagttctgacaatgcattaatagtgaagttaatgctgcagtgggaggtcatttgcaccggtccagcctaaccctgggccatactctcatcaatcatgttcacaactttccattttccaggtagttccaagcgaacccaactcaagaactgaaactgaaattttgggttagtgtcattcgtgtcgtcccataaagcaatgaataatgaaaatttaatgcacccaaatacatcgtcttgaaatcatccatttatcattagcatgtatttaatgccactttaaatatagatactttattaaattcatcaacttttttaattatttaaaatttaaatttgatactaatttctttttattttttaaaattataattaattttaattataatacatttataatttagaaaataaattaaaattttaattttactcttgtttttatttttaattaatactttaaattttttatataaaattttattacatataaaagcgactatatcaattcattttattttttacttaaaa

SEQ ID NO: 10523 - DNA, 5143 bp, Vitis vinifera
  Intron number 1 from transcript GSVIVT01009960001 (locus G SVIVG01009960001) derived from phytozome v7.0 (chr-ID chr1 8; pos 12841272 to 12846414)
tatccttagttaacgatttaaatcccatcatatatattcaatagtttgaatttcatcatatatattcaatagtttgaatttgggtttcgataaatactacttgatagcttagccttttgcttatttaccactttcccttaccctcattttaattttatcccacaataattggaattatcaaacattataaaattttcgataataaaatagttaagcaatgcttgatccccttgaaaacaaattttaggtaattaaaaatgttttgcttgagtggaaggcttatttgcaattttaattttgtagcaagagctggtaaaaaatttaataggccacaagaagcaatttgcaagtcatcatttaaaccaaatgaactaagggaaaattgtgttttcaactcatataggcttgataattaaggtaaagtcctccgaccacccttaattgattacaaggatatgagatagtaattgacaaaaatacccatttgacttatttttgtctttattctaccactcttcacatgctactattctttcttatttaatcatttttagatttttcattatttgtttaaactattttataaataattgaaaaatcaacattattttttatttttaaattataaataaaaaaaattatattaatgattcaaagactattttggaaaatactttctaaaaaaatattaatttaaataaataaaaattattttttagatttatttttatcttttacattttagaagtaaataatttaatgattaaagcactgtttaaaataaatatattcactattttaattttatactaaaaagtattttaaagtttttttttactattataaaataaaaagtttaattttttttaatcttcttccttctttattttaataactttttaaacatgacttttagtaataagttatatgaaatgttacaaatttgtttactaaggattttttttaataatttgaattaattgaaaatttattaaaataagaaaaagaaaaagaaagaaagaggatagataaagagtttttattttaagtactcaattaaaatgctttcatatgacctaattttagaagtgtattatatcaatagatagtagagattgaatttttcttatataaaaatgttgaaagatatatttacttattttaaatgaaaacaagtagttaaaaattatatagattatatttgagtttggttttaaaatatttttctagtttttattttttattttttatttttatttttaaaataatttttattttctatattgtctctttttgaaaatatgtttaatttaaaaatgaaaacaatttttaaaaatgaaaattgaaaaccttgtttagtactattttttatatgaaaaaaaaatcatttattcatttattgcgtcgttgtacaattgtattacactaattgtacaagggaaatgtagtaagtgtacaaaggtgtacaaggctatcctttgcgaaatattacaatcgattatgagtcattattttatttttcttatcactcacgaattgtacatatatatcatgcattttatttaatttccacacggaaatttcaatactttccttaataatgatatatggggaaattttttttgaccttaagtcatccaccatcttctcaactaaaccattggaaatatggttaaatattcttacgtggacatataacttagaagagatataaaatttgtgtcattgtataagggtattatactaactatacaagaaaaatatactaattgtacaaaggtgtacaagattatcctttgtgaatgatttcaatcaattctaaatcacttttttattttccttgtcacccaaggattgtacacctatatcatgcactttatttaactctcagatgaaaatttcaatattttcctcaataatgatatttggggaaaaaaaaattgaccataagtcattcaccattttgttaaccaaaccattgaaaatatgattaatacacctatatggacatataacttaggagatatatgaaatttgtgtcattgtacaagggtattacactaactgtacaaggaaaaatgtgccaagtgtacaagggtgtacaaagctcctaataagttttgtccgatttttaaacaatttgagtttgacattaagacgattattgatagttttttttttttttttttaccaaactatgtcattaagacattccctacaaaaattaacacaaaggaaataaaattaaaatcaatcatatttgaattgttcattataagtaaactaaatgaaatatatatttttactattttgcatttataaacataatttcattgttatcaatagagattaaaaaaatcatatttaaatggaattaaaaataaacaaaaattatttttatatcatttttattttttaaaatcattaatttaaattatgaaattagttttaaaatttaaaatatttgttgtaattataattttgaagatttcatgatttttatcttattactttgaaaaaattgctttaataagaaaatatttattttaatggttttaaatatttaaatctttattaaaaaatatttaggaatagtgtggaaacaattagataattttggaatggagaaattttgaatattttgaagactttaatttggccaattaccctatatatatattgtgagtgtttacattatttttgaaataatatgagaaataataaataccatatgtctaatttgcaagttagaaaaaaaaattaataatattttatgaggtatttaaaaagtatttattatatgttctataaatttgaaaaaaaaataatatttgatgatatataatttacaagttaaaacaaacaaataatactaatattttatgaggtgtttaaaaattatttaatatatatgagaaataataaaagtttgaaataaagaataatatttattatatattatgtaagttgaaaaaaagaataatatttgatgaggtatataaaagttattcatttcaaaaatgcatttggcaataataatttttaacaatattttatattcaatttgatgaaaaatgattcaacttggttccactattaaataggtgagagaagggtaaaaaagtcaaagagataatgagaaaagtgaggtgattgattagttttttatatttaataatcaaaggtattttagagattttttaaaaaaataatatccttccactcaatttccactctttcgttagcttttgggattaattacgagtgagtaccttacctcaattacccaacctaacttagttgaaaccataattctcccactgtacaaggaaaaatgtgccaagtgtacaagggtgtacaaaactcctaataagttttgtccgatttttaaacaatttgagtttgacattaagacgattattgatagttttttttttttttttttaccaaattatgtcattaagacattccctacaaaaattaacacaaaggaaataaaattaaaatcaatcatatttgaattgttcattataagtaaactaaatgaaatatgtatttttactattttgcatttataaacataatttcattgttatcaatagagattaaaaaaatcatatttaaatggaattaaaaataaacaaaaattatttttatatcatttttattttttaaaatcattaatttaaattatgaaattagttttaaaatttaaaatatttgttgtaattataattttgaagatttcatgatttttatcttattactttgaaaaaattgctttaataagaaaatatttattttaatggttttaaatatttaaatctttattaaaaaatatttaggaatagtgtggaaacaattagataattttggaatggagaaattttgaatattttgaagactttaatttggccaattaccctatatatatattgtgagtgtttacattatttttgaaataatatgagaaataataaataccatatgtctaatttgcaagttagaaaaaaaaattaataatattttatgaggtatttataaagtatttattatatgttctataaatttgaaaaaaaaataatatttgatgatatataatttacaagttaaaacaaacaaataatactaatattttatgaggtgtttaaaaattatttaatatatatgagaaataataaaagtttgaaataaagaataatatttattatatattatgtaagttgaaaaaaagaataatatttgatgaggtatataaaagttatttattttaaaaatgcatttggcaataataatttttaaccatatttcatattcaatttgatgaaaaatgattcaacttggttccactattaaatagatgagagaagggtaaaagagtaaaaaagagaatgaaaaaagtgaggtaattggttagttttttatctttaataattaagggcattttaggaatttttttaaagataatattcttctctcaatttctactttttcattagcttttgggtttaaatacgagtgataaagaggaccattacccaacctaacttggttgaaagcataattctcccatgaaccaaacccattacgtcttacaacacctcatagctgcaggggtgcagggctcttaaattttgctgtccgttccgtacaattggttcattgcggttcacttggcttgaagtgtttgaccaatttgatgtttatcaaagattcagagtttcagcccccctcttctgttcagttgagtactgaaatgactattccaccaactcgatgtgtttttttttttttttttttagaacagcgtgtgaagctttaagcaacctgtctgtctggcggtaggaaataaaacttaatttaggtggcttgattaaatcatggtggattttgagagagatcatacatgtggagactggggtggtcaccggactgaagagccctgatcgctgcagctcactgacaagaattaaagatcggtagtcaccttacaacaagagtcccccatgtcacatgaattgtcacacctgccctatatatgtatataaatatatggcttagacaggcttccgaacagagggttgaaaatgctttcatattcttcttccgtcattccattctttgtttccgtttttatcagttt

SEQ ID NO: 10524 - DNA, 6538 bp, Vitis vinifera
  Intron number 1 from transcript GSVIVT01025283001 (locus G SVIVG01025283001) derived from phytozome v7.0 (chr-ID chr6 ; pos 2444523 to 2451060)
aaacattcaaaggcatttgcattagtttaatgccactctgcgtaaatatttgaatatgcacttataatattattttaagaatatattgtattttttatgttaatttggatatataaaagcttctttgcatgtaccaccggcaagacaattggtatcaatttgaatacgactttttaaaaaaataaaaaataaagaacttctgtataaaaatataacatcttaaacaaaaaaatataaatttattttacatatttaaaaatcactttttaaaattttaaataggaaaaaaaattgtactatttttctcaagaaaatcttttagtattttctctcacatctttttcttaatatttctttttacctccaaatatttttaaacaaaaaaaatcttttccttaacttttttttcttggtattttacttttcactaaccaaacctaacctatattttatgtgtggtacaataatttattttattgaaaagcaaatttttattttacatgagttaaaaaataaataaattaaattaaattatttttcaaaattaattatatatatagtcaaggtgggaaagcaatacccaaacctaccccaaacctatctaggtttgaaaaaagtctcaaacttatctctaacccatttattttaattacaaacatgtcccatttgtaaggcaagtacccaaaaaagttcatgtcattgtcattcatactaatatctaataacctatatggtttgtgtgttacgacactataaagcattgcaaacatattttgttaacttaatatgtgttaatattgaaggaaaaataaagttaagaaaaatgatgttcttatgtttggatagcatagaaaaaggtttgaaagatatatacatggagaaaagagggagaaaattgctaaaagagtttctcttcattttccttaaaaacaatggggaaagtttggggataacatggtgtctcaataatttaattttctttcctcttgcctctatttctatgtggatgcatgtgaacaagattttaaaaatatctcttatttgtagcatatgattttttgaagctttataatagtcgtaactttttaataatgtcaactgcaacaaggttgtcacaattttgattcattcagaaacgatttctattactaccatttggaagtcttgaacttgttctataaaaaccaactagttgtgaaaggtgaatctcaatgatagaacacacctagcgaggagtgaataggtgtttctgtccaatttaaaggtctcccaacacaagttaactaaccttaacaatttttacaatttttccttctctttacaaacacttaaaaacacaaattagaaatcacatgcaaatatgaatgcaacaacactactcaacaagaataaaatgcaattcacatgtagatgttccaacactccccaaaccaaaaccttaaaacaatatttttattaataacaagagtaaaaaaatctcaaatatgcatatgaacaatatgcaaaaacaatattaaaagtaactcatatctatttttcctcaacattcaaccaaaaattagatgtccaaattatcaaagatagctaaaactgaaaatgaaataaaaaggagaatgagagacaatgagacaacaccaaaatttacatggaaaacctcctaggaggtcaaaaactataggcctacaaccgatcaaaaattccattatgaagagcaatcaaggtgtacaaggatttatcttgctcaagatctccaatccctcatgaactacttgacaaacaccttctcacctctcaaccccaccttcatcttcaggaacatgcttggagtccttcccaagcttgaactcgaccttctccttgaagttccattaagaagaaaatgggttttcacccaaaccaaaatgaatgagagatgaatgttcaaataactcaacccatttttcttttcaaaaaattcattaatttttttttttttttgaagatttgaacaagattttcatgaaaagcaaacaacctttaaaaagggaagggaatgaagagctcattcacaattgttgctctctctgctttccgaaaatgagagaattatgattttaaagggaaatgaaacccttaatctaatggttgaaaaaaaatctcaaaaagaaataatttggatcaatctgcccttgcacttggatggatccaaaaacaagggaacataaaccttttagcaaatatatttttcccatgcttccctaactcttttaaaatgattcaatacaatcaacattttgaaaatggggttgattcaaattcatttaaccacaaactcggctacttaccttggcctcttagcaaatctaaagtcttgatcttcaaagtcaagtagtccaacaacggatttagagaaccatagctagtagacacttaggtatattgttcaaaattgccaacctaactacaacactcacaagttggatacttctctgcatttgcttcctcaatatcatatcaataatgtcaattgtattctctttaagtatattcaagcccttctaagcttgacaacctaaaaactaatgtagcagacttctcttgagttgtcacctccatgatagaatagttcaatggattctctatatagctatcttataccaatctacacaaatggaagagttcaaaactactctataagataacaatcttcttttggcaaaaaagaaactaagaaagaagaaagaagaaaattaacaaataaaaaaatatatgatacaatggagtactctactaactataggtaagttatatatgtaaggattaaaatattaggaaaggagttttataaatgcatccacctagactctctttacattcaaccttttaatgtaattttttaagacatgaatgtcccttggtgaaatccccaaagtaccctttagtaccaaaaaaaaatgaaacccatggcgtatgtccaacactcaaggatcgaacataactgagatgtttggaattgaaatattagacatttcagttatatttggccttttgggactgaacaccatgggtttgaatttgaatttttttttatttcttcatttacattacagtttttcacaatttctcacttctacatcatacttatattcttcctaattgtttttcaaccatttttacaagaagtttttttgtcaaaaattatatataaataagttttaaaagattttcatgttctatgttatatgaattcaaacaaaaacaaaatgaaatgagttatgaacatagctacgataatcttcttatatcaaataaacttcaaacaagatgatttgtaactaggatttctggttgggaagaaatgggtttagaaataaaggaagaagaaaatggatttagggagaaaataataagaagagtgtttttggttttttaaatttgtaggatggatgtatttaaaagtttttaaatttttaggtgaatgtatgaatacagtggatgcaaagagagtttagacgaatgtatttataatttccctattatgaattagaaaaatacaaggttgtattttacgaaaatattaaaaatattggagaggaaaatttggaaaaaaaaatgatgaaacataaataaattaatcaaaactcaaaaatgttagggaaaatatacaatgaggaatatatatacatatatataataaagggattccagtaacctccatctacatgactgacatccatatatatgtccaagaagaagtcaagatgaccaatgccagatatgaagagaaaccttctcatctatccatgaaaaggaatgctaactaggatctgctgcccttcattttaaaataggaagaagattagttggaagcaaaaggatcagcgaccgcattaacaatgagattcacttcatagtcaatgaccatcaatccgtttattaattaatttacttcaaccaatatgtttaattattttattttgattagttaagcaatacaatttgattattcccatttcctcccatttttcctttttatatatattttccatagacttttccattaatacgaaaaaactttctagaacatcagccaattttccttttttatatattttccatagactttcccattaacacgaaaaacctttctagaacatcagccaattactagaagttccgttttgtcagtcaatgttattggtacgactagttggaacttgaaaaatatgcaatgcagaacccaatttgaatacgtatagcttattattatatttttagtgaaaagtcttgtgataatgattttaagaaatattttttatttttataacacttaaaaaatttatctttttagagtgcatttaagagtgattttagaaaatatttctaatatttttaacatttaaataataaaaaatttcaagtgttagaaatattaaaagcgttctctaaaatcattgtcaaacgggttctaagtattaaaaaagttaaaaacgtttcttaaaatcaatgagaaacatactcttattttttttaaaaatgggttttcaaaccaagacccaatatataaatgcctttaaaatgttacttgtggaaatggtgtggttaggtatgctacattcaaagacagaatagtttttctgttttacttttgtcctctctttctctaggaaggaattaaggcaccatttttgtcttaataatataattccattatatgtatatatacaccatacgtcgagtgactcagtcactcagccacacaggcaactcgaccttcaaacatacgaggattgtccaacatcacaactaggtcttctacctcaaacttcattcttaaataattggaaacctttggccttcaaacgtataagctagctagacttttgttaaatatagtatgtagtttgttagactacttattgtactacttcatgaataagttaaaaattgttttcggaatctaaaaattttctataggaaagcattagctaggttgcttagaaatgtttgcatttaggagtctgaaataatgttataggtatgtcatcattatgtgactgtagagattagaaagataatataattaaattgaaggtgtatttttctctgtattttccttcaaagatctgcattcctttcttataaaacaaaagtgttgtttgtttttggaaagggaataattaattttcttctctgtgagtgttcaaaaattgtatatagaaacaaaacttagaatatgcatgcatgtcccttccattcagtcttaaattcttaaaagtatattccagccaacaatagtctattattgaattcatatgatctgatggtacctagctattttgggaaagtaccaaagtcattgaatgaataagtagtcaatccctgaaatggactatgtaatgaattttatccgtgggtattttaccaaaggtttatattatatcaatctacccttgcatgattcctattaaagcatatactcaggaggtgagtgcagagcaggatgatctcaaaacggactccccattcattggatagagaaaaacaccaagatttcgtgatcgaaaatcttggatctatatatatatattatcggatataactcatttctctctaaatttagatgttggttcaatacattttaaattttttggtattagaaaaactatttttaaaaaattgaggactagtcccgttaaattttattggattgaaccaagaataactgaaaaaattaatttggagttgtatctgggaaagttttagctaaagaaaggcactgaatgcatatgagctggtgaaggttaagagcttaagaaaccttcccacgttagacactccatatataaaaagaagcacattctagattaagaagtgtagttggaaaaggttactgaggaaggcactcaagaggtgaaagcgactgttttaaggaagaacatcatacttcttattttaactatgagttacttgactccaaaaaatgagacgagaaagtgaatgaggattaaaaggaaagttaacttcactagtatctatattaataattttgttcctggatgctgctgcttcatgtccaaagtttgatcatctctctcaaacaacatgcagtttctcttaattaatccggtctacatatgcccatcgaatgggttcattttatttccaaatctgaggcaaatggacgagtatatgttctaaccaacagtaaacaaatggaatattgtagacattatgaacatagaattgaaagcacgcaaaacaggctgcaggagaagcaccatccctccatgtcatgcccccttattcttaaaccagttgtcttctttgaggtgaagtagccgaggatgggactccaggaaaacaactgattcccctttttgtaccatttattctttctaataaagcatgaactgcaaaacagaataagattggttgatcatacaaatgacattaatgaaaagtaaataagctgcaatcagtacaatgtatttcgtacttacatacaactagtagagatagcgtcttgtttagtagtatgtgggaggaggtggtggtg

SEQ ID NO: 10525 - DNA, 2428 bp, Vitis vinifera
  Intron number 11 from transcript GSVIVT01022353001 (locus GSVIVG01022353001) derived from phytozome v7.0 (chr-ID chr 7; pos 18911095 to 18913522)
ttctagtgtaatagtttctacctctaaatacgagtaacagttaaaccatgaaatagagaattaaggtccattgggtaaagtaataatcaatgtttaggatctctgcatttttgtttcttaatcactttcccatgatttagaatcaaggccaaacaggccaaaagtaaaagatctaaaagcagtcaactatggaactaccagaacctgttttgacctttttgccttcttttagtctttttcttcaatcatgtatgacagatttttttatatgcatttgactgctgctggtttgattttataactttgggatttgcatcttttgtaaccaaggctaaactatctatcgattaaggctccatcataacccctctttgtccttccccatgaattatggcaattgtttcattgagtgaaggaacttcttcctttcctaacacttgtacttgaacaggatcgaactcaatgttcaatctagcaagaaaggtgtaaatcctctctttttccataaaatttttaagaagggttgcatcatcactgcacttcatctcaatatactgataatggtccaactcttgccataagttttgtagaatttgggcatattcaatgatcgagcaattaccttgtttggttaatgagatccttgtcttaatctcatagatttatgcagcatctcagactttagaataggtctactgcaggagtcccaaatttcctttattgttgtaaaaaacgtgcaagtatcactaacttctagcatcatcaaatttcataattaggacatcatcatggaatcttcttcatcccatgcaacaaactttgagtcctttggtttcagtcttctcctaagaagatgactcagtttcccttccctttcaaaaaggtttgaacaaacaaagaccacttcaaataatttttgccattgagatgtaaacctagttgaatattctgcaattctcctgttgtagtgttgatgacatcatatgttgatgttggactagaaacatgctgattagcagattctaaaatctcagacattttttttggctaaagtggaagaaatcaaataagaggttgagaaatgattgcagcaatgaaggccacaacaagaaaatgaagcagaagttctgccaaaaaaaccaaaattctccaggtttttgaaaaaaaccagcaatgaaggctggaaaatcaatgatgaaggctgaaaaaattagaaaccctgagcagcttaatttggctctgataccatgtgaagaaaaattgtatttcttactcatatcttgaaagtatacaaccaatgaaatatacacacaacaacagaaaagaaagaataaagaagaaagaataaggaggaatccctacaaatcaaggattatatacatacatatacacataactatatatatatacacagctgcacacacaaccgtacaacttatacggttgtatattacagctatatatcttctacagctgcatattacaactatgataatattcgataactgtaatgatcttcaacattgatcatttatgctttcttttatagtctagtcaaaattcagttagatccaattttcatgggtcccgccattgttttggattttttggtgcttcttcaagaacaattctccatttcaagatctattaggttgagatcaagttcaccgtcaaattcatatgtcatactcgtgattttatcctcaagatcatagttgaagtaaagggttttaccagaaaggagaagaaaaagatgggaaacagcttggagccttaacacatggctgctcatagcctacttttctgataagttcagaaattccacagccattcatccataattttttgcctatagcccatataactatgaaccgcattaaacctcactgagaaaacttgggattctagatcaggttgtttttttgggaacattaaccacacacgtgaactgaaaagcatgacaatagctaccagcaattctagtctacatcaatttatgattagccaaagagtgatggctagccagaagtaccactagcagagtccactaagtaaaatatgcaattaaacaacgtaggccaaaagggactgctctagctaaattgattcaaggaggtcaaggaggtccaggaaaaaactcaacaatggataggatattcaatacttggaacatgaaatcataactataatatctagctttgatatgtcaaaagctcttaatatcattcatttgggtgcctgtggcatttgtccactcccaatctctccaatgttccaagaacaagcatgaggattgaacaatgggttatgagcaatgatcatgcctttacattttaactgtaatatgtccaacccatcttgtaagagtcttttgcctattaaaaggtcatcagtctagacagtctgcctacaagattcaggaactctc

SEQ ID NO: 10526 - DNA, 3241 bp, Vitis vinifera
  Intron number 3 from transcript GSVIVT01021096001 (locus G SVIVG01021096001) derived from phytozome v7.0 (chr-ID chr1 0; pos 1422590 to 1425830)
gactgtactttcctaatcctctgccttacataccattctctcttcacttatgattttctaagatcatttatttccgtacatggcatatcatctttgtatgaacttgaatggcttttctcttaatagaccacatgtgggaaatatttggaaagggataagcttattgggaaggattctatttttgcacatatggtttgccaaaatggttatgatacatcatataagtttacaaattacaccatcatgacctgagaatcattttggacacctaactgttgatcaacctcatcttttgtcagttcaactgatttggtccataactgtttgtgaaagatctaaatatgagctcctgatttttaactacaatccaaagattaacataagaagaatggatgttgtgtgtttttttattaaaaatcaaaacaattctcaactttttcagtttgacttaagccaactaaatctttctcccaaactattgggccagccatttatattctgcttcactattttggtttttctctactctagtgaggccttattccaactgtttagtgtcatctacatgattcattttcactatttagctctatctaaggtcatatgcagtgagttataacatcaattaagtgataaatcatcattttcttctcatagcgcaggcccctcctcccccccaccatcttaactcactttcttttgtcttatcctgattatgtgctatctctagtttatcgcaaattattttatttcttttttcatcctatcttgcctcttatcaatcctgagctcctcatttcagtgttacttatttcatggatgtattgttttcttaaaactactggcatttcatatcacaaagaatgttgccttaaaaaagcttttctttggtcaaacaacgcacataagcttctctccacttcatttttcctcctgtagttcatgggcaacttccactttaatctcctccttacggatgattgatcaaatatttcagagaggtgctttttaatttgtaatttttattaatttttaaaccttttaacttttcatttcttttagggagagggagggtttagtggcaactatttccatcatttttcaccattttccatttctattgcttgttttactgaattgcatgtcatacattctgctttactcccagatcacatatatcctaatacctgtggatcctacagtatatatagttctaaactatattgtaagcaaaacaacaattttgtgggaaatgtccctgaggaagttagcttattcaaaccactgcaaaacgacttaatggacctttgatttgaaccaaatatgattgaaatgtattccagaatcgctagttactgctccattgtattatattcttaatcccataaataaatctatttgtatactgcctgtgtacatttggtgtgcccgttgttgttagggattgcttaatatatcttctgtttgcccatccaaaaataaaattatttgtactttttctctttgcccagaatcctttctatctattgctatgaaagcaagtaggtttcatgattgattgcagcatgaagcaaattgattttccaaaagatggatactttgttatgtgacttagttctccttggggcttgtttgggaaccaggttattttaccttggggatttctggaggtggagagtggtgtgtttattttattgatttatatggaatgattcaaagctttgggggccagataattatttttgaatcagccaacgtatatatataatagaatctaataacttaaggggatctctgggatacatggccacccgtagcctgccaaattttgggggtggcctgattttcagcaaagtgggcaatgtgtgctgccatgtggcccttgttaaaagatattttagtctttgataccacaacagatggcacagttttgaatattcttcacctttatttttctgtatggatattaattacattacactattttagttttatgcatgtggaaaagagtctttttaatcttgttgaacaagtttaggcaatacccatcacaatcaccacccatacactttcaagtctcaattagagtaccgtatggtccaaatcttgtttaggaaagaattaagatggaaatgttttcaacagctttgtatttaaataatactatgttgtgattgtgagtttttgcacgactactcttcatgattaaacaacaacacatcttctcctactttcatagaattgggtgtatctttgtgttccttgtgatctctccctatgctagtgaatttgtgtatccaataggtgcctaattgatagactctgaatggttagttgaaggtacaaatggtgcactggggacactggaaattattgtttagatttggtgaactcttgattgggaatttaacagggatgatgatgttgtgggcattttgataacttgccttgctttcataatgcttttcacctaaatgagtttccagggtattttgggcaaaggattttcaatataattatttttattttgtataactattaaaaaataggttaaatgaattcagaaaagtcatgatatattttgatcaaaatcagttgatctagttccaaccttgatttatttatgcaattgggactaggttgggaaaggttgtttaactctgaaaagagtgtattgtaaataaatccaatgagttttcaatagatctgttgacctctctatgtctgtgatccagattaccatggttaacatctttatgatattggaactctcttgttgaaccatgatattcaaactctgttgttgaatttttgcatggatgtagcctagtggcactgaaccatgtaaattgctcctaccatggtgcttcatttttgcttgcctattctctcctatatttagctgatcaacccaatccagattctggctttttctgcactaggacttcttcatcattacctcaatttttgttcctgtatgcatggatgaataaatacaatgggaaatttttatttgcaaattaagggatcaaattatcatatattttcttggttttagttaacaacattttctagaaggaaaatatcttcaagaaagtgtaaaccgatggtttatttaatgtttaagatattaaaagctgatatcatttccattactattgcttatgtgcttttaagtaattatacctttgcttcttcatggacagtggtcttgacaaccagggcctgaggggtttcttac

SEQ ID NO: 10527 - DNA, 4713 bp, Vitis vinifera
  Intron number 2 from transcript GSVIVT01009641001 (locus G SVIVG01009641001) derived from phytozome v7.0 (chr-ID chr1 8; pos 10128585 to 10133297 reverse strand)
aggtatgctatgtgatgtctctattattagttaagcacttcatcttctgaatgaaaatgatctgaacatatttagttggcactaggtatttatctctgtatctggtttctaaagcacaatataatacctactttatttatagaaaactattatgttttataaatcttggaattttcctgaaagtttccaccctagagacttttagatttctgtttgtttatttttttattcttttgattttccttgctgctttgatgcttttgaggattcttcatccttctgctgcaaatctgtctttcctactgataattgttgggttcttatcaaaatgggaaaggaaaaaagaaaaattaaatttatcataagaatctaagaaaaagaaactagagtgatcataagtttaagaatgtagaatcatccctttagcatggaagtttcctatggcaaaccattgtgcatgagatcgcgtgaagaagagatctcgtatttcagctctatgtatatacatagagatctcatatgccagcttttagtatatatataaatccatgggcatctgatcagagtaaaagcattctttttctagctagggacaagaattttggagttattggtctaaatatcaaccttgaaacatattctgacatatgttgttgacattgatggggatatagacaggcattcgataacatgatttaaatttacccttaagaacatcccaatcaacttccttcatgtgtttgaacttccaactaagattgagaatggcgggacaagccttgagtgaattccagggtattgtctgatgggctagagctgcaggaaactcaagtatgggaaagtttgttgaagaacatagaagaggttggctattagtgtggagattccctaaagtgtccaacagcctttcttactttctgaggctgactttctgagtacatacaaggtgtacaacaaaaaaaggaagcagtagttttaacaaatgcaaatcagaacctaatccaatttggaaaataaagaaacaagggcggaaaccaaagtcaattgatttttttatttttttgataaacagatgatcatatattagaagtgccaatcaaaaagaggcacacatagtacacatgaagtatacatcttaaggagaaaaaaagaaacaacccatgaatacaatcctaatctaatatttattgcttaaccactaagttgataatatgttacaattcaaattttggttactttggaagtaagaatgttttatcagagttcattgcagtttagagccatgctgatagctgacatttgttgttaccaactaaggaacatttccaactgctagagaaatttcaattgtcaaagaagaatgtagttgtcttgagaataattttaactacaaaatctgatgatcaaagttcaccccaagcagaaaaatattataattttctaatctcaattttaaaatccaaggaactgttgacagagttctttagtaatttccatggtatttcaaatgaactttctaatgggcagcattagtgaatgtggaaacaactgaaacatcactaacaatagtctttcctttccaaaactatctaaatatgacagaaatcaatataagaaagcagacctcatttttttcaacagctccaaactgtccttcaacattgcatccagaaccttagaaactacccaggatctctttcctcatcataacccccctttgcaaaaaccagtcttgtgttgtcaattggttttgattaccgatgctttttataagatcttcaagtgtaaaaggcagtaggttgccatgctcagaagctccatacatacaatccagaaatcaatacaacatacaaaacaaaaagttttctcagtacctgaagagaggaataagaaggaaaataccagcctatcagaatctatggaccggttttgcagcagaaatcaacaatcagtagtcagtaaaataagtaaaaaacgtaaaaaaaaaaagaaaaaaggaaagaagctggattctgaaattgttaacttatagccattgttgctggctttcgagaaaggagatcaaggaagggcagttttttattttcaagaaaacagaggggacagttatgtccaaaagttaagtaatagggttttggcaaatatttgtttcaatttggaaacaattggcacaatcaatttatttaatgggttgtagcttattacttgtatcataaatgtggcatgtttggatcgtatcatatttagattcagtagatcgtatcatattctgttaagtctctctacaaagccttaggtttaggtcctctaatttcttttccattgaatgttatttggaaagcctgtgtacaacccaaagtgagtttttttttttttttttgtgggaagcaatgtggggaaaagcccttaccttggaccaacttcaaaagagaggatgacctttatcgaatagatgctatgtaacgacccgctctcaaccgtgtagatattgtctgctttggatccaaagggggccctcatagctttaaaacgcgtctacagggttaagagaaatccatacttatatagcgtcaggaactttcccccctgatgtgggatgtcacaaacacccccctatgcagacacaacgttgtcgttgtgtcccgtgggattgtggggccaaacagacatacactcttacgaggccaaacaaaccccacgccgaggtcagggatcgactctgataccatttgtaacgacccactcccaaccgtgtaaatattgtccgctttggacccaaagggggccctcacggctttaaaacacgtctatagagttaagaaaagtccatacttatatagcaccaggaactttcccctctgatgtgggatgtcacaactgtgatgtcccacattggataggagagaaagttcttggcgctatataagtatggacttttcttaaccctgtagacgcgttttaaagccgtgagggcccctttgggtccaaagcggacgatatctacacggttggtaacaggtcgttataaatggtattagagcagatccccaaccccgatgtgggggtttgtttagccccgtaatgggtgtttgtctgtttgaccccacaatcccatgggacacaacgaggacgttgtgtctgcatggggggggggggggggttgtgatgtcccacattggataggggagaaagttcatgacgctatatatgtagagactcttcttaatcaagtagacgcgttttaaaaccatgagggcccctttgggtctaaaacagacaatatctatacggttgggaatgggccattatatgctacctttgccaaatacatgaaaaatcgatagatcacatcctcctccattgtgccaagacaaagactttatggggtttgtttttctctctctttggggtgtagtgggtgttgtcaaccataggtaaggcgacgcttttggggtaggacaggtcctttgtgggaaaaagagaaaggaagtttggagagtaggccccttatgtattttttggatggtttgaaaggtaaggaacaaaattgtgtttgaagatgatgtgttgtccatccaaagacttaagagttcttttgtttactttctttggtcggagacaaatttgttcataaaatatagtccttcgactttagttggtttcattaatcgggtgggttctcgttgagggtggggtgtttcttgctcctccatgtttgacagttgtttgttctagctaggaaggggggaggtgttgctactttgtatactttgaatcgctttttggtggctcttttcaatacaattttatctcttttatttataaaaaaaaaaaaaaaaaaaaaaaaaaaaaaagattcagtagatttccatattatattcggttttagggaaatactaaggaaaagaaagaaaatattaaggaaaatgatttatcattttttatttaccatgaaataatgaaagaaaatcgaatataattaaaattaaatagaagcttagaaattttaaattatttataatatgtttggtttttgaaaagtacaaaggaaaggaaaacaaatgttaaggaaaattattctctcatatttgctttgctgggaacaatacaaatgaaaatcaaatattcttgaaatgagctagaaacttttgcattttcaaattatttaatcttgatataaaaaaggaaaaataagtgaaatgaattttaaagaacatataaaaataatttattaactttaactttattttaatttattaacttcgaatttatttttcattttcctttatttttcttttcttatattcctttctattttctttctatcacattttccctcaaatttttaaaaattaaacataggttcacattttccctcaaaagtttcaagaatcaagcatagggttgcttactttaatgtgattagagtccaacatgacatgatcccttcccttgtcgctgtagttaaataaacccaccttttctgcatctctatttacattcattaaaccttctgctttttggtttttgcttttaactgcaatggatgtttaggtttgctaatctgattgcttgtaaattggtttctgcatatgattcttacttttttctttggtatgaaacagattgtccatatggtatactctgctgttatcttctgctgttattgtgtctatcaattgtatttggagtctgacttgcatgttctcatag

SEQ ID NO: 10528 - DNA, 7429 bp, Vitis vinifera
  Intron number 6 from transcript GSVIVT01035238001 (locus G SVIVG01035238001) derived from phytozome v7.0 (chr-ID chr4 ; pos 11000043 to 11007471)
gctgctccaaggtgcgtcaatctgtgtatcattaccaggatctaccatcattaacaaatcttcactttagcaactagtagttaataccataaccagtctctccatacattagtatggagtgttgtatatggaggatgaaacttgttatttggttgagaaagtgtgaaacatttggttgaaggaatatgaaattccaacacacataattgagcatatcatgatgggacatgaacagattggtaattgagcactttcagggattttcttgagagaacttgatttcaattattgctccataagatgaatgtataaaagatgcttttcttttttcctcattgttgtttctaatcctttcttcttcttccttcctttctggctgtttatgcatgcctagtttgctatgcattttattatgtagtgaagagaattgctagtttgattaacttgaaaaactgattacaatgggggatctactagggatatatagtgaaagtaaaaaaacaaaaaaattacacaatttgaataaaggataagtatcaaactgtttgatccttatcacacctgaacactagaatccttattagttcaaactactgattcctatcactagaatccttatcatcagaaacaagttaatccttatcatgtagtaatgtctgaaatgtggtcaaaatcatcaagatactgactgagatctctaatttgttattgaatggaggagggtacttttagaacaggaagatcacaattctggagtttggcgtcaaatcattctcaaaaatgctttggacaatatcttctatattttggtttatagcagctgccttcaatggtggttctcctggtacatggtgattgactactattgttttccccctctaaggaaccttaaaaatttttttttagacttttagtgttttttttttttttctttgaagaaaccataaaattctcaaattgctactccaagttagtggttgacttctaggatttcattttaggccatatttggtaagtgagaatgagaagtgagaactgaattttccattcatttttgcatctattcctataagaatgatttcagagtaaataaaatcctacttataattgagatttcaattcatctataagacgaggtattttgattctttagtgcaagttatgctttgaaaaaaccattttttttggataaattgttttttaaataaattttttattttgattttgtaaaagccaaattgtaaattcaatttatataatataaaataaatttcatcgagtcttattaaaaataaaaataattttttaattattaataaattaaattttttaataaaatatgaatagtaatattatgataaaatcataaattatattttctttataaatattataagatgtggatattaacatcttataaaagcataattaattttttttaaataaacaataatattttaaaatcaataattgctaatactatttttaaaattattaaacttatagtttttaaaaattatttctcaagaacaacaatcaaatagtggtattaaattttaaagcaattttatttttaaatcaaaagcccaaatagatttttattatttagaaaaaaaactctcaaagatgtttttttttttaaatgaaaataaaaaattattttaaagtatgtaaagtgtgagactttttttaaatgaatataaagtattattttaaattatatttacagatattattgtcaatttatttatttattttttcattttcattttcatttctattgctactaattgaaatagaaacaaatattcattccagctctacattcctatatgcatccaaacaaaagaattagaacaccaaaatcattcctattcaaggagaaataggaattgaaagaaaattttcattttcattcctcattcctatgtaccaaacatgaccttaatgcttgagattaaatgacctccactaaaaatctagacaagaattcaaggtaaaaacaagttgagggaggtttttgggtggatatttctggctctataaatattagaaaagatcatagataaaacaataataactagactaattgacagcttgtattaaagatttatctttactaaacatcatatcatctttgaaataatggcaaataaatgttgtactagtagcaagggatcattaatgttgttgaaatgtatctcaaattcctaattagtataaattactttttgtaaacaatattgtatagaatatttcctatattcatatgtcattgtaatgtttgattttcttatagaataaggatagttattatgaatgtctctataagtattctaggtcatgaaggaaaaaaggttatgagaatgagatgaacttataaaaaactatatgaggtggacaaaaaattgaggaagagtgggagtcactcggtggagtgatgggctcgtggttcatgatgtagatacaagaagtagaaaaacataggatgttttgaaaacctaatagttatatcaagttttgtcctctataatattccttatggtatagtgaaatgattctctctcatacatggatgtaggcatgtttggttgaaccatgttaaatcactgtgtacctttgtgtttttgaactaacattcttaaattaacattgttgcattaaaacttccattggcacaacaaactagtatcgaagctcaagttgaagatttctagaagagtaaaagagaatcgagcacacaagataatgacaaggaattttagttgaagatgaagttaattgttctatcatcgggatgtgataaaaacaatgtgtatcatggagagatggaagattgaattaatggaatttgatcaaaggtagagattgttaacaagtatttcaaattcttaattagtatagattctgttttattaagaatattatatagaatatttcctatattcctatgtcattgaatattagattttcttataaaataaagaaacttattaggaatgtctctataaatattctaggtcataagggaaaaaggttatgagatagaaataaacttgtaacgactctacgaggtggatagaaatgtgaggaacaatgggacacacttggtgaagcgaagggctcatggttcaaggtatagatacaaggagtgtagaaacaagaagtgttttgagaattgtatctagttcaatcttttgtaatattctctgttgtatagtggaaagtttctttctcatctatggatgtaaccatgtttgactgaactacattaaaactttgtgtacctttgtgtaaattgttttatctttgtgttcttgaagtaacattcttgaactaatattgtctgcattaaagctttcatttgcacaataaattggtatcaaaactcgagttgaagctttttggaagagctaaagagaatagagcacacaagataatgacaaagaattttaattgaaggtcttgtcaggatgtgataaaaaaaacatggatcaaggagagatgaaagattgacttaatgaaatttgacctaaggtagagattgttggaaaatgtcagaaatgcctaatttatatgaattcctttttgtaaagaatattatatagaatatttttttatattcatatgtcattgtaatattatattttcttataaaaaaaatattcagaatatctctataagtatttaaggtcatgagggaaaagggttatgagatgaaaatgaacttgaaaaagactatacaaggtagatagagatatgaggaacaatgggagacacttattggagcaagtggcttgtgttttagggtgtagatacaaggagcggagaaacatagaatggaaatgagcttataaaaactatacgaagtgaatagagatgtggggaataatgatagaaacctattggagcgaaaggctcatggtttaggatgtagatacaagaagtgggtaaacatgagatatttcgagaatccaatagttgtatctagttctatcctttgtcatattttttatggtataatgaaatgattctctttcatccatgaatgtagctgtcatgtttggttgaatcacgttaaaatctcatgaaccattgtgtgaataattttatttttgtgttcttaaattaacattgtgaaaaattttatttttgtattcttaaattaacattgtttggattaaagcttctgttgacacaacaaattggtattaaagcttgggttgaagagcagaaaagaataaagcaccaaagataatgacatggaattttagttgaagatatagttaattgtcctctcattgggatgtgataagaaaacatctatcatagagagatggaaaattgacttaatggaatttgatccaaggtagagattattggaaagtgtctcaaattcctaactactatagattcctttttttaaaatatattgtataggatatttcttatattcatatatcattataatattttattttctcgtagaataagagaagttattaggaatatctctataagtattctaggtaatgagggaaaaaaggttatgcattggagattattttataaagattatatgaggtggatagagatggggaaaaatggaagagacccagtggagaaaatggcttgtggtttaggatatagatacaaggagtgggtaaacatgggatgtttcgataatccaatggtgttatctggttctagccctaataatattctccatggtatggtggaatgattctttctcatccgtagatataagcatgtttggtcgaacctcgttaacaatcctatgcctttgtatgaattgttttatctttgtgtacttgaactaacattgtttacatcaaaatttcctttggtacaacaagatttacttaatggaatttgatccaaggtagagattatttgaaaatatctcaaattcctaattggtatagattcctttctataaagaatgttgtatagactattttctatattcatatgccattgtaatattttattttcttataaaataaagaaagttactaggaatatctatatgagtattttaagtcataagggaaaaaggttataaaatagagatcaacttataaagaatctatgaggtagatataaatgtggggaagaatggaagacacttggtggagcgaggggttcatggtttatagggtgtaaatacaaagagtaggaaaacatgagatgttttaggaatccaataatcatatttggttatatcatttataatattctctatagtgaaatgattctctctcatccgtcgatgtaggcatgtttggctagaccacattaaaaccccatgtaccattatattgattgttttatctttatgttcttgaattaatgttcttgaactaataatatttgtattaaagctttcattggcataaaaaaactggtatcaaagctcaatttgaagatttttggcagagtcgaagagaatagagcacacaagatagtgataaggaattttagttaaaggtggagttaattgttctctcgtttgaatgtgatttaaaaaaacgtgtatcatagagagatgaaatgttgatttaattgaatttgatccaagttagagattgtttgaaagtttatcaaatttataattagtacaaattcttttttgtaaagaatattgtatagaatatttcctacattcatatgtcattgtaatattagattttcttatagaataaggaaagttattatgaatatccctataagtattataggtcatgagagaaaaaggttacgagagggaaatgagcttgtaaaaactatatgaggtggatagagatatgaggaagaatgaaaggcacttggtgtagcaagacacctggtgtagcgaggcacatgtggtttaaggtgtagatgtaaagagtggggaaacatggatgttttgggaatccaataattgtatttggttttatcctttgtaatattctctatggtataatgaaattattctctcttatttgtggatgtaggcatgttttattgaaccgtgttaaaaccttatgtatctttgtatgattttttattttattttttatttttttgtgtgcttaaactaacattttttgtattaaaacttctattgacacaacaaaatggtattagagcccgggttgaagatttttggaagagccgaagaaaataaagcacctaatagttatattttggttctattctctgtaatattctctatggtatgatgagatgattttttttctcatccttagatgtagacaaatttgtctaaatcatgttaaagtcttgtgtacctttatgtgtaagggtataagcaaaaccgaaaaaactgacaaattgatccaaaccaaccaaaactaaaaaactgatccaaataaacctaaatagatcatattggttcgcttttcaaaaataaaaaagtttggtttggtttgagaattttaaaaatcgatattgtcagtttgtttttttttctttttttcatgtctcataatcaataaaaaccgaaccaaaccgatatttaaaacttatatataattgttggcatttgataaaaaaaaattatattaaattctattaaagcaattcattgtttttatattatggtcaagttaattctaaatatatttaatatatttttaacatcaaatccaagttagtttcaattaattttttttttaaatagacctagggcctaatataaactcaaattaatagtatttaagttcaaaacaaacacaaatctacatctaggtttaggactaaaaaagtttattaagttgggtcaaaaccgatctacaaaaactgaaccaaacaggcctcaaaaggcttggtttggttcaattttttcacttcaaatctggtcagtttggtttttatcacatataaaaccgatcatattgatttggttcatttttttttatccaaaacccaatcaaatcaaccttatttacacccctatttatgtgaattgtttttatctatgttcttgaattaacattcttgaactaacattatttacattgaagtctccacaggcacaatagatgttaattatatacaaactagtgcttcctttgtttcacctgtacattttctacttgctatcatgcattttatttgtagtaatgttagtctgaaatccaaaattcaactgaaaatatacttaattatgtcatcctaattgcactcatttttgtaattcaatgtgcttgtcttgtccattttatcttatttattatcttggtacttagtgttttaaatccttaatatttttataatgttcatgccttatcaggcatcgtatctcctgattctgttctgtcccaagaaatggtacccttctatctgaagttagttcatttgtttgagaaccaccttgttgtttgataggttacttgggtagaac

SEQ ID NO: 10529 - DNA, 11693 bp, Vitis vinifera
  Intron number 3 from transcript GSVIVT01017372001 (locus G SVIVG01017372001) derived from phytozome v7.0 (chr-ID chr9 ; pos 7495401 to 7507093 reverse strand)
acaaagttaaggtaatattccttagctgatctagttgtttgccctaattatggagtgtgttgatgtgagcttattattatgattgttcccttggtctcagatatggttgaaattttttttctaaaatttttgtagaagattctatgctatttgtcaaatggactactactatatatacaaatcctatcatttggtataatttctcacatttgacttcaacagtttacttaggtggttgcattgttgccattggaaggtcactactcaggttttccaggatttcttcggtcatacttgtttttttgtgggttaaaagggtgaagatctgttttcggcaatgttttcagaaccggaccggtcattgaaccggaaaagttaccggttcacggttcacctgttgaatcggtggtcgaaccgcggtcgaaccgatgacgtcataaatatgtaatttatatattattaaaattaaaaataattataaaaattttaaaatatatatgaataaattaaaaatcaataatattattttatatatttgatattatcaaattaaatcatattaaatgaaatgtgtacaatatttaaatgtgaatatattaaaaatgaaaaatttaattaattttatcatttttaaaaatattatattatttttatttaatattataaaaaaaattaaaatccaatatatattgttttgtttggcatattaaataacaaatcacgtgtagccgagtggtgtcctagtttacttacaaaacctaaggtcccagcatcaattcctcttgttgcatttgttaaatttttttcattgatattatcatattagtttgcaatcccacatcggattgtgagagaaataagggtgcaaaggatgcctataaaaggtatcctcattgaaagctacagcatgcccaccttgtgggctcaagactgagcctacttaaatggtttgggtgtgggctttgtcatgctaaagacatggcccagtatggtttttggcctatagcttttaattttttatacaatgggcttggaaaatgatgggccaatatggactgttcggttcgtttagaaccgttcggttctaccgattcaccggttcgactgctggttcaggcgatttgtaaccggtccaatagttaaacggtttaatagagtggaccggaccggaaatgtgaccggtcgacggttgaaccggttggaccggctggtccggtccggtttttaaaacattggttttcggtgtgtgtgtgtgggggggcgcattgacctctagttcctaatttcctaatctttgtagagttgtgtcaattagtctcttgtatcatctatccttggctcctcttccccttttgcttggaactttgacttttggcaaaacttcattgactcggagatggagtatcttgagagtcttattgttcattcttacttgtgtgaacctctcatggtcttccctagatgtgagagtttagtcattatcgtcttcaagcttatttataataatattgttcttcttggccttatccactcagttaactccaaatcttctctctccagcaaaattcatatggaactcaaaagcctcattaaaggtctagacatttgcttggttaattgctaataagagggttaacaataatgacttgcttcaggtaagaagacctttcaaatccatcactcctaatcattatgctttgtgtatgagaggtggaaaatcattgatcaccttttttacattgtctgatgactttggagctatgacacaagctatttggattagctaaattggattgggtccctcttagaagtatcaatgagacgatgattgttttctttagaggtttagggagtgttattagaggcaaagttctatggtaaatcacttgtgttacatcaatttggttagtttggtaggaaagaaacgcaaggctatttgaggacaagtgaaggaccttagagatgatatgagacctaagttaattctatttgtctttttgagcctctaactatttgtctttttgggcctctactaccgtaactttcaagggcattcctcttaatgttgttcaccttgattggaatttgtcatgtagattgaaaggattaaaataaaaaattgcggaggaatgctttgagactttttgttggagttgtatgaaacccaaaggaatgttgagatgcttttctttgtattgtctctcgtggcacgcttttgatttgtacttgagaaggtttctccatctctatttgttatcagattttgtaaatttaggaaggatttctcatcattcacttgttcatttaatccattttaatgaatatgtttgtttctgatgaaaaaaaaaaacaaaaaaaatcatagaatgaagtaagtaaattagaatctagatgttgacttttcacactcccttttaagttggttcaaagatttttatcataccaaactttgcttattaaagattgaaacacttgttatgacaatccttttgtgagaacttttgctaagtgttcctatgttgtcatgaatggattacaaatcgaaccactctttaatttttccttgatgaagtgtctattaatttcaacatgtttgattccattatattagattaggttatgaacaatactaatacttgtctccttgtcacaatttagcttcataagattcacttttttcatcctcaaatctgctagaagaatttttcgccatggtaattcacaaattccttgtgcaattgctcaaaacttagctttaacacttgacctagctacgactacttgcctttttcttttccaagtcattggatttcctccattttgaatatgtaattccttgaagtagacctcctattatcaatggatccatcccaacctgcatttgtacaagcctttactaatacgcgatctttcttggattacccagtgctggttattgcaggtgtggtcagcaccccaaggtttgggtccccatagagagtcctaagggcttagccatggaaggttcctcaattatccaaaaataaaaaactaaaaaaaaaaaactcgatctttcttggagaacagaaggcctttcccatgtgtgccttttaagtttttcaaaatttcaaagactaccttgatatgagcttcatttggtgagcacataaattggctaactacattgattgcaaaaatagtgtcaggtctcatataagttaatcagattagcttcctaactaatccatgatatcgacctttctcaacttgtttgctctcaacatgagctcttagcctatggtttccctcaatcagagtatcactaggtttacaccccatcatgccaacctctttttgtgatcttgcaaccttgattaccaaaaaccaagatccttggtcttaaactctttagctcaaaattgcttcaaattttccatctcatgtgtattgttttcattcaagatatgttatgtgcttacactataagaatagttctccttccatccttagagtgtctaaaagctatggtatggtcatcttgattttgattgtacccatatctgaaaagaaattatgtaaatttttcggacttggctctaagcaaccgcttgaaaccataaaaggattttttaagctcacaaacctttccatttctgtatatctgcttaaaacttggtaggggattcatgtactttcttcatttcaccatgaagaaatgcattttttacatctaattaaagtagtggttattctagatttgcagcaagagataacagtatcttgattgaatacatcttagcaaccagggcaaatgttttttgatggtcaattccataggttttttggaaagcccatttgctacaagtcttgccttatatctttcaattgatctatttaccttatacttcaaagcaaacatccatttgcattcaatagctctctagcaaagcaaagagtcattagctcccaagattacatatgttttctaaaagcaccatgttcagatcaaaagatttaccatttttcttagacctatctctttgagaatacacttgcaactcattgggtttttcagtttccttccccaccataagtagctgatcaacagatgaagttttttctaggttacttttggccataagcaaggtggaaggtggctataatgtaggaaaaggattagcaacaagtcttggtaacacctcaccatcccaaaaatgattttgtacactattgctattcccttaaggagaggctttgggtgaaataggattgtgactcaaagaaaatgacatccatagtaacaaaatctttcttagaggatgaaaatgtttatatcctttttgagtgggaaaatagccaaggaagacgcacttaagtggactaggatcaaacttatcttgatgatgcttttggaaatgaacaaatgttgtaccactataagcatttggtagaagaatgttgactaggtgggatgttggaaaagtgagtttaagagagtataaggatttgggtaggtattctgttgttgagataagaggctattaggaaaacttctcttgacaaatattttggtgctcccatggtaaataacaaagtccgagcaatgttaagtaaatgtttatttttcctcttagctatcccattttgtttgggggtatcaacataagatgtttgatgaacaatcccattctcactcaagtaagtaaccaaggtaggaaaaaaaagttaccctccattatccattggaataacttaaagtgtagcttgatattagttttgaatcattttgtgaagggtttggaacactatggttgtttcggatttttcttggataaggtagacctaacatacataggtatgatcatttataaaagtcagaaaccactttgccgttgatatgttggtcgcatgtgaaggacgctaaatatcactatgtacgagtgaaaaatgttcaaattgtttgtaagtttggatagaaaaataagtataataatgtttagacaatttacacaattcacattgaaaataagtaacctttttattctacaaaacgttcaaatttggagaacttggatgtcctaatccatgatgccgcaatttaatttaatttcatctttgcaacatggaaaagcaccaatatcagtagcttgagacaaacatccaaaaatatctaggtccttcttgaagtaatagagttcacctctctagcattgccaatgagtaaacaagccttaaaattcctaatgagtaggaaaaaatttagccgcataattaagatcctccgtcaattttctaattgaaaaaagattataagctaggtgaggaacatgcaacactgaatttaaggtcagggtttaaaaatagtaatagaaccctttccaataatagtagaaaaagaatcaacaacgatcttaactttctacctaaacaaataacataactagaaaataaacttgatgcacaacacatgatttgttctacttgaatctatgatctaagatgaaagaaattttgtcttgatacatgaaactacctataagggaggggggagaataggtagtccaagcaattaaccccaaatttaattttttttattccaattatccaattacaatcaatatattattgatcctatgcacaagatttccaaatgcgtaataaatacaagatataacatggaaaaaccattttttttttttgataagtaaaagtattgtattacgaagaggcgctaaattaacggcccaagttgtataggaaagagacgctcacccctttagagctaaaacaaaaaactgtccaacaagatatacaaaaaacaacctctccctcaataggaacctacccaatcaatgaaatccattaatgtcgaaggaccattgtttagaccaaagtaagtaaacaaaagaagttttcagcctttggatggacaacacaccatcttcaaaggcaattctattccttaccttccaaaatgaccaaaacaagcataaagggcttgctttccaaattgtcctacgctttttacccataaaagacccattctaatccaagtgggtttccataaccaaggaaggaaacacccaagacactccaaacaaagtaaagaacaacttccacacatcccttgtcttttcgcaatggagaagaagatggtcaatggattcttcatgcacttggcaaaaataacatctatttgctaaagcctagcccctcttctgaatttggtccaaacttagaactttcccacaaagcttcccaagcaaagaagcttattttttattgcacacaagagttctgaattatctttattgggaaaaaaactgatgagtccggttctaaggctttgtaaagagactttaccgggaagtttctgtccttcaattccaatcactgcaccctatcctcctcatccaaattcactctcttcccacacaaacataatagtagcctctccacctcatccatctcccaatcattgaaaggcctagagaagcgagggctccaactcctcccatttccctactttgtgaaacaatccaaacatctttcacccaagcctctttgggagtagctaaggcaaataaagaggggaaagaatcacacaaaggtgtagttccacaccatttgtccttccaaaagctcaccctctgtccattacccaccacaaaggaaagtttagacctaacgaggggcccaagcttcttaattgctttccacagccttacaacatggaaaaaccatctaacatccttaggtgtgagaaaccatgactgatctcttgacttgttgaataattcaccaaaatatgagcaaatggtgttagttttacttgatcggatgcatctactcactagggttttataccatcaacacctatattccttttccatgtccttgacaaaacacctacttgtgcactttaatggatcccttgaagctcttaccaaagtttacatagtgtgaatttttgacctttgttatggtcgataggtgttttcaagaaggatcttaaaaggtttgaaagattgaggtacaagctcaaagaatgactatattctctagagttttgaagccctcaaattttcaataaaaaaataacctatatatacttaaaaaaaaaaaccctaggaattaattttgaagagtttctcgattttaaaacattccaaaaacgtgttttacagttagaaaccaaataggaaatacaaagtaatttccatcctacctttttgtatttagtcattccaaaagttttactaatccttaaatgcatgcatgcttcaaaagaaattgattgaatgagtctaaagttgagtttgaagcaatccgaaaataaaattgaagtaataagactcaaggaagtatgtcgcatctaatcaatatgtaatagaataaaattgtcagtctaaattgatacatcaacataagggatagaatctcgaggtgacattcaaaactgtttaaaaattgcctatttgaactagtttggatgaggaagaagggttagaagagaagtgtgcttgacttgtataaacctttgtaggtgtttcgactgttctttggtgaagagatttgattcttgtttttgtacactaatagctatgactctatttgggaagtgtttttaaaaatagttctgaaaaacagtttttgaaaattgttctatgatgttatgcagaaaaaagtttgtttaggaacatcaaatgtttttaacttattttctatgtttttaacttattttctatatttttaaatatgttttaaaataacttttatatgtagcgttttatttttaatcattttccatatttgtataattattttttaaaatagccataaaaaaacaagtgaaaacaactaaaaaatgttatatgaaaagaactaggttttttatttttaaaaacaaaaaactattttatgttttttggttgtcaaatgtattttgatttttgttttagaaaacaaaaaactgttttaaaaaacaattaccaaatagggcctaaactatttggagcattttctgctgcagtttgcaagcttctactattatgtccaacaaacttgtcacctgtcctccaattttgtggcttgccatgtagttttcaataggtgttctttgtatgtctcgactcatggcaatgctcacacagcaggttctctttttcatccctgttcttatttgtattttctgctcacttgcctaaatagaagcatatgacacagtagaaatgaagattgaattctcaatatttagttcttcccaccatcacccttcttccaatttgtcccttctaacaaaggtataccactctaagtagctgaagaggttctttgttgagaacttgtctatgtacttgatctaatatgattttaaaccagctagaggttcaaagacctgttcttttttctgcatctccttggacttgtcagcatcagttctcaattccaatctctatcataattgagattgaactcttgccataaccaattcattatattatagtatgctgttgctgtatttccaccatttgtctcatgtgtttgacatttaagatcatacaattgagttgcatttcccaaattcgaataggtctccatatcaaccacccacaattctccagtggataagtagagaaaagcctggctatgtctggatccactgagttaataagccaagacaaagccatagaattctcatgatcccaagcttcatatgcaagatcattagtcttcggtgcttgcaatgagccatctaagaatccaatcttcccttttcctttcatagaaatcttaacaaattgtgaccattgcaggaaactttgttgatttacgttatgagtggggttatatatgcaaaaggattttctgtaacaccttgagtttgagattgactagtggctaggtcaaagccaacatcttgagtcatctctgacattcttccattaaataataattaagttagagagatatcaaactcgtgtgtcagaaatgaaggtgaaaaccaaacaaaaatgacaaacccatgccagtaatgaaggccaaccggcagggttaatagtggtgcagagaaccacacctatgatttacatgggaaaaaacccaactgctggcgagaggatgcccatatatcttgagtgtgctttgatatcatgttgtgtaaattctgaatatttttttttattttgtcttataaattgtacaatatatcatttacaaaaatacaatgggaacaacctaggaaaggaagatttgcagctatacaattcctaaatcataatttggaaatcaaggagaaaaacttgtttctgggacatttatattttaccaatcagtccagaatcaagtgaaccaaaatctagaggttgactttccacaagtttaactacctaaccaacaaattttagtgattcattcaatatggcattcatgttatatagtaattctgaaacttaggtacataacataatgatacaagacaacattacataacataatgatacaagcccttggcccaaatgtttgctctctatgtatgggtagtggagaattgatagatcacatgtttttacattatgcgacgactttggagttatggcacaaactattcagactagctagtttggcttgggttcctcctagatatgttagtgacatgttgactatttctttttaagggtttgaggaatactcctagaggcaaagtgatatgaaaaatcactttctttcatggatttgaatggtttggagggaaagaaacactgatcttggaggaacaagtggaggtctaccaaaatgatgagatctagtctacttctattcatcattttgggcttctactactacaacttcccaagacatttccctcaacataattcaacttgattggatatcttcaagtagatccaaagggttaaaatagcaatattgagttgttttgatgtattatggggagtattatttttcctctattttgatcagcttttgtattgtagggaaggatttctcatccttcttttgtacctcatttttaatgaaaatgtgtttgttttttatcagaaaaaaaaggaagaaaagatgtcaaacttttgaaaatattagtaaataaattaccatgatattgatagaatttttgccaccgctctctgtctctctgtgaatgttgttgcatattcttctgccctaatctagaaataccagaaaattgtttaacatgcatagaaacatcgtctagaaaatgattgttgtttgaaataaagctgctgagatggattagtgtctatacaagaatagatagaataaaaaaaggatgcatgttaaagaaagtgaaagggaccaattaaggacaagataaggaaaagtcatttactatggtctggtatccaaggtggtgaatgcttttcataaggacggtgttatatgacttggtgaagaatatgtactttagatagagctgaatggcgaggaagaatttacaactggcttttttgagttgggttgagttgaactatgctgtaattgtacaagctcagcgtcaaaataaaaaaaatagattgatgcttaaaaaaaccaccacaagtaatcaaggagaatggctccatgtaaaatagaaaaggtcaaaccctatgaacttacatcataaatggataagaaacaatacttgtattctatttggtaaaaggaagtagtaatcttttatttttcacgcataaggaaacaaagcatcaaaactcaaaagaagcatgagatccctactaaatcaactacagaagaggcttctctcttggcattatattggaaaaaggatcggaaatccttcagaaaatgtaaaaaatgtacaagagtataaaatgaaaaggaaaaacaaacgactttgctgtaaaaagtcttttgctttggaggagagcatcaaaactcaaagaagcatgagacccccaacaaattcaacaagaggatgggctcttctctcgaccagcctattcatgtatcgattagttgatctaagctttcaagagaaaaaagcaacctaatcaccaacaaagatccatatcatctacttcaatgattatatttgtgatagattgatgacatcctacctaattgcaactatgcaatctcaaggaaaacaagtatttctaccttaataaaacctggttttctttgaaaagctcgaatgttcacccttacgatattgagtatgtcctctaatacttatctaatccttagtacctgtgaagtgtccctggaaattaagcttccaaacaccgattggcgaaggaacccacaaagcctgtaagtccactttcctaatagggaggcatactgaacttcattcttgccaaatggtgctgaaggaaactccttgaactctatagatctccttgataagtgacatccaaaatacacaattaggaattagtcactttctttatagtaaattattgttgatgtgcacagaccaacaagaaagactatgttagatgaaagtggagatttcttgatagactttgcttggaccacctatgttgagtctagtgatcaaggataaacaaaaatactttatagagtttgtgcataggacttatccctgtctatttgcaacattatgcataatgctttctactgattaaaaaacttgagaacaagttctttgctatgtgcaacttaattttttcttttcttgtttttctagatcgacttgctgccgcctccta

SEQ ID NO: 10530 - DNA, 5026 bp, Vitis vinifera
  Intron number 1 from transcript GSVIVT01036214001 (locus G SVIVG01036214001) derived from phytozome v7.0 (chr-ID chr1 4; pos 8849038 to 8854063)
agggtcttccaagaagtcccagttggtttctttaggtgggtttctttaacccctcgtttgtctttgctgggtttgctttcaattttttggatttgtgaggggggtgtgtggtgcgggggaaccattgtgtacgagcttgtttaagttttgaatgggtttttttttagtaccctttcttgctattttcgtcaatttaagatggagttgttgcaaatgacttcaatatattaggatcttgtgtttgtattccagaatttatgaactttcttttcatgtctgggtttcagtttttaaatgtttttaatgaaagtgctttaactatttttcctattttgttgcaaatgtcttgaaattatcagggtttgttgcaaatggttgaatttattaggtgttttggcatatgacttgaatttatgaaagatatgcgtgtagatcttttatttatttttaagttttctcactttatgtgaaatttcacaagccattttagttgtttgtgttttaattgtttctattatttgctttgatgcatgctctgtaacggattcgaatggggtttccaaaacatttcaagggtttttttttttccaactttgttcagtatcattccttgaatttaagagggtttgatgccgattttcttgaatttaagagggtttgatgcatttgttcacattctgttgttgagtcctttcatgtatgcctatcaggatttcttttagtgttatttaaatgctgcctttaacttgtctctatgagagggtaatttgtataaaaagctttgttgtgattgttggtttctgaaattcatttatttctcttcctatttccttgttagcttcttaaatttatgtgagttttgtttcaaatttcttaatttttcaagagagttttgttttaaatatgattttgttgcacattttgttaagctaaatgattaactttacaatctcttctatgtcaaatttcttgaacgaaacatgattctgaagggtctaagatgtgtgacatctggaaatattggttctataagccctttcaaatttatagtaaactttgactcttgttttttaggtctctcacctatcctatcccaatgtaaaacttgattgaacatgctcctactagtaggaatttgggtttccataatcttagcttcagatttttatttatttatttatttttataaacattggatgctgcccttttagcttgtctttcattttgataattatgtggctcctataccttgagactcgctttttaggaaagcgaaggtatgttactcacggagaaaaaaactacaaagaggagagatatcctcaagaaacacgacaagcagaaaatggtaaaaaaataaaagaaattccttgtccacattatataatactgtctcaaaaagaaatcttgctatttagccctctgctttatactagatgggatcagaattctatgtaattctgtctaatcaaacttatctcttcaattaatcattgaaatttaaatcttttctttgtattacctcctcctttctcatatatctctagggagacatttatattgtataactgcctcacatttttcattctacacatctaaaccatcttaaataacaaattaatttatcccttgtttgggcttctctgctaggcagtcccatttatgtgtacatgtgtaattctatggagacattacatttgtataactgcctcatattggtttcattccatatgtcaaaacaatcttgaacaataaattaattttcccccttgtttgggctactggttggcagtcccatgtatgcatttgtgtgactgtattttgatggggaaatatagatagtatattaaatcccatgcatctccatttcaagtcttatttgatctaaccgcttgacccatccatcttaactcctatcttgactaccctatcccaagataggcatttgttgttcgcctaatattctacttttatacaggatactgtatcttactcttgttttgtatagaaaatttccaacattgaatgcatggagtttggtctaaatcgaaatgcaagagaatttagttaggctcatctttctgcttagagggtgtttggtaaatcaacttaataacttaatatgacttgatagtttataagtcactaagtagattaagcatgttcggtagcataacttaatattacgatttaaaattatttttaactttaagtattaagtcaaaatagttaacttattctaatctcaaatcctttttgcctcatttgcccatacttgtgaaagtatattttagaattatgattccacatccatgacttattttttataataaataatttatgattattttatgtatctaccatactttaaatatgaatgttttataaataaatttattgcttaaaattaatgaaaataaatacgagttaaaattaatgaggataaatattagttaaaattagtgagggtaaatatgccaatttgatgatttagaataaattttaagttaattttactaaacaacttttatgcttaaagtaaaagataagtaataagttttaagttaacaacttaagaacaattcaacttaaagtcaacttaagtcattaaataataagtattaagttttaccaaacacccatttcaagattataattaaagttacttctagaattgagagaattaaaagggatttcttgtggtctaggatgggcaagggcaatgagatccttgatggatgttctttaggtagtccaggatagttgtgttaatggagtttctcaagatcatgaaagagaggtggttgagctttttccatgcctgctggattttggattctttggtggctcaaagaaagagaggcacttggaggtggggttctttggtgtgcaggatattggatctttcttcacagttggggtgttattttcagtggatataaagattatctaaccaataccccagattatctggttaaatgttgtgctgttaagttattggttttttaggggataatatgcctccctaaggttgaccctttttattgcatgttttgttttcccgggttctatgcttcttatctttatgtagtttttctttgaaggcttctcatggctcttgtacttttttgattcatgaatggaatggatttattgtttttaataaaaaaaggaatacgtggaattcaagtcaaataagagaaatctggacggatgattttattgtctatgactctgtagataatatcattttattggtgtattatgagaatatacaaaagtggtagattatcaagaggtagattgtgaagcctttgatcagattgcagaaagcagactttgattttccgcaagaaggtcgtccaggggcagtatgtttttctatgttttttgggtgttagttttgtattgggtggtggtttgttgtcactcttttccttttgcttgccttttggcattatttatataccccgtgtgtactttggcgcacattttccaagcgcttctaatttaactctttattttacctaaacacacacagacacacataaaagtgggctgactgaggaagatgttacccagagaggttgaaattgtgtggctaaaatggaaatattattctagggatgttatgtcattgttcatttcaaaagggaattctataaaaaaaagcaacaagctatgctttatcacgaaaaatgttggagaagataaatgaccttttctagagataggtttaattgtggatatggatgaataggagaacttgaaaaagttttgggtaaaatttgtggagtagctgttgtgggtgatcaatcaataactttgcattgtttgagattgttttagcatgtactacaaggataaggccacatggggttttattgcaagcagaaggctttaaagcaaggggcaggaggcttgaaaaggacacaaatagggttagaaagaatgggtaaaagcgcatgcttttatttgctcttatttgataatgaaaaaattgtctatcaaaagaaaaaaaagaaaaaatattatggacattttgttgcttcaaactttccaaggtcatgattttctatgccttatttcatgcttaatgcttgctcatctttttgcttaatcagcatggcagcttagcctgttactaatgtatttttttttttttttggaaacatagatgcatatggaatgctactccagcaatgtttgttaatcctcattgtgaatcattttccataattaaaacttgtatatacataatacattttaggacatcacaataatcaggaggtacatgctaaaaaacggttacaatcatgattggtatagattttctttataggttggtagagattaagtgtcatatttggtttttaaccatcggttttggtaatttttgttttctaactctctctctctctctctctctctctctctctctctttcactctatgtgtgtgtgtgtggggttggggaggaagagggagtgtgaattggggttggaggggcagggtgtcgatgactctcatttattcttctattagttcatacaggttattgtctattgttctagattgaaacctgttcatagatatgttggatgttctaattaatcaataacacttaaaaatggttgttgctgtattgataataaataacagttcataaaaatgatgccaatgttaaccatagtggttagcttcattttgtaggatgtggtatgggctgtgaagtagcctttgtctactgtttaagaggtctaaaacctgttcctatcattggctggttacaagactgatgtctcacgactgatttctgtcttgctacttctgaaagcattttgttcttcagttatatggactaatatcattttattttgcaatatcatgttttatttaaatttaataagcttacttgatttcgattatatgttgttaagtaatgaattcttttcagtttttactgagttttaagataatatttaatacttatatgagcttctactttgaactggatgatgcaggca

SEQ ID NO: 10531 - DNA, 1339 bp, Vitis vinifera
  Intron number 3 from transcript GSVIVT01021513001 (locus G SVIVG01021513001) derived from phytozome v7.0 (chr-ID chr1 0; pos 6439871 to 6441209)
tcagtccttttgtacgtcttaataattacttgcctcatgcactttttgattctttgctttttttcttctctaccttatttttacttctatattatattttgtttcattttaggtttatatgatatttttcttgtatttcattggtttacaatttgttattattcttttgatttttcaaatgcttcttggcttgtttgtaacacatgctgcagtaatgtagatcttggtttttgtttggttgcttatctagttatacactcatcaaatggtgttctgattttgtagtttcatttgggcagttaatctttatgccaaataagcgatgtggttactgtcttcttgttctcaattgtttttgtgtattgacaaagaatggaaggaaataacctcctttgtgtcccttcaggtgcttaaccatactatttatctgactagaaaagcaaagtgaattgggaaatgaattcttaaccagctgcttgatgtgtgattaaaaaaagaattctggtttgtgattggtgaatggttgattggtttatgagttctgagttccctttttttcaccctatcacatgtcaggcatttgggtcaggagatatttgagaggtattgtggcttggtgcacacagcatgagatttatttgctagatatcagcagtggtgaacacagaaaattctgtttggggggcaaatttaacatgagagaaaggaaaaaaaattgaacaattaaatacaagaacttaataataatatattccatatattttcaaggcatatgaatgcactggcctgaataactgatttggttcaggttgaagacaccaaatggatgtgagaggccaaaaaggatttgggaagaggcaataaagaatgacataatagccaaagatctacaggaggttatgcctttagatacagttggatgatgggtaaggattcatgtacccaaccccagggtttatggctttgtttggttgaatgtatacacactgacacaggttgaaacctgcttctgcatcacgtgttcatgttagtctcaggctttttgtactgaagtgataaagacactacaaatttgtaaggtactgcatggtgaattaaaatataggaattccaatcaggacttattttgattgtttagatccagacactttagtggtgaaagaagttggcaggttgcataacagttgttgcacatatgaactatcatgcttcataagatggtttgtccttaaatttgtgtttattgggcataatgtaatgtccctttcttaagctcatattttggtatgaatagtgattcttcactctgaataagcatcgttgtaaatatttgcaggat

SEQ ID NO: 10532 - DNA, 3617 bp, Vitis vinifera
  Intron number 1 from transcript GSVIVT01034754001 (locus G SVIVG01034754001) derived from phytozome v7.0 (chr-ID chr1 3; pos 9023625 to 9027241)
gttggttaactctcctatcaagtgatacaatagaagtaagcagttctgttgtagcaagtgaatatttacatttccttcattccattttgtaggtagcaacattgtatttcttggttctaaaaagatcaatacatatttttaacatagtctaaatgcgcttttggggatatattaggcatcaagatgaacttggtttagatcagcttattaggtatcctctaacaaaggttaaatatgaaattcaaagacttgcctggttcctatcttcaaaaacacttttcaagaataggtttttttgaaaataagaacacagaacatgtttcagagaaaatcatctgggtagcatcccattttttaactaacattagaagacttttctcaagtcacttaactaaacagttctttaatctgttagacttgttcctttttttttcagctctccaagcactgaaccaaatggttatattgatttcctgtttctgtgttcttcaagacagaaagttgttatcatcaaacagaactataccccccccatgcttcatctgtgtccgaatatatataaaatatctttagttattgctgggaagtaattctatgttagattaatatgttgatcctgttgtgaggaagtttaaaaatagatcaacttgtggaagaatcaattttttgtgagatggaatcactactctctaatccatgttttctagcctcatgttttgatctatgccacttctcaaattttgtggggatttagagaaatggagtgcatttacctgtcaaacttagttgacattttcataagatctacagttttatggttggtggggcatatcaagcttgattagcttagtatcatagtttattaatttagacttttgagtcaccaaaaagttttattctacaatttaccttatatgaatcaaagtcccaactttaggtggtgtttggatacatttcctgtattttgttttttttagaatagaagaatagtattggctcctatataaaatgtaaggactgttgaaaaaccatttttcctcatttgtttcctctgaataatacaagtttataatgcatcatatagttgacttctaaggcctaaaaatggaaatacagctacctattctaatgacactagatttttaggaattacacaagtaactttggatggctatgcattaatttacactgctatacaatctattttaggaaggagaattaagtcaaaatattgtcaaatattcaaacaatatttccatttcatccttattcatggccagtgttgtagtctattaggacgcaaactctattcttaacaccattaaatttttattattttttaaatgtagtaatgagagcatgaaaatattgaatgaaataaaaaagatgacatgatctgctaaaattaattcaatgtagtaacgtctgcatgtgtaaacctcatgttgaatatttcctcttggtttttatttatttattttgatttgtttgcatacttgactgaatggtaagaggacaatgctgatagaatgtgccactctccagtctacaatccctggcagatgtaaaaaattagaagtttgtgaaatatggatcttcttggaaattatgatataatttggctttgttaccaaaagatgtgacctacaatttttgtttagatttttaagatatacattctaagaaatattggtttaatgctaaaagcataaaatttaaggctctgttgtggatagcttttaactcatgcttttgatctgtacaagaagtagagcaagtattattgttgtgcagttgattttatgtttaatttctgtattataaaaatgcttttaagaatatggataattttgacattttgaaaaatatccattcaacagaaatacttatccccatcatgtttgagtagaagttgtttttcaaaatgtaaataatcatgttgggaactgtgagttccttatttgagagttttatctgaacatctttagaagttacgtttaaccttcaaatagtgctcttagcatttaagaaactctcctaaacaacttagtaaataaagagaagagaggagaggggaacataatggatgatagtggatatctaaagatgtggaacatcactgcttgtaaggtaatttttatttgtttatttatttatttattttgtttgaaaacttcattgactatgttgataagcttagaatgactctctctctccctctctctctctctctctctctctctctctctctctttctctctcatcttctctctgcttatctgtgtattttagacttttaaaaaatttttttttttaaatcattttattacacaaagaaaaagaaaagaaaagaaggggagaaaaaaggaaaacaataacaagaacgcttggcccctaatgattgtcaaaaactattatgtcatctgactctgtttttcctttttctatatttctcaaggagatcttgtccttttctgtgtcccatatctttctttcagtgatgtcacataagaaagtgatgagaaggagaaagtaaaagagaagaatgaaagtaatggaaatgagagaattgtattatgttggtctcgttacaagagtcttgtctagaagagaagtcaatgatgtggtgtcccaccattgagttcaagatctctagaggattattatacattaatctgctcagttgtttctataagctgtatttatatagaataatagctgctaatgcaatttaaaattagagacttcaaagtagaaacttctactgaacaaataatttctaaaatctagaagggtccacctcagaaagccataatgaaacaagaaacttctataattattgcttgtacagaaataaatatttgacatgaaggcttaattgccacattttactcttaaatttggaagttttgttgagatgatagatccatgggtggaatcaccatggtctttgcaatttttttttgagagctatcttcatcaataaatgcacaatgatatctgtcggttatttgtagacttatgctttccagaattccacttctatcaccattttaaaatgaaaataaagtggaagacaaagactgacttgtatagatagactgcccgtaaaggttatgaagtcaaagtcaaatcaaccattcacttccggacctaggcaatagagaggcgagacatgtacaaatagagtagacatgatactgtctctatgactgaaggacttcaaaggatttaagcttcaagtctgaaaattgtaaatcttgaatcaatgaaacaaaggaaagatgagtggattctctgggaaaggatgtgagtctaattctcagatagtttgtagtaaattcagttaggttttcttttgacaagaatatagttctgcacttaatctccttaaagctgtgatgagtttgaatctgctttccccatttgagcccttcattatctgaaacttaaattaccactcaatgataaaatgactaatctagttgtgagttttgtttaattagatttcattgtaccattttaagtttccttgtttcctagtaaaataataagtttaattttggtacaacattgttgtaggcattattttattcagcattactttgtgcacggga

SEQ ID NO: 10533 - DNA, 3639 bp, Vitis vinifera
  Intron number 3 from transcript GSVIVT01027681001 (locus G SVIVG01027681001) derived from phytozome v7.0 (chr-ID chr1 5; pos 14366216 to 14369854)
tggtttagcagctcctgccttaaacaccagtaagaagtgcttctttttttctcttatcttctataaatttgaatattcaaagcaacctacatctgagcaaattttatctaggcatgaattgtctttagtaaatgcatctcatgaagatggttgtacaggttgtacagaatggtcgatatcaggcaaacggatctttttcatttttgcatccctagcttctctaccggggagggcaatcataatgacatttggttgaaatttattctactaaccattattctcagcataaaaatccttcgaatattttatagcttaggcaatttagatgtttagggtggttggttatttagccagtattgaaataattctctatatgtattcatgtgctatgacatccatgcatctgtttacaaatcttatttatactgaaaatccacagtttttgtctaaattgactcgggccatgttagcatgcacagtgacttttggtagctattttggaatctatatatatatgtgtgtgtgtgtgtgtgtgttgttgatttggttactgggatatgcatccattggcagataagtcacatgccacttttgatttctctaggaatggcatcatttttttttcagtctcctttttggtaacttattgtaccttatcaatagaggtatctaagacatttttttaatatataagtgggaaagattactcgtgctaatcagatgaagacaagtgaaagggtttctataatcaaggatgaaaactttttgagttagtggcatataattctagcttgtgctatgtccttgctcctggaaaatttgaggagtttgaagcagttaatatcgtaatttttctctagttgggattccataattcttggtacaactgaaatgtctttgatatgtattttctgcttatgaattttcctactcaattcatttgtctggattcatgaacataagaatattgaaaaggctttaaaatggggaagcacaacccaagtaaaaaattatctactcacttgaccgtatataaaattattagcagtttcatgactagtctaggagtatctcttcagtcagtgctttgatcatctcaagttttctgatcaattcatcaagaagactctattgagcatttgaggtagctcgggattttgggtttgaacaatgaagaggtctctatgtttgaaggattaatttggatagaagtgtctcgagaagccaaaaagaaggcgagtgcataaaaagtccatgaaaaaacaatgtggtttgtccgaactatatctaagctaagtgcatttggggcttgattttggcagtgtggtctggacctttgcatatatgttccagacttgatgtacacaatgttttttgccaatgtgatctaggccttgactaaagaagttcagacaatatctaagccaaatgctcattttctcaacgtggtttggaccttgtttaaagaagtttggactatatttggcagaatgccttttctccttgttacttcattgaagtcccaacctttcactaaagaggtccagaccatgtcaagctgaaggtgaatttgtgggtgttttgggtatggtagagaattggtcttcaggcaaaggttgtttaacattggtcttgagtctttttacatgggaaggttcccaaaatcccaactgagatttaatctatagattgaatgttttgattttggtaagaattcttggaaatttttgaagtgttttgggagaattcttgaaggaaaggttttgacatttgacacttcaagttgactatgatttcatctttgattgggaaaaaatttcaaagaatattcaaattgtgttaacatgttgaagatcttaagcaaggaaagatcttttggtgaatttggaagttcatttatggggaagattttggaaagtttgatttttactttgggatatttgatttgatctcttaggtttcaagacatattattatggaaagattatgtttgacttaggtttcaagacattattatggaaagattatgtttaactttggaagatttgacattttagcatcaagtatagaatatttgaagatgaatattagggaagatcattcttaattgatgtttgcctatgaatatgggttgatatttcaattgggagagatcttgtgcttgtctaggaatgttttcgaaaacaattctcaaaaaagtttttgagaacaattttcaaatatttttcggaacaaaagtctgtttgaggacttggaatgtttttcaacctgttttatgtattttcaaatatttcttataaataacttttatgtgtggtgtttattttcaatcattctccatatttatacaatcattttttaaaataggctccaaaaaacaagtgaaaacaatgaaaatttgttctcaaaaaagactgttttcaaaacaagttcacataaaaactatttctgttaaaaagttgtcaaacgtgttttcgaatctggaaaacagttcagaaacaggattcttaattctcagaattttattgacgaaattattgagagggcattcatctttgagatctggttgctgatccttctcatcttggaattagtattaaagattgattgaagatctacaggctgagattgattagttgaagctgttgttgatgagaaaatctcaaccactgcttgagtgctttggtgagacaccagggtagcatctgtaagttccagcagatcttagtgggagaactgagagctgtgcttgttgtttgcagaataaggttagaagtgaagaggcttaaggtggcacaaccaaatagagtcaaggggattgaaagcttaggttagtaagactagtcttgtattcgtattttcaatagtggaatgctcataaccttggataggctcatggttttcacctcaagttgacgattccgcgtaaatctgtcttgtgcgtttgtgatctgatttcttattatttgcatcacataaccaccaatattacagcacacataaagctgtatataattaagaaatataaaggaagattaattttaagcaaatcaaaatcagcaaagagtcaagaagattacactgcagaagagcatgaaaatccttatattagaataaccccaagattttcgtaaattaatacaacccatttcttattttaaaattatttttattattaacttgttttggttttttgcatctatggcccctcacttgggacccttatgaatgagactgagaatctgagtgctttacttttcgagtattcattttggtttctgacgcaagtagccaccaaaaaaatgctcttattttcacttttactaaaccatatggtgttctgtgtgatatcctgtgaattacccacccattttttattattatattcaattttccctctcgtatgaaatgttaatttgtagttctctagcttgctgattttgtggattatgcaacagcttttgtttgctttagatgaaacttgaccattggatgttttgtattgaacacctgcatgtgggcccacagctttgtgtatattctgagcctgtggatctgctttatgctttgccagctgtttcctaaccagggttatttttggtaggaataggaacggcttggccttttcttcttggtggt

SEQ ID NO: 10534 - DNA, 8452 bp, Vitis vinifera
  Intron number 4 from transcript GSVIVT01017719001 (locus G SVIVG01017719001) derived from phytozome v7.0 (chr-ID chr5 ; pos 2884428 to 2892879)
ttatactggtgccaactgctgagttggcttctcaggtcagtttctgtacatggtttactttgacttcttactcttcccatacatttaactgtgtttctctgcacagaaagacctagctagaccccataaaattaaaatattatttcatgcttgcaattgcagagtctaaagaaatactcctcacatttgatcaaccttgaggacttttgaacgtcgtttaactgataggaatcttttttttttttttttgatcagtaaacggaatatattaacacaagacaaaaaagccacatagcatacaggcagtatacaaagcggcaaaggcctcacaaccaaaaagagagataggaatctgttgaatataatgtatgtatagtatactatctttccttgttaatataggtcacatgtatggtagttaggactcctagccttgtatatatatatctctcaattgtaagtagagattagatgaatgaaaataaggtttttctcctttctctctctctctctcaacatggtatcagagccaaaggagaaaacctaatttttcggtttagccgtgtactcaattccggcgaaccctctcttcccgaaccaccccggacaacctcatcgccgtcggatctccaccacgccggcaaccctttccggcgaatttttccggcgacctcttttccgggcaccgaccacatattccgaaccgccggaggctgatctacacgccagtggaaaccccaccggcaaccggagtctcacgcgcccccacgcgccgatcttccccgtcggactgtcacccacgcgccggcgcgtgacggcgcgtggctcactttccggccacgtccgacacatctccaggctcgtccggcggcgtcttggccttctagccctccggcagccccccccgagccctgcatctccaccttttgttctttttttggctttcttgccattccgaccacatctgacagggcttcctctccatctccgaggcttgggtactgcttctcttcctctccaggcacgtcacgacctttttctccgttgattgcacctctcacagccgtggtctcactgtttgtctctctccgccgaaatctgcacccatcttagggctctcttcgatccaaatacgtgaatatgaccatcaaaaatcagatctttacctctgttctctctggatctcctctgattacctcagagaaattgattggcagtgagaattatctctcctggtctgcctctgttgaactttggtttatgggtcaaggatatgaagatcacttggttacccaggaggcagatatccctgaggttgaccgcgtacagtggaggaagatagatgcccagttatgtagtgtattatggcaatcggttgatccccggattcttcttcatcttcaggcctataaaacttgttttaaattttggactcaggccaaaggattatacacgaatgatatccagcgtctctataaggtggcttctgctattgtccatctcagccaacaggacttggatctatctacttatattggtcagattgcctctcttaaggagcagttcttgactgtgatgcctcttactcctgatgttggggctcaacaaacgcagcttgacaagttcttcatggtccttactcttattggcctccgtccggatcttgagcgtattcgtgatcagattcttggtagttcatcagttccgtccttggatgacgtgtttgctcgcctcctccgtctctcgtccacacagactttgccatctgctagcgcttcagattcttctgtgttagtttctcacactacctctcgaggaggacgcagtggtacccgaggtagaggccaacgtcctcattgcacctattgcaataaacttggccacactcgtgatcgttgctatcagttacatggaagacctcctcgcactgcccatatggcccagtcctctgattctccgctgcctcagcctccgagctcctctgcatctcagacatctcaggcttctattgcctctgttgcccagcctggtaatgcctctgcttgccttacccacacatcgtctcttggaccctggattctagattctggagcatctgatcacctatctggtaataaggatcttttctcctctattactactacctctgatttacctactgttaccttagctaatggttctcaaactgtggctaaaggtattggtttggcccttcctctgccttctctacctctcacttctgtcctttatactcctgaatgtccttttaatcttatttccatcagcaaaatcactcgtactcttaattgctctattaccttttctgataaatttgtgaccttgcaggaccggagtacggggaagacgattggcataggacgtgagtctcaaggcctttatcacctcacctcagattcatctcctgcagtttgcatttccactgatgctcctctcctcattcacaatcgtctgggccaccctagtctctccaagttccagaagatggttcctcgtttttccactttgtcgtcgcttccgtgtgagtcatgtcagcttgggaaacatactcgtgtctcgttcccaaagcgtttgaataatcgggcaaagtctccttttgagcttgtccacactgatgtttggggtccttgtcggactgcgtctactttaggatttcagtattttgtcactttcattgatgactattctcgatgtacttggttatttttaatgaaaaatcgagctgagttattctctattttccagaaattttatactgaaatccaaacccagttcaatatttctattcgtgtgttacgcagtgacaatgccagggaatatttttcagcccaatttacttcgtttatgtctcatcatggaattcttcatcagtcttcttgtgctcatactcctcaacaaaatggggtagctgaacgcaagaatcgacatcttgttgagacagctcgtactctcctcctccatagtcacgttccttttcgtttttggggggacgctattcttaccgcttgttatctgattaatcgtatgccctcctctgtcttacacgatcagattcctcactcccttcttttccctgaccaaccactttatttccttcctcctcgtgtctttggttgtacttgctttgttcatattctcactcctggacaggacaagctttccgccaaagccatgaagtgcctcttcttgggatattccagacttcagaagggttatcgttgttattcccttgagactcatcggtactttatctccgctgatgtcaccttctttgaggactcaccattcttttctaccacttctgagtctcttcccgtttctgaagtcttgcccattctcattgtctccccacctgaagctatgccccctcgaccacttcaggtttatcatcgtcgcccgcgtgtcgttgctcctctcccttttcctgagacacctgctgactcacttcctatcccttcggcttcacctgccccggctctgccttctcctcatgacttacccattgctgttcggaaaggtactcgctctactcgtaaccctcatcctatttacaattttttgagttatcatcgattatcttcaccctattctgcttttgtttctgctatatcctctgtttctcttcccaagagcacccatgaagctctttcccatccaggctggcgacaggcaatggtggatgaaatggctgctctgcactctaatggcacttgggatcttgttgttttaccccctggtaaatctacagttggttgtcgttgggtctatgcagttaaggttggtcctgatggtcaggttgatcgccttaaggcccgcttagttgctaaaggctatactcaagtttatggttctgattatggtgacacattctcccctgttgccaagattgcttctgtccgcttgcttctctccatggctgctatgtgctcttggcctctttatcagttggatattaaaaatgtcttccttcatggtgatcttgtcgaggaagtttatatggagcaacctcctggttttgttgctcagggggagtctggtttagtgtgcaggttacgccgttctctatatggcttgaaacaatctcctcgagcatggtttagccgttttagttctgttgttcaagagtttggcatgcttcgcagtacagcagaccattcagttttttatcatcataactccttggggcagtgtatttatctggttgtttatgtggacgacatcgtcattacaggcagtgatcaggatggtatacagaaactaaagcaacatctttttacccactttcagaccaaagacttgggaaaactcaagtatttcttgggaattgagatagctcaatccagttctggtgtggtcctttctcaaaggaagtatgctttagacatcctggaagaaaccggtatgttagactataaaccggtagacacacctatggatccgaatgtcaaacttgtaccaggacagggggagcctttaggagaccctgagagatatcgacggctcgtaggtaaattgaactatctcaccattactcgtccagacatttcttttcctgtgagtgttgttagtcaattcctacagtcaccatgtgatagccattgggatgccgtaatccgtattcttcgatatatcaaaagtacactaggccaaggtgtattgtacgagaacagaggtcatactcaagttgttggttacacagatgcagattgggctgggtcacccacagatagacgttccacttcagggtactgtgtttttattggaggtaatctaatatcttggaagagtaagaaacaagatgtagtggccagatctagcgctgaagccgagtatcgagttatggctttggcaacatgtgaactcatatggttgagacatcttcttcaggagttgcgatttggaaaggatgaacagatgaaactcatctgtgataaccaggccgcgttacatattgcatccaatccagtcttccatgaaaggaccaagcatattgaagttgactgtcatttcattagagagaagatcgcatcaggatgtgttgctacaagttttgtcaattcaaatgatcaactagcagacatcttcactaaatctctcagaggtcctaggattaaatatatttgtaacaagcttggtgcatatgacgtatatgctccagcttgagggggagtgttgaatataatgtatgtatagtatactatctttccttgttaatataggtcacatgtatggtagttaggactcctagccttgtatatatatatctctcaattgtaagtagagattagatgaatgaaaataaggtttttctcctttctctctctctctctcaacagaatctttaagcattaaataaatattctctcaaataaacttcattgaacacaaataaaacataaaatgagctctaaatttccccttctaaacgaaacagaaatattattagagataaataaaaacatcattacatagaaggatgagatatccttcacaaattttcttcaaatttcaacctcaaccttccttaatctccttgaagttagtaagaaaataagaaatgttgtgaaatagaatgctacatgtgagtaaagcaatagattctatggtacctaatcatttataagtcaatactcttctatttttttggctttgttagaaaacccatccactgtgatttttactcaagtagcttctgaaaagtgctattctttaacctgtgaggatatgatacttagattttcttttattctattatttaattagtatctctctttaaacaataggagagactcgaacttgagacctctagttaaacattgctcttctaccatgttaagctgtttgctttattaaaaacttaacctgttaggatatggacacacaatatatgtgaggctaacatatatgaaatatataaaacatgagttggtgaggaaatgttttcattaccaatgaagttttctatgcagtagagaactaactgtcacaaccaaatggatttcaagggtgagctatataaggcaacaattgtcttttgacattattgggatatttcccccaaaacacttcatcttcatggtggtatgtttgagggatgttttgctctcatgctttgagtgacagcattgaaccatggggttttgtcgagttacacttattgtgggtgattttatgatctatgttgcatagatgtggaaacaatgacatgtctaggagaatcctctttgtagttgtgtcctaggaatatcaaatgtagtatcaaagaggaaacaacatgtttattttgaatctttcaatgtgttgatttctaagctaagtgattttgtcattcttaaagattcctcatccattagtaatagtgtaaatctggtcctattaagacttaattcagcctaagttacttgatattctttgttgttaaatgacttatcaaaaaaagatattctttgttgttaaatatctaatagtttaaaattttgggtgaaattgttagttcatcttggtattagagccttatttgttaggtcatgatgggttcaaacctttctagttgaggtcataatttggttatgtactttccctagttattaaattcacatgcaagtgaggcaaggtgttaaagctttagtccaggtcagcttgatgtacacctttagcctattacctaacaacttaagctttttggtcaaattggtagcttaatagtttgaaaccttgtttgaaatttcagacccaagcctaaccgtacccaaccactaggccaccttgaggacaggttaaggccccctcgccattcacccatatgagttataaatggcctggatcccaacttggtttgaggcttgccagggccttgaaggggagcacccaagcttgagtctagaagctgatgcacagtttaacttgccatgttacacccctatctatcagtttagtcacaagcctgcagaattctatattcaaaacccttcccatacacattagttagttatccttcaacctatctctccttaatatgcctttgttgaaaagatacaaatgactaatgctgtttcagcatagacaaaagaacatggataaggagttttagtgttggaaaactgaaactaatatggaaagaaataactttgtaaagctgtaaattatttattagttgtcaatctttgtatttttaggaaagtaattattaggaattatttattacttgtcaatctttgtatttttaggaaagtaattgttaggagttattctttccttttaatcagtgatttagtttcctaatttaaaggatttgtatatgttgtaaactctataaaagaataatctcaatgaaagaaaattattcccatgaaaccctattcttcaacttttagacatgtgcttgaggagttagacaagtgtgagcgtccagacaccaacatagccacactctgaaaatgtccgtgttgcttcatttaggatctagagatgcaaaattcagaggcattcaattgtggcaggccaggtgttacattaagctgtagtagtgtctcagtacatgtgtaggtacttcctaaaagatggtacatgtgcaggttaatataggatttatccagggaacttcaccatgcttttgcactcctaatttataacttttctaagtttatgaaagttataaagtgggctatgatggctgcatagatgagcagaatctgacattaattttaagcctttgcagttcgcagaaatagtttttttgggtgtcaggaaatcatatgtagccgaaatgttcattttaaactaagcctcatttttttcaatcccattggatatgtgctctttcacaaaggttgttttgtcatatgcctcttgatatggcagattctgttcatgtttaagagaatgatgttgtttgacttttgtttttcaagatgagattttgttatgtctgtggaagctttaatgcaaacaatgtagttcaagaacacaaggataaaacaatccacacaaaggtacacgaggttttaatgtggttcaaccaaacacacctacattcatggatgagaaagattatttcactataccatagagaatatgatagaggacaaaaacatatacaactattgagttcttgaaacatcctatgtttccccactccttatatctactcttgaaccatgagccccttgctccatcgggtgtctctcattcttcctcacatctctatccaccccatatagtctttacaagctcatctccatctcatatcttttttccctcttgacctagaatatttatcatgatattcctaataattttccttattctataaggaaatctaatattacaataatttatcaacttatgaaatattttttgcattatagcagttgatataatgtaagtgttcacattttcaggtgttaagtaattgccgatcaatctcaaaatttgg

SEQ ID NO: 10535 - DNA, 915 bp, Vitis vinifera
  Intron number 5 from transcript GSVIVT01016069001 (locus G SVIVG01016069001) derived from phytozome v7.0 (chr-ID chr9 ; pos 18317729 to 18318643 reverse strand)
ctgggatcttcataaaagaacaagttcaggtacatgtggggtgatcagtttctactcatcatgcatctcttcttcatggtcatctttatcttgaccctcggtgaaggccataagaaaaattttatgtatttttattaaagttatgtttgcttctcagaaaatttgagggaaaatgtaaagaaaataaaataaagaggaaaatgaaagaaaaagtgaagaaaaataaaaaatggagttaaaaccaacaaattatttttatttgcaacttcaaactcaatttatttattgtaatacatcaatataaagattaaataatttgaaaatgtataagtttttaactaattttaattagattttatttattttgaaatttttcataggactatcaaatataagaaaataattttttttagtatttttttttctttccttaatattttctgagaatcaaacataacctaatgaaatttcaatattttcctctaagaacacaaaatagtatttttttttttaaaaaaaaaatttgatttatatagtcggcttcccaaaagtaaaacctaggtattttttgttttattttgagagattttaactaagaattattttaatgcatgaccttgaaagtgttaaagaaacatgatatatattgcaaatccaaattctgtaaatttaaacttctaggaaattattaataatttcacatggcatcagagttccatctgaaggaggccatatatttgagttgtctgcctgcaactctgtgtatctctccacgtgcgggtatcagactacacatgaggggcgagtgttaaaaaaacactatataacttataagtttaaacttttaggaaaattggtagtttaatagaaaggagagtggagttctactcatattcttataatttgcaggtaaaa

SEQ ID NO: 10536 - DNA, 2524 bp, Vitis vinifera
  Intron number 3 from transcript GSVIVT01026354001 (locus G SVIVG01026354001) derived from phytozome v7.0 (chr-ID chr4 ; pos 14722396 to 14724919)
agtggccatccaaatattcgaagttatttattgaagtaagcatggttactcttttcctaaatctatggtgctgacaatctgattgaaattactaggaaattaatttcctgattttcaagattatatggtcatatactttcttgttttattcgcctaatttgtaggataaaggatttctaggaattagttaactatgttattttgtgtaatttagtttcctaattttgtaggattgtacgttatagatcttgaaaaaaataaaaatattcttttccatatggtatcaaagtctgttcaaggtctgtaggttctcttctaatttttaacttgtgatcttcattatcgctgatttccagtggcttttattgccattattctctgcctgaagcggccgtcattgcctttaccatttttttttctctcctcttagcggccttctttattgatgataatttccaaacctttgttataattcaatagttttttgcatcagcaattacaccaatgtttattaagttttgtctctattttgctacccactatgttgaaaagctcagaaaacaaaacctaagaaaatccgacctcaaatcctgcattctagttgcaaccgcctaccagacaatgccaaaccattagccctcattcaaacttatcgcctgaaactatctggtatggtctcagcatgtgcgcacgttatcgaaggaaaaaggaaagttcaaccactttagtgtaccaacactgagtgaagatgatcccaagtttgccatctaggatgaggactcaataatcatgccttggctatggaacatgatgcaatctgaaatcagcagaatgtgtatgttcctgactatgacaaaggaaatctaggggagagtggaacagacttattctatagtgtaagatgttcaaattacgagataaagaccaagattcactctacaaagcacggtactttatttataattgagtactataatgttatgatttggggatccctttgggggcgaaccacaagtctgtggctgtttgggatggggtggaagagagatttcggaaacggctggccttgtggaagaggcaatttatttccaaaggagggagaatcactctaattcggagtacattgtcaagtatgcccatatacttgatgtctttacttcgaatgccaagagtggttagtctaaggttggagaaaattgaaagggatttcttgtggggagggggtgctttggagaggaagcctcacttagttaattgggataccgtttgcatggacaaaaggaaggggggcttgggagttagacgcctatccatccttaatagggcccttctttgcaagtggaattggtgttttgcgaatgaaagggagaaattttggaggcatgtaattagtaggaagttcgggctggaagaagggggttggggttctagagaagttaaggagagttatggaaggaaataaggaaggaaggtgcccttatgtaaaataaagtcgttttttcagtggggaatggtagaagggtaaaattttggaaagatatatggtgggggaacttcgccttatgcaattcttttccctccttgtatgctattgcctcctctaaggaggcttgggtagaggagttttgggatacttcgggagtggaaggggcttggagtcctagattttctaggcccttcaatgattgggaggtggaggaggtggagaggcttcttttgacaatccgaggtgcaaggcttattcctcttatggaagatagaatgatgtggaaagtgacttcgaatgggattttttcagttaaatcactctataatgatctatcttcaagaagagctggtcttttccctcatggtttgatatggaatcctagcgtgccttccaaagtgggttttttcgcttgggaggcttcttggggtaaggtgcttactatggatcagcttaaaaagagggggtgggctcttgctaatagatgttttctgtgctgtgaggaagaggagtctattgatcatattcttatacattgctccagggcaagagctttatgggagtttttgttcgccctttttggagtgttttgggtcctcccatcttcagctagagatacccttattgaatggaggggctttatgttgggcaagaagcatagaaaggtgtggaaggcagccccgttgtgccttttttgggcggtttggatggaaagaaataggattgcgttcgataatgaggacttttcggttcataggttgaaaaattcttttgtttgtaatctttgggtatggacaaagtcaagtgtaaatgaaggtcctcttcctttacttagtttttttgattggctaggcgctagatgagggtcgggtttgtattttctcttcttttgtgtgtgccttaaggggccttttgtataccccctgtatgctgttgggttttcctcaaggtgcccttttctaatatatttctacttttgcctatcaaaaaaaaaaaataatgttatgaagtgattgtgatctttgatgtgtttcagga

SEQ ID NO: 10537 - DNA, 1983 bp, Vitis vinifera
  Intron number 2 from transcript GSVIVT01000004001 (locus G SVIVG01000004001) derived from phytozome v7.0 (chr-ID chr1 4; pos 2639741 to 2641723)
ctacagtatcagagaaccttccgggtataaaaacatttcctttcacttcttaaaattctggctgtcttgttgttttatcatcaaaagcttgaatggttttaacactttaaggaattccaaaagatgtaatggtttattaattcaatttgttgcaagaaaccctgataaaaaaaaaaaaaaaaaaagagaactgtttgagcttgagaaagaacattgaatggaacacaagactttaggtgttgtatagatgatgaatagaagagagagcctatattatgagaattataagtgcagaatggaacagatataagccatataacccagagctcatttggattcttaaacccaattgtgaacttactgataaactcaattgtagctggatacaaaccagagaactcattctacttcctatgagatattatgtggttttacatggcacaatgctacttgaacaaagggttcaaaacacaattgggaaatagatagacgaagggctaattgcaaagagcacattgcatggccttcactgcacattccaggacattcatcagatggattttgttttaaaacactttcaacattgatgagaaatttaattgtacgatgcagtggactgatacttaatgtacaagatgcagtgaattaagattcctggttgctgtctcaaagggtggttgaatgttcaaaccacttttttgcttctttcttttctcctttttttttttttttttttaacttgaagcttttctcaaatttttatagaaggaattttggcattggtgaagttgcaatttatgctagtagggaggtcatggcagattcaacaaagtgggccatctgcacccatctactaagctcagctgaaggaatatttacttacagaatcctttctcggaaaatattaataggacggtcatcatgcagataaatgctgtattccagtttaccagggacctattggtcaagccagattataggatagttcttgtgcttcaaaatgagagcatcatttcaaaataccctgcaggtggaagccacctaaccatggttgttgggtaattgtaagaatcctttccataattctgtccttcatgatgcattaggtgaatatgtatgcatcccaaggagtagcttaagattcacaacctttgccttttgcaaaaggttgctcactgcttctattttcatcgcaagctgcaagcccttcaatcatggaattgactgagtgttgagcatgttcttttggatgttgaggtctatttagctgtaagtgcaacagatgtacttgtggatcttgatatcatggttggaggaattaatgggttcagggtatggaatacaactattatcattcttttccttttaacagaaacaagctcagcagttccttcatttttgtctgattttcttaactcttcacaggaatgacttttgttagccaacgcttttcctagtaagctcttccacattaaggcaatgatgggtggggacaagtatgctcttacctcccctccgttcataaccttgccaagcctcttcccaccaaaatcaaacaaacaaaagaaaccccattataaggtggctagacatatatgacggggatttctaatatattgagtagacttcaaatgacattggtgaaaggtaagcatgtagacggtctcgcattaaggcccctttaaatgatcttgaatattcaattctatttgataagtgaagttgaatccattgacacatcatattgttattcaaaagcttcccatgcattctttttatttccagccactttcaaccggtttgagtgaaaaaacaatatcatacatatgaaaacaaacccaacaacccctacaagaacagattctcatttttcttgatttgataatgaatagcagtaaattttcctcagcaattgaattcatggtaattggagtatttgattttggttgactactgcagttttagcaactgaagaaaagtaca

SEQ ID NO: 10538 - DNA, 2160 bp, Vitis vinifera
  Intron number 4 from transcript GSVIVT01018171001 (locus G SVIVG01018171001) derived from phytozome v7.0 (chr-ID chr1 5; pos 13642572 to 13644731)
accttctcgtccagcagattgctcaacagctggtggtacatatttctttctccttctccaaaattaatttgctacatacaatatttctctaattcactcagtcaatcctcattcagttcttttgaatgccaagaaagctaaggaaaagaaacaaataaataaaagataataaaattaaggttaaattttattttttcttattttttttatttttctgtaaaattaatttggggagtctttatggaagtggtcagtgctggtaagacctgatgacaattcaaatcaatggcttctgatgtgaaatcattaattgaggctttgggtgtgaagtgtgtagtgtgtactagaactgaggatgttgaaaatttggaattagaggcccattaaatgttgccattacttctacttaatggtcatcgcttaggtggttggtggaccatatttggtgggggtgggggtggggattgactttttgactttctcatcttcttatattttattttatttttcagctgatgggcagtctaatttatggctctccagctaattgagatagttgtcatcagactagtacgttgggccaattgactccttagtacattttgaatattaatacataaaattcgtatatttgatggtctgctattttagtaatagttggtacattaatggtaaaaaaaaatatattgtatatcataatctttaaaatcctgaccaattataatttttttcttggacaaaacatatgtgctatgtttggttcggatcggaaaaaaaaagaaagagtaaatttagaactaaagaaaaatgaaagaaaaaaaaaattttaagttaataaattattattatattctacttcaaactcaattcataaaaattaaataatttaaaaatatataaaattttaattattttttatattacaattaagacaaaatcattttaattttttttttttgtttcctcgatactttctcaacaccaaacataaccagcatttaacatttgataaaaattagggataattgtgttttagatcttttttttttccatagtgagcaaatgtcgtttatggaaagataaaaaattcatatctttcttcttaatttttatgtttcgggtcttggacttaaatagtaaatttatatggaccaaaacttaatttttggacttagttgagcccaaaaattaagttttaattcatataagtttaccatttaagtccaagacccacaggaagcataaaaattaagaaggatatgatcttttcagaaacgacctttgcttactatggaaaaaaagaaaaaagtaaaaaaacattaatttaaatttattccttttgtaaacctcaataaaatttaatataatttagtaatttgaaaaaaaatacacccttctccaaaaaaaataaaaataaattattattattattattgttatttaaaaatcaaacatcgtagaaaatatatatatttaaaattgagtatataaaaaactactaaaaatatgtcaaatttttttaaatgatatatttttagaatatatatatatattttttaaaaattagtttttaaaaataataaatttttagaataattattaaaaaaaaatttaagataaaaaagtttgtcaaatattgtggtagaaaatagttttgaaagatatattggtctcttcatattttacatcattccaattatgcaacttatatagattaaagcttaattttttgacctatttggatccaaaacacaattgtcccaaatacaaaaaggatagaaacaaaataatcacaaaaaatcaaggccatgtttgggattgctttctaacatagttttttttttttagaataaaaaaatataaaaatacatctgaaaattctgagaattattctaaaaacaagtgttttgaaaggatatgttattaatatttttcagttattttcacttaattcttttaaaaaataatcatacaaattattaaacaaatttttgttttaaagaacatctagtaattgttttttaaaattattctccaaaactttattacagtattttgtgctacatgattgtctgtgaaattgaaaaggagagactagaggtataatgttagcacatatggtgtggtggtgtttgaaacacaaatcaggggttgtacaac

SEQ ID NO: 10539 - DNA, 2072 bp, Vitis vinifera
  Intron number 2 from transcript GSVIVT01035212001 (locus G SVIVG01035212001) derived from phytozome v7.0 (chr-ID chr4 ; pos 10610076 to 10612147)
gtccaactactctgttgatacagagtattttccaggtttgtcatcatattattgccaattattcttcttgaaacgaagcctgcatttgagagaattagaaatactttcaaaatatttggaaatatttccttatcagttgtttaacaaactttaaaaatttatttttaaaattttgaaaaatctcttttaaaattttaaaaattattctatttgaaaataattaaaaaaaatgactaacaatacttcctaataatgtttaaaagcattttaaacaaccataggaaaagagaaattaaaaaaaaaattaaaaaaatcctatttgtattgtcttttacgtacggcattgggcataccttaattggctaagaaagaaatacgatgcccaaaatataagccaagttattgagaggattattctttgcttgtgaattgagtgtttcccactccctcaaagccaagaatagaacctcaaacactttactcatgtttatctttgcctttcggaaaaagcacacacacatgttcattgccaccggatggatcctcacaataataataataattgtaagggttccaacaacaactattattcaatggagcagtgaaatattaacatgatagatttaaattatgtttagtatgatggataaggaatgagatatgataagagagaatacaatatgttatatcttaccatatgagataggataagacgtaaaatatatatatttcatatatcataaatttatttattataaaattaaatttatggttaaaaaaaagaactaaaaaattatttataaaataatattaatatatatatatataaaatattgtaatgcaatctgttttttattttaaatattaaaaaataataaaattttcattttacaaattaagtagaaacatattctattagatatattatcttaggatattatgttcatcaaatttaatatccaaggatattctattcaataaaaattaatatcctaacatatacatattttattttcattttgtttattttaatgcatattacacacaaatatgagaaaattattttgattattttttttcttttaaccaaacatgatgtaaatgttactaaaacttatatagctttacattcaaaataactaataaactataaaagactaaggtgttgtttgtttttttggctttttattgaaagcaatttattttcagaatttaggttgtttgtttttttattttttaatacttaatagaaataaaatattacaaaaacaaataacataatatttaatactattaaacattaaggttctatttagaattaagtaaaaaaacaaacaccacctaagagtgtatttgatagtgattctaaaaagtgtttcttatctttctaatacttgaaaaataaaatttttgaagtattagaaatgttataaacatttcctaaaattactgtcaaacacactaagagccttttgatagtgattctaaaaaatgtttttagtctttctaatacttgaatttttttatcatttaagtgttaaaaatggtagaagcgttttagtagtaattctaaaagacgtttctaatttttctaacacttaaataataaaaattttcaagtattagaaatattaaaaatgcttcttaccaaacgggctaaaaaatgtttttggtagtgattataagatgcacttttagcttttctaatacttgaaattttttatttttcaagtgttagaagggttaaacacatttcctagaatcactaccaaacaaattttaagagtgcgtttgaaagtgattttagaaagtatttctatttttctaataattgaaagataaaaatttgtaagtgttaaaaatgttagaagtgtttcttagatcacaacgaaatcgaatgtgaaacggactgaccaaaaaccaaagcataagtaataacataaggcaatattttcccttctctatctttttttgtttctattttattttatcttgtctgaccatctgtctgtcttttgttttctttttaaatttcagtttccttctttgaggtgagcatcctggcttttgta

SEQ ID NO: 10540 - DNA, 1995 bp, Vitis vinifera
  Intron number 1 from transcript GSVIVT01025352001 (locus G SVIVG01025352001) derived from phytozome v7.0 (chr-ID chr6 ; pos 1607357 to 1609351)
tttgtatttgagatttcaagccaaactttacttttgtaaaaaaaaaaaattatataattaaaaaatacgttgtaaattttatttccaaaaactactttttaaaatcgtttccatcaattaattttcttacatttaatttacgtattcaatgtaataagtatattatgtaaaaattgagaaattttataacccaaatcattagtattctcttatttaaaattcgtgtctcctatttagacgtaagaattccatttgacccataaatgatacataagaataatttttttgggtctttcaatatcaataggttgattgtttaactcttgtatcttccaaaaggaaaaaaaaaaaatatccgagagttgtttcttatatccaaaagagagtacttggactctcctaactaaaaaatgtatcatgcttgaatctaattgagatttgtgatggtggaggaacttgattgaaaaaaaaaaaagattataatatatggatgatcttattaaaataaaaaaaatattaaatatctgaagtttatttttgtatattatatggatgatccgatccacaaggaccatgatcgagagaattgtttgatttgtgtttaatagttattttcgaaacctaccttctaaaaattattgttaaataaaccctctattattttcccattattatgccactattagggccattattgatgttattctttggatgccatgccaccgtgcttacatgcaatgtgtcacataatagatacgagaaacttatgattatctcatcaattgtaataaccatggcaccaataattattattataaagacaaatgttattatatttccaaaggattttgggatgacgcctctttggtcccattcttacgtgatacaccatcacactaatatagattttaaaattgaagtacaaacttctatatgaaacccttagacaatataaatttatcttatatttttatatattattttattttttatttttaaaattttgaatatctccttattttgaactatttttaaaaaatcattatatatatttgaatataatatttaaaaatttgtttattaatttcccattaaaaatgttttattatatttataaaattcataagccttatggttgattacgtttgatttccaaatatttggacccaaaaaatatgataaaatttataacaaattataatttttaaaaatttaataggagtttctatttttatttgactaattttatttaaagaatttatgattttaaaaaaacttattatgaaaatcaagaagatatagatcttgtttggtaaatgttttgtaaaacaattctaaaatatggtatttgaaattttttttttcaacgttttgtaaaataagagtttgttttgaaatctgaaatgtttttaacttgtttttagtattttaaacatgttttaaaaataattttcacgtttaaagttttatttttaattattatacatgtttacgtagctcttaaaaaacaagtaaaaaatattttatgaaaatgcacgtttttttatttttgagaaccacaaagagaaaataagtttttagttgttaaacgtgttttctattttttttttttataaaatataaaactattttcgaaaacagttgtcaaacggtttgtctaaaattttttattttagtttgtgttataatttattttatatctaataaaatttttataatgtgaattttagctttacacattctaattaaagccaaaatttttaactatttttaatatatttgatttttatttttttatattttctataataaaataaaccatatgaaaatcccacaaactatgacttgaaaaagaagcatcaaatcgcaaaatgttggggaacgtgaaaatgaccgaatttgtttgttaatgcgtcgtacaaattgataggcaaaacgagggagaggaaaaaagggcaaaaaaaaaaagggaaaaaaagggagaagagtcaagct

SEQ ID NO: 10541 - DNA, 12299 bp, Vitis vinifera
  Intron number 3 from transcript GSVIVT01026858001 (locus G SVIVG01026858001) derived from phytozome v7.0 (chr-ID chr1 5; pos 19894576 to 19906874)
acgcaaagtgggcaggtcattccggtgaagagaagactctggcactgctagccatatcctactattgacctaagatgggtgaggatgtccaggcatatgtgaaatcctatctggtttgtcagatggacaagaccaagatgaagaaggttgtagggttgctacaacccctctccattccagagaaaccttaggagagcatttccatggatttcatcactggatttccaaaggtttgtgactttaaatctatctttgttgttgtagatagattctttaagtatgttgtgtttatacctgcctctgatgcttgctctacggaggaagcgactaagttgtttttcagtaatgttgtcaagcactttgggttgcctagggacatagtcaatgatcgagatgcacggttcataggccgattttgggttgagttgttcaaactcttgggttcatagttgaagttttctacagccaactaccctcatactgatgggcagactgagagaatcaacgccttgctggaagaatacctcaagcattatgtgacagcaatacaaaagaattgggtggatttgttagatactgcctagttgtgttataatctgcagaggagctcaacaacaaggatgagtccctttgagctggctattggggtacagccacagatgcctttggaggtagctaagcaaaaagcagaaggaggtagtcctgcagcttacaagatggctcaatcccggcatgagatgtttgatgaagcccgggacagtctagagaaggcagttagatgaatgaagaagtatgcggatcatgaccgcaaatccttggaattttaggttggggacaaggtcctcttgaaattgactcataagatatggaagaaaatcagtagcaagacaaggcagaggagtctaattcctaagtatgatggaccattcgaggtgataaaacgagttgggcagatgacctacatgttgaagctgcctgagaggctcaagcttcacctaactttccatgttagctttctaaatctttaccatgaggatctggatgtagagagagtgcaaataaagcgggcccttctcttggtcatgaagcagtttgatcgagagatagagaaaatcttaaatcataggaccatgggacatagcagaaagaaccgacgaactgatttcttggtttagtggaagtggacttcaaaagtagaagctacatgggagaggaatgttaccttatggcaatttgagacggcggtccaaacatattggtagactaagtcgacgagggtgtcaacttcaataggcgggggtgggtttgtcagccccttaaccacttgactctaccatggaggaaaaggcctcatgggtaaaccttgcacccatgagagcctagacggagaaagcaaggaagacttagaggtttggtggttcaaactccaagagctaagtgagaaggccatgtgtgagctagacacgcaccgtggacgagcctgacgcacaccgtgcgtgcatcgcgagcgagtcaaacaagcaccgcgtgcgcattagatgggcaccgcgtgcacactagatgggcatcgcgcgcgcaccaatcttaggtagtgcagatgaaggctgaaggctacttttggaatttaatttatatttatttaatattccattatgtctcatcaggcatattaatgtctcctccagaaacaatgaaaacgacttgtattactctttaggggggggggggggggggggggggggggggggaggaggtaagcaactcaaaaagggaagcaccaagggaaagccttgaccgcaccaagagggcaccatgacacgaccttgggcgtgcctaggacacacggataggactcgagcacgcacacatgggctccacgacatgtgtggtgtgcaccacgtggccacaacggcacggggcctggtgcggcctacctcctcctcgtgtaggcatgaggacgcctaaaccttgtgcagtgagccagttgaggaagtcatgggcgcaataccatggcttgatggggcattaaacaacaattgactagcacccatgatgcctacgtacagcacaagggcgcaatgccctgtgcactaagagggatcagtcatgaacgcaatgtcatggctcgttgctatgaagttggacctcacattggaagcaagcaacatgcccaagccatgggcacctaaacatgacatgggctcacatatcagtgtggggaagacacactgatgcaccagacacttggtcagctggttggtgcacgttgcctagttctgaaggccttgatcaaagacacgctggtgggcaccaggtcataagaggcaccttgcgggaaaggaggcaacttgttaaggggactcttcagcagcttggtgagaaaggcttgaggagatggcaatgcaacaagctagtggcagctagttgggatagcaagtgatcaagtcaagcagccaattgacttgcagttggctgaggtgttgatggctggtgcaagtgggtggttcacgagcaggccactatctgggtggtgggtggttatgcaggacagttatgggcgcatttggccaattgcataaccactagattggcttcaacttttaaatttggtaattcaaaaatgtaactgcagaatgagtcttttaaaagggctcctgcatccttgaaatagagagtgagagattgggatagggttctcttaatgcttggggtgtgaagtattgtactatgactcaggggaaacaattttgtcttgtagagtgaattaatacaagttgggaaaggtttcctgtaaatcgttggtgtccctgttactgtgcttttactttgcttttactctatttttgaaaaggctgggaaggaaggttggctaaggaagggtccttagcaccgcacactcgtgaaaaatttagtgtgatcttcaggggggtgtaacagtgagtatagtgtcgggtttgagcatctccaagcatttcaatatggttcaaatggctctcaaacatccagaaattcccaacagtatgaaaaatggctctcatggtgctctcccagaaacacctccacccaagatggccaacctcaaacgtaatgcccaacactctaaaatataccaaaagcagaggagaaagtaaacaaaagcaaagcatgcacaaacgtaaatgataccgttaaacctagctccatttcataaagatcaatgggctggatataggcggaaccaaaagaaagcaagaacgtgatcttcaaaaccttattcaagcatcaagatgaacccaaaattggcgggaaatgaaatagaacaaaccgaaatgggaaatgcaaagcatgctaaaatcatacctgaccaaaacgacaggcttttcctctgctcaaactcggaatgtccctttctcctatctttcttagctagctctgctacccttcctccatgtctcctatcagctgggtttttcttattttctcagcccgcttcataaccaccagaaaaacgaaaaaaaatctcttcttacctccttccagcttacttctcctccaagctatatccatatcccatctcatttggcaacccaatagctcacccatcagtcctctttggctgccccaaaaacagctcacttctaaggtagtcagaaaaagaaaaaaagaagaaagaaggaaaaaaaaaatgcttccatccgagggggtctacacatatacattttgttctaattttctaatagttgtgcacagttgaagggaaaacaatttgattttctaattaatattacttttataaatactttaattacttttataaaattgattcataatgattttattatttctttggaactcataaaataaatctaattacgacagaaaaagaaaaagagaaaagtgagttttgatcactaatttgaaaaatacaaaaataaaaaacttcagcttttataaatcatttgtatcttcatttatttaaaattattttaaaatacatgcacttttttataactcaaataattatttcctaaaatgaccttattatttatgatgttaataatatcatttttttttaaccatgagaacctatttgagattaataaaatgagaaattttaaaaattttaaatacaattaaaactaaaaaaactttaaagttaaaaatataaaaataaaatattatatttttttattatatttttggtttttaattgtatttaatttttatgtattttagttttaattatatttttaaattttataaatttcttatgttatccttaattgatgtcaactaataaaatttatattcaattttatttattttttttaaatgagaagatgtgggggtttatctaatacaaaacataaaatcatattaactaggggattaacaagattttatttattacttgatgatgttggaaaatttttccacgatgatttgtatcttatgttatataataaaattttataatatatttatttataaaatatttttatcaaattaaaataataaatttggataaattcatttaatattatcaaataaaaatgtattttaggaaataattatttaacttatgaaaaagtgtatatattttaaaaaaaattaaatggataaagataaaattgatttataaaatttaattttttttttctatattttttcaaattaggttaaaacccactttttctcaaaaaaataatagaccaaatctataattatcaattacaaacctacaattatcaattatgactttattgtttaatttatattctttaacgaatttttaaaatttttaagaataatttgtaattcaaaaaattggtccatttaattacaaattaaataaaaaattccataatatgttgttatccttgtatgtaataaaaaactcggattatttatatgttataaaagttaaaatttatttatttttaaattaattttatataaaatattattaattgttattatttttaaacaattattattcattttttaaaaaaaataattatacttttacaaaaatattaatatccatatttttataatatatattaaaatagtatatttttatgaaaaaaaaaataattttatgactttattataatattactattcatatttcactaaatttaatttatttgtaacaacaaaaaaaactattttcatttttaataaaacttaaattaaatctaattaatatggtataaatagaatttataacatttttacaaaatcaaaatagaaaaaaaaaattaaaccaatttattcaaataaacttgttttttcttttttctaaatatttttaaaaacaatttatctaatactcttatttttataaaatattaaaataacaatttttttatttaaaaaaaaacatgaaaaaagcatggtcacaacaaacctaaaaataattatgattctatgtactttttcattaaatgtgctattttttaccattcacgtgttatgccttactgatgtagatcaaagttacgcataagattaaaaatgatttttgtactgttgctattttgacgggttttttttttttcaaatgaaacatgctttttgccctttttgcccccactctgattgagggtttggtttatttcactagcacggagccctctccatctgccagcctacctgacaactctgaaccgctctttaagtctttgtttttcctctttcatcaatgacacaaataactctcacatcaggcgttttaatctattactgccacaggcccacaagcatcagacaaggtattaatagaggcttctctttgatacacctcaataaccatccatgtaagatatgtatattaaacactatgattcaatacattattatatacaaaccagatgaacccagttacccacaacctagcttattataatttttttatttgaattaaattaaatgatttcataataatacttttttttattttgaaataataggtgttgtgcaatttgttttactttattggtaggttatgaattattattattaatagtaatagtaatataattcaattaatattttgtaggatactcaaaagctttatatgcacgtaacaaaataaaaagacttacgaagacttaaaattaatgtaatatctattcaatttacataaataagtatgattgtgtgaaaaaggagataaatgaaaaaggtaaagaaggtgaacaataataaatttgaaggatatgggaaatatttggttaaattaataaagataaaattgattcataaaatttaagtttttttttttatatttttttaaattagtgggtcaaaacccactttttctcaaaaaataatagatcaaaactataattatcaattataactttattgtttaatttatattctttaacaaatttttaaaatttttaagaataatttgtaattcaaaaaattggtccatttaattacaaattaaatcaaaatttccataatatgttgttgtcgtcgcatgtaataaaaagctcggattattttatatgttataaaagttaaaatttatttatttttaaattaaatttatataaaatattattaattattattatttttgagcaattattattcctttttaacaaaaaatatatatttttacaaaaatattaatatccatatttttaaaatatatattaaaatagtatatgtttttatgaaaaatataattttatgactttattgtaatattattattcatattttactaaacactatttatgttaatttatttgttataacaaaaactattttcatctttaataaaacttaaattaaatctaattaatatggtataaattgaatttataacatttttacaaaatcaaaatagaaaaaaaaaattaaaaccaatttattcaaataaaccttttttcttttttctaaatatttttaaaaacaatttatctaacacttatttttataaaattttaaaaaaacaaacatgaaaagaacatggtcacaacaaacctaaaataatgacgagtctgaaccgctctttaagtctttgtttttatttcactcagacggagccctctccatttgccagccagcctgacaagtctgaaccgctctttaagtctttgtttttcctctttcattaatgacaaaaataactctcatatcaggcgttttaatctattactgccacaagcatcagacaaggtattattagaggcttctctttgatacacctcaacaaccatccatgtaagatatgtatattaaacactatgattcaatacattattatatacaaaccagatgaacccagttacccacaacctagcttattataattttttttatttgaattaaattaaaagatttcataataatacttttttttttttttttgaaataataggtgctgtgcaatttgttttactttattgctaggttatgaattattattattagtagtaatagtaatataattcaattaacattttgtaggatactcaaaaggtttatatgcgacataacggaataaaaagacttacgaagacttaaaattaatgtaatatctattcaatttatatagataagtatgattgtgtgaaaaaagagataaatgaaaaaggtaaagaaggtgaaaaataataaatttgaaggatatgggaaatatttggttaaatttcaaactaatggtaaataagtatttttaacctctatacagggggaagtgagtaaaattattgaatgtagccaaaaatataaataaggtactagaggcttctaaataaacgtggatatgagaaaaggtatatttataaaaattaaataaaattgttgaagaaactattaaactataatctaatgctttacaatcttgtataatgagattaacctaaattattaacgaaatatcttattatattttttatttaaattaaatcaaaaaaatttgataataatgatttcatttttatcttaggagtaataggtgttccttgtgttcttttgtgatctcttgtgtctataattatattactttttctcacacactctcttacttggttatttgtttgtcttatgtgtgcatatcataggattgttcattggtggatgttgtatggtaattgtaatttgtgcgattaaggatgatgtttagtttagatgaatgtccttgacaaatttgtaaactccatttgagaattttaggggtttatgtaatttatattttgtcacaagattgtcaaaagggggaaattgttaattagtgcattaggctacttagtttaaattaaaaattttgttcaatccatcttcacttacagacttttttagattattatgttttactatttattaaaaacttaaggttattgcatgatcaattggaataatataagtatagagatgttcaagaaaagttaattggaatcaattatagcatgaaatgaatgttaggctttaagctagtgaaaaaggttttaaaattaatttgaaactactcatgagcccgagctcaagcatcacttttagtgttcaagccaaaattctataggatactgaattttttttttttgtcatatttttagaggtttattgaaacaaaaatttaaatttcatctcttgtttattatttaatacaaactttgaaaataatttaagtattagttttcccacattctaaactcttaaaagttctcattcttagatttataagagagatttgcatcgcgagatgtacactaaggtcacaatcaagatttacaaactattcgcgttgcatgatttgttttactgtaatggtaggtgatgaatttattttagttcacatgtgaaaatgatggggctataaagaaaaagatacaagttaaagtccgacaatttttttttaattgagattcatttatttatttttaattgagaaaaataaaatattaatattattagaaactttatttatcaatttttttactatacaattttcatacatctaatatgtgaactttttaatatcatggcaaaagtgaaaaacaaaaataaaatatttaaaaaagattgatcaaattaccaaaccatcttatacttaaaaataaggcacttaaaaagacaaatgactcttagaaagagaatttgtattttcatcaatttaagttctttatatatctattttatttgcacacttacctaattatttacaatatacttcaaataaattttattatataccttctttcaccttctttccttgttttttttttctttggcaaaaatattcttctctccaacttttttgttataaaaacaaaataatatttgagattagtgtaaagctgattgtaatattttaaatgtattttttaattgaagtactcaattatattaggtttatttcatataaatatattttgagtttattatttatataatttttttattaatatttgttagaaaaataattaatacttattaaagttttttaaaggcaacacttactattttttttttaagaaataccgaccctaaactaaaaagggtataattgaaattcataagggatcaaaatttcaattacaaatttgatgaccgttttgaatacttgtcaactaattttaactattttggataatttttccatcgccaaattgaaagaaaggcaaataattacagagattcgaatggatctctatttgaaatgcccgcttgcccgcccttcatttaaggacctttggttggtttttctatgggtgacgggggaagagagaaacaagaaaccaaaggaggagggtagctcattttgggtcttgccagtttttggagaaggatagcttactcgaagccgcttcaagcaatactactttggcggaccttttcaggtatggcagctgtaagcttctttttattttttattttttatttatttgctccattttctgctgattttctgatcgatgtggaaatcaaggcttaaatgattgttttgctgaatctgaatttgttttcatactaaactctgttttgattttatactgatcccttttatttttcctgtaaataactaccgtatggattgttcttgagttggatacttgataatcatgccactgctctatgcttatcccacttacgttcaatcccatggataacacaatgaaatgtaagatatggtatatttatcaaaatcaacaatgagtgcccctagcatcagacacggtattaatagaggcttctatttgatatacctatccatccatgtaagatatggtatatttatcaaaatcaaataaaattctgtgtgaaactattaaacactatgatttaatacattatagttatgtacaagccagatcagcccagtcacccaccacgtagcttatcttttttaatttgaattaaattaaactactaaatgcaatatattttgagatatttctaaaatctgtttgagagtattagaggtttgtgtaatatatttagtaacaaaacttccaaatgagggttatttagtttaaattgataattatgttctgtttaggacttttttagattattataccttactttttattgaagatttaaagttgttgtataatcatgaaatggatgttaagctttacggaaaattgattttaaactatgtaggagccaacgttcaagcagtacccccgatgctcaaaccagagttttataaattctgaaaattttcttgttcgacatttattgagagtgttttctttttaaaaaattttagatttcattctctagttttcactcttgaatgcaaactttgaaagaaaaatctaggtattggttttcccacttaccaaacttttagaagtttgttttttgattcctaggtttgtgagagtgatttgtatcccctttgatattgaggttgtccaatgggtgcacatgtggtgatatgtgatgaaaaattagtataagtatcaagagagtaagatttatgaataacttttatcatgtgaatatgtataccagttgttttataatgaatttgtgttttgtgatttctggtagtttttccatttgaatattcttgttgataactgtaggatgattttcaggtaaacataattatatctcctgttattgacccttttttacattcctcaattattagagaggaattaaaaacaaatattttgggctaaagcgaaataaatgctctaaaaaatattagtgttgcacaatttattttactataatggtaggtgattaatttgacaaatataatataggaaagcaatgtcacatcccattcaaattttgaaaaaggcctaaagtaaattatagaaattacatgctgaaatacaagatttatggattgaagtttctacagagatatgtggggtagcactctgtctagatatctcattctcgtactaacaatgactgtagagatcgagatggaccatttcgtggtgccgcaggaagtagttgctgatcaggttgtaaatcctgcggatggcggtaggcatattagaaccttggccaacttaaaatccgaaatttgtcgaacacgagacgacactccatcagaaaaaaatgcaaagctagaatgtcccaaggttccaaagtcgttgttgccatcagatgccatgggttctgagtctgacggccaccgcaatgagccaaaaatcatgtctttgggtccttaccaccatggcaatcccaagctcgcgcgtggagaaataatcaagcttaatttggcagaacatgcctttttattattttcgatgtcggaatcaatctcaatagaggaggtcgatgaattgtacggcgaaattagcggtcaagtccaatcgctgaggagctgttatgatgcgaagtcgacggagaattattcggatgaagaattcagtgtgatgatgatggtggacgggtgtgctttactgtattatatgtttcatgcttgctatggtgatgaacatgaccaagaaaattccggtatcagatatcaggatctaaggcatctgcagcgggacgcgttgctgctggagaaccaacttccctataaattactcctggaactgggcgaaaaggttccaggatatgacactagtgagtggatggcactatgcttggaattcgttggagtgattggggaggaggaggaggaggaggcgtactcattcccgcaaaaaatgaggaaattttgctccggcccgttcggccaaattattggccggagtctgatgaagagtcggttataaaccttaagcctcttcatctcctcgatctgtacttaaataattggctaggagccaaacgtcctagccaaaaaaaaagcggcggtggggaatcagttagat

SEQ ID NO: 10542 - DNA, 6419 bp, Vitis vinifera
  Intron number 12 from transcript GSVIVT01031413001 (locus GSVIVG01031413001) derived from phytozome v7.0 (chr-ID chr 6; pos 18898721 to 18905139)
atcctagctgagaaatttgcccctgacctatcgtaaggatggtccgtctgtgcaagaaatggtatatgttctgttatacagttgagttgtaggacatgatattatcaatttcgtcacatccagatcatatacatatggcctaaagagaaaatatggagtaggcaggtctactttctgcaatacaaggcacaaatttaaattaactatatgtcagccaatgattctggtgtggaaatccaaatttgttaccctttacggttgtgagaggatgcaagaagaatgatagatatatttttgttagcctatctcaggtgtagctattgtttacaagttttaaccttcaattttagatggaacttaaaatgcccttgcatttatataagaattactatcattttttgtttttgaaaacagaaaacaagagtggtagccaaatgatacccaaccttaccatttccttccaaattctactgatctacctttcaatgatctggttatttatgggaatagcttcaccattagtgcaaaaggaattctgttgctgctcatacacaaaattcctcattgcttcttgcaacaatgatttcgagttgcttcttggatatgtttctttaatgtgtagaattgaaatggcaaatttcatttgcttctgttatcctatatacactagatgggtttatttatgtctaatcaattcacttgatttgtatgtatcaatgatttgatacctggtcccttttcattccagataagggaccatttaataatccggctgttcatctccttaggttgttggattcagatgtgatgccatgctgggtttgtttcaaatccctatttgattaatttctaatcaaagctattttatttatttttatttttttcaagtcaagaaggcactcatgcatcaaatccaatatagatggggacatgcttactagatgaagtcacttataaagggttcatcaaaagttggagagtccatacaccagagctccttggattgtcagcattttccatttgaatgtttgacctgattcaccgttcagaatgactagcagtgttgttcttttgatctttcatcttatattctacactaggttgatcaaaaggttggattgaaacatggtggctttggttaaggctgttatgatttctaaggtagagaaagatgtaacaatctttgaagaggtgttatggttatgaaaagtggtttttcacatttgggcatattcatgcttagatctcctccagaacaagggtgtttattaaggttaaaacacaaaaacctgtccatataatctgtgggcaaccttaactccttatcccaactttaagtcaggtttctggactttagattaatgtgagtagaagttatccctcaggcattgacatggatcgggatcattttgatacccttgcattcccattagactgcaagataaactgggtgggcctctcatatttagggttagggctctcatatttatcatccaatgttggcatccaatgctcatataggtttactataggttgggatgccaacattattgttcaatgatcatattgttgcccttaaaacctatcatccaatgctcttgtaaattttcttagtctactcacttcttattaggggacaattctaaaatccatttttgtaaagacctttgataggttaactaacttttttagaccctttgtcctaacttatattaaatcttaaggtgtaaagattctcttatttattttgttgtagacttttctctctctccgtgttgaaatcttaacttttacttgactaaggcattgatgatctcaccacgattatgcctttcttgcttcatgtctatctattatcttctttccttatggtgtgaggatttacctttggaagaagccctcccgaacttcttctcttttgcttctaacagagacaaaatgggcattggaggcttgggagtaggatggggaagggggtgggtggagctctcgcttttcaaggcagtttaatgattgggagcttgaggagtggagtttctcttactataattgcaacccttcttaattaagaaggaataggaggacaaaatgagatggaatgagtctaataacaacattatttttttccaatcaaatccctattttaatccttgacaagagaaaataaagagcctttctcggcaagtgtagtgtggaacacttgagtgccatcgaaggttggtttttttgcctaggaagcaacatgggatgaaatgctaacacttaaccaactcaaaaggaggggggtggactttgctgaatatgtgttattttgcaaaggtgaaaaggaaaggatggatcactttcttctccattgtaccaaagcttgtatgttttggctgctaattctctctttttgaactggtttggatgatgcattattcggttagaaagaaccttttgggttggcatgactctttcgtggggaagaaatggaaaaaggcctagagggttgcatccttgtgcttgttttggactctctaaaaagaaaggaacaaaagaacttttaatgatgttgagtagttggtccaagtaatcaaattcaactttatgtattcttttgtgaactggcctagggtgcacatagaagaccacttcattaatttgatagattttgcagattggttgagcgtcaagtaagtagtaggtttttatgtttatctcctcacctagtttaggcatcctttctatgcattttgtgtatgttggcatgtctcccttttaggcacttttgatatatttgctcatctacctacaataaaaaaatcttctttccttgatgtgggagttcagttatcaacttctctaagctatttctttgtgatcctattatgaccctaccttcattttattgcccttttttcttttatcacactaccttcttcttcttcttctttttatttattttttatcttttactttaaatacataagcctattttatttggagatatagacactatggtcaaggcttttacatggttggtgacaattttattgcccttttttctttatcacactatcttttatttattatattttattttaaatgtaaagtccactatggtcaatgctttttcatggttggtggcaaacatagtgatttatactaatgacatgttacaattggggaatctttgcaaaaccttgggaccagtgtagtgcttcacaagtattgattgtggagaagtgattgatcatttatttctccattgctcaatagattttatcttttggcataaattattttagttggctagggtgtttgagtccttcctaagggtatagtgaacttgttgattatcatccttttgaggtttgaacttgatgctagaagttgggttctctatttagtagttgctcctgaatgttctttaggtgatatggttagaaagaaatactaagattttcgagggctgatgtaaacttgctaagtaactatggaacttggttttctctacaatcttttgaacctcaatgttaatgtttaatggactttttatgaaagtgatctatttgattggaaatccatttgttcctctagtatgatggatccaaagtttttgtggattccctttttgttgccaaagttaaccctaaaattgtaaggtttcaaaatgaaggggccatggagaaactctttttgattcctttgtcttgaatttcatgaagaattccattctttctttctttcatcgtgaacaaaaaagtggggtttagtcatacgctctctttgttctatgaatccttgctaattttgagcttgaaaggaagctaacttttgacagtctaggctttttatatgatgttttatcttgaaaggaaaataagctttgatcctttgggctctaggattcttatggttagtgagaaggaaaaaggatttgttctttgttgtatctagtactttgtggataaacccaagcatcttgagattggaggtgtttattgtggttagggccttcttccaaaatgttggagaaggattgccattgaggttgggcttcttcattggaaagtttagtcttgcaagcacaataggctatgacaatatcctggttaaagggcacttggtagtgttcataggttattacccttaagaaaagagaagtcctttgaggctagacccttaggtttgcaaaaccatagacttggctaaagtttggaggtgctctttctcctagatatcttggtttgccaatcgtgatacgaagatatggactaaatgagtccttatggaagcaagttattgggaagtaggggagtagaagaggggaatgatcttcttgtgaagtaaggatgaatgggtttggggtggggttgtggaaagtaatcatgagaaggtgggatatcttcaaaagtaggatttgttttgttgtgtgagatggaagacagtgaggttttgaaaggataggtggtgtggtgaatcacctctaagcatttccttcccttccttgtccatcatagcttttttaaagattgtctaggtgtaggatgtttggaggctagttaggcaaaggaggttatttaatccctaatttctaagagatcttcatgacgtggagttggtaagtgttgaggcgttactctcaaggttgcaagacaaaacaatggtcggggatgaggatgtgtggtttccttgggattgaagggtgatttcaatgctaaagccttctattcctctatggcatcatagaggaatgagcctgttctttatgggtgtagtttgaaattcttaggttccgaaggtggggctctttgcgaaagcaactttggaaaggattttgattttagacgacccaactattttcctaaatcaaggacaaaatttttctatatatatatgtaaatagtgttgaatcatatatatataaatttttcctaactctctctcagcatctttggtggtctcacgggtagcaattactgacgaagcactcttggcggaggctaatcggcaatctttgtctatgccctctttttcgggtccttcaactcccgagttgtgggtgcaagatgggtccttggagcttcaagggaagatagcgaagggaacattagtttcgaaggtcagaactaaggaggtggatcctcttagggatgcggatttgggaggtgtagtggagggggaggactttgcgagtctaccaagaggttttgtcgagctctccaattgtttggggatactagttttgggcttcgaaaaggaaatcaactctcttctaagaaaactagaagcgaagaaaggttgtggggttaaggcatcagggggaaggcaacattccttgtcctcttcgcgtcttgagaaggaaatccgaaggctcaagtgctcagtcaattataatagtgttccatccatggtaaaaggaaaggggaggggggggtgcggagttagtggcagggggtctctactagccattggtgattctgctaggggttctttgttcattctaggtagggtttttttgttcttctctttttttggtttttcgctagggggttttcagcccttgtgggagttgggtgttggtgggaaggtgggttttaatctttctctcttcttttcttgcttaccctatgggccatatctgtatgctccgtgtgtattttgttgcgccttttgcaagctcttttaatatattctgcttatttatctatgaaaaaaaaaaattatagtgtttagagaagcacggattcctatgatccccctatccccttctagtgacccaactttccaaattgggaaaactaattttcctattcctggatagggtgaaaaattactattccacatcaaggcctcaaagataaaaacatttctcttctttaaaatacattaaagaacttgaaacagtgggacctacagattgttcagtttgttcgacaatcataaaatcaaatgcagcaatgtctttgtttttctctgaacatttggcgtttgttatctagaattgggtatagctatacaagtttttcaacttcggttttgtctcaacttagtcaaccagaaagtaggcatattcctgaaagcattaaaaaagcaatggtcttgagccaaataagcagacttgggttaaggctggcaaacttgagggcaatgatggatattgtttacttaaaacaacagaatccctgaaatataaggacggttgttattccttttcatgtattaggcatgatgaattattcaaactgtaaagattttgtttgttgcgcaatatgaaagttttcagcctaataatgcttgcataactgtcagaattttatttattgtatctggtgctttcattggaaggttggaagcaattgttgcctgttgaagcaacaagatcttctactgtttatatatgttgtcatgtattcttcaattgtcatgcaggt

SEQ ID NO: 10543 - DNA, 1158 bp, Vitis vinifera
  Intron number 1 from transcript GSVIVT01026116001 (locus G SVIVG01026116001) derived from phytozome v7.0 (chr-ID chr1 8; pos 24386072 to 24387229)
actccaagtatgtatgattttgctgtaaatctcttgttattttatgtagttagtttgatgcgatggtcatgagcttctgcattcaagatgatgaactttctttgatttttttgggagtttcagagacgttatttgggagtgatggagactccttttgtttgaaagaaaatgtaaacttacaagagttttctctcttttttcctttttggttttctttccatggattccatcaaaatttaatgaagctatatttcttgatgtcaacctacatccttccttcttcttcttcattttttttttttttttgcatttttggttttcatgagatgtgtacttattcaaaatttactccagttatgttttaatgtggagattgagggtcttttttctttgaagaaaaaattgatcaattctgtagatccttaggctatgtaatttagtttagagaaataaaataaagaggaaaatagaagaaaaaaaatgaactaaacgtaattaactttagtcttcttcaacctctgaatattagcatttgttcacattcctattcctatgatatgaaaacaaatatcatttctagctaaatgatatggtgggttatttttggattccatattcgaatatcgaatgttttttagccctgaatgttgacgtttttttacccgtcattgtttcctttttttcttgtagtgttcattctagaacgagataagatgctgggtcagtgttaagtaattataaagtatgttattattattattattatggatgtaattaagtaaagaatttggaaaataatggcctcatttgcatctcagattctctgaattctgtactatgtgactcaaaggcttagaggctttaggaaacttccttccccccgcccccccacccccaccccccaacccaacttttgggtacaaagaataactttatgtctactcctttagatttggaaatttgggaacaaaggaactctccctgtgatttactgaacatttattatggaaaatggtagtccacaaccctccagacagcagcaaacaaccttcaacattggatattgcttatttttaatccatcttgatggaatgttgttgggtctgtttcttcattattgtagggaaaaagggcaaggttgcagagtattacaagaag

SEQ ID NO: 10544 - DNA, 7788 bp, Vitis vinifera
  Intron number 11 from transcript GSVIVT01028919001 (locus GSVIVG01028919001) derived from phytozome v7.0 (chr-ID chr 16; pos 17555216 to 17563003)
caggtaagtttttattactgaacagttacctctctgttgcagtatctatgaagtcttgatcagctagcttttctgttatcagttttatgctctctctcttcccccctccattttccctttttctttccttcctctctctttttattttttacttattttattttttattttgtgtcatttggtacatgaaaatgcaccctggtttagagaggaaaggtaccttatatatgaaacattgtaatgttaaaagtatcctgttttaaaatgattgtcatggtacatgatattttgattttacagtgatttcaagatgggtgccccctccaaaacttggctatccaagttggtgaccttaactttttattattctaatattaaatagtcttacatatagaacattatgctattgtcaaattatctaagctaggccttcggggaggagttttctacatttaacaaattaagaaaataatatattgaggaaacctaccaataagaaagaaaataatattttgtggaaaaatacaaattgaactgttgattccactgttccttccagttgatttctgagtatgtaggaggctgctatataaaagcaaaggactttctgttaaatttatattcgtagccattagctaacttcaagatgtctatgcaacattatattcaaggaagcatattcaacttttggcatctgaaattctgaactagctaaactggaggaggctatctcccagttgagccagtctgatatagaatctcgactgctttcttagaagtggtaagataagaaagggcaaaggtttatgggagctattgtttgctctttttggcgttacttgggtccttcctttttcggttagagataccctttttggatggtgtggctttaacatgagcaagaagcgtagaaaggtgtggaagacagcccctttgtgtattttttgggccgtttggaagaaaaaaaataggattgcttttgataataaggagctttcgattcataggttgaaaaattctttcgtatgtaatctttggttgtggactaagtcggttgtaaatgaaggtcctcttcctttactcagtttttttgattggctaggtgctagttgagggttggttttgtatcccctcttcttttttgtgccttttggcgcctcttgtataccccctgtatgcttttgggttagcctcaaggtgcctttttctaatatatttcttttctgtgtgtttgcctatcaaaaaaaaaaaagggcaaaggtttgaatacaaatgaaggtcaaattggacatggacagaaattttccttttgaatagaaacaaacagcatttatcttaaaagataaatacaggaaggatgtacaaaaacaggtctttcaaatgaaaacaaaggtacaaagaatagaaactgaagaatttctgaactccttttttgatcttttatcggtacacaccatacacatatatatacacaaatgactgaataagaaaaaatcaatctagcttaattctctcctaaaattaggaaactaaatcataaggaaatatcctaaatgatctctccttttttattcctaaattaaagtcctaactttgacattatttcaacactccccctcaagctggagaatatatatcatataatcccagcttgcaagttaagtcttcgaagttaggcctaggtaaagctttggtgaggatgtctgcggtttggtgcttggtaggaacatggttcaatttgaccgtctcactagtcaccttctctgtgataaagtgtctgtcaatctcaacatgcttggtcctgtcatgatgcatagggttctttgctatgcttatagctgcctgattatcacacatcatcagaattggagatgaactcgtttgtcccagttcactaagaaccctttttatccaaatcccttcacagattccctgtgcaagagctctgtactcagcttctgcactacttctggctacaactgattgcttcttactcctccaggtaacaagatttccccagacaaaagaacaatatccggaagtggaccgcctgtcaatgatgtttcctgcccaatccgcatctgagtatacttcagtgtcacggttctctgtctttctgaagaataggcctttccctggtgtcatttttaaatatctaagaatcctgtagactgcttccatgtgttcctcagtggggctgtgcatgacttgactcacagcactcactacaaagccaatatctggccgagtgtgtgagagataaatcaagcgcccgacaagccgctgatatctccccctgtctaccggtgtactttctttctcgataccaagtttcttctgactatccataggagtatcaattggtttgcatccaagcataccggtctccttaagaagatcgagtatgtattttctttgagagactacgattcccttccttgatctagccacttccataccaaggaaatatttcaaatttccaaggtctttaacttcaaactcttctgacaaatacttcttcaaattctgtaactcccccatatcattcccagatagaataatatcatcgacatagactatcaatatggccaatttcccggcacgagacttcttgacaaatagagtatgatcagcctgaccttgtttgtagcccagcttcaggactgcttttgtgaatctatcaaaccaggctcgaggagattgtttaaggccgtacaaggatttttggagtttgcaaacctgattctttgccatactttcttcgaaaccaggtggtatttccatgtagacttcctcttctaggtccccatttagaaacgcattttttatgtccagttgttgcaagcaccaatcttgattgacagccaatgagagaaggatcctgatagtgttcagttttgcaacaggagcaaaagtctcctgatagtctatcccataggattgtgtaaaccctctagctaccaaacgagccttgaatctttcgactgatccatctgctttgtattttatggtgaaaatccacttgcaccccacaggcctcttcccaaccggcaaatctgtgatagtccacgtcccattcttctcaagtgcatcaatctcatcttgtactgccttcttccattctgaaatttttaatgcctcttgtattgtgttgggaacctgagtatcatcaagagaagtagcaaatgctctgtaagatgatgataacccttcatacgtaacataattcccaattggatgatctgtacatctcctaatacccttcctcaatgcaattggcaaagtagaatcatcaatgctaggaattaacacctctccagccctatcctcacctatgttctcttcaggaagacttgaattggagtcaatatattggccacatgttgactgtgatccgtgctctaattcctgtcttttcctcctcctgatgtaaacttgtaagttcttattagcaagttgtggggctataggttgaataggcatgggagactggatggtcacgggagaaggaacatttgtgtgctgggctggctgaactgatggcggcatgggtgtggacaactcagtgggcgcgaattgggaaggatttggtgactctgagtgaaaagaaggtacaccctcaagaaaagactcccaaacttgatgttcattcatgctctccccctgaacatgagatttgggatagaagaagacatgttcaaagaaagagacgtccatggtggtgtaaaatcttttgttggttggagaatagcatttgtaccctttttgggttggagaataccctagaaaaatgcacttatttgctcgaggagcaaatttgctacgattttgaggatacacatgaacgaatgccgtgcaaccaaatactttgagtggtaaatcagaagaggcggcatgggtgtgaggaaactgttgtaagaaaagttgacgtggggattgaaaggtaagcactctggatggcatacggttaatcaaataggtagctgtgagaatagcttccccccagaaatagtttggaacattagaggaaaacataaggcaccgggcaacctccaagagatgtctattcttgcgttcagccaccccattttgttgtggggtgtcaacgcaagaacttatgtggataatgccatgattttgaagataagtactgagactactagtaaagtattcctttgcattatctgacttgaggacttgtattttggaattgaattgattttgaaccataagattgaaggtttgaaaaatgtgcccgacctctgacttttctttcataaggaaaacccatgttagccgagtatgatcatcaacgaatgtcacaaaccatcgagtgccagaaatattttttatccgggagggaccccacacatcactatgtactagagagaaaacagtcgaaggtttgtatgggatttgaggatatactgttcgagtatgctttgcaaactgacaaatttcacagtgataagatgctggatttttattgataaataatttgggaaacaattttgcaaggtaaacaaagctaggatgaccaaggcgatagtgtaacattataatctcactatctttattgaccttagaatttgacacagaattgaaagactctgaaatactctgagactgtacgcaacttgcttgagagacttggtttgagaattggccacatgaaaggaggtagagcccgaaacacagttcagcactgccaatcatcttccccgatttcaagtcctgaaaaacacacaagtttggatagaatttagtaacacattggagatcacgagccaatttgctaatggacaaaagattacaatccaagtttggaacatggaggacagagtcaagatataagtctttagtaagttttatagaacctgtcccggcaatttttgactttgaaccatcagcaatatggacggatgaatgaccattacttggcttgtaattttgaagaatggcagcatctcctgtcatgtgatcagaagcacctgtgtctactatccacggcctcattcctcctcgattagcagtgaaggctacaccggtagtactgccactgccaacttggcttaataatttctgtagcatctccatctgctctttgttgaatggactcggctcgggaacagatttgctctcagagttggcagccacgtgtgctctgccatctctgtcaaaccgtggctttggtttccaatcagccggtttgccatgaagcttccagcaagtctccttataatggcctggtttcttacaataatcacaccaaggcctatcccgtttctgacgatctccaccactactattaaatgaccgagcagcaagggcagaggcatccaatgttggggcaggttgctcttttgatcccatcatcactttctttctactttcttcacgcctaacctctgaaaaagcctccctgagacttgacaggggtttaatgcccatgattcggcctctaacatcatccaattccctgtttagtcctaggaagaacttgaacagtctcttttgttccacaatttgcctgtatgttgctgcatcatccgaacatttccatgagtgagtctcaaataagtcaagttgctgccaataccttgtgagtgtgttgtaatactgagtaactgactgctctccttggcggaagtcatgtagagctgattcaacctgaaacagttctgaagtattttcagaacttgagtaagtttctttggctgcatcccatatgtcctttgcagtcccaaacaacaagaaattttcgcctatgtcattgttcatggaattgataagccatgacatgatcatgctgttttcaatcttccacttcctgaaacccggttctgtagtttctggcatgactgcttctccagtgaggtactcatcctttcctttaccgcaaatgaacagcaacacagattgtgaccactgtaaatagttatggccatttaatttgtgtcctgtgatgagaataggagaggaatcattgccaccaaggtttggaatttcagatctgccccctgattctggtgacgtgacgctggatacttgtgatgatgccattccgtattttgtcatggaccggaaaggtagaagaacacttcccaagacacatgcagggactggagttgagaaaaaatagccggaggacgccggaaaatctgatcagagggcccgcggaagcaaaagaaccccaaaagaggcacgtgcagggctcggattgcacaaacaggtaagaagggtggctggtcggcgtcaggcgagcctggaggaggaagcgcgtcgccggaaagtggctcacgcgccctcacgcgccggcgcgtgagatgtagtcgccggccagaaaaacgcgcgtgggcggcgcgtggatgagtttctggttccggtgctttgggacaaattggagatctcctccaggcgctccttgcggtgtagaaaaaaccgtcgccggaaagttcgccggaaaagttgccggcggtgagtgttttctgacgatgattcgattgaccggaaagcgttttctcccttggctctgagaacagggactgatgaccggaatgagagagagagagagagagagagagagagatgatcggattgagatatggccagagagatttggccggaatgagtgatggcctgaataagaggtgaccagaagggattagggtttcagaaaactggctctgataccatgaagaatttctgaactccttttttgatcttttatcggtacacaccatacacatatatatacacaaatgactgaataagaaaaaatcaatctagcttaattctctcctaaaattaggaaactaaatcataaggaaatatcctaaatgatctctccttttttattcctaaattaaagtcctaactttgacattatttcaacagaaacatagcacacttgagggggaagaaagtctccaacaaaataggccaaacaattagctccttgtttggttaattgatctgtgacttggttggctgaatagggaacccaagcgaggaagcaatccagctcactgacagtagctatgattttgcacatccaattttcaaacttccatgtacctctttcgtttctccttttttttaggtaaattttgcccccattgagacttgaacttggaacctcccacaaaccctccccatccctttaccacttgagcctggcctcaagggcttcatgtacctctttcattattaatcacccaagatataacagtagctgagtcacccactacagttagggtggaaaagcttaaagctttagcctgtagcaaacactccaacaatgtcaatatctctgcctcagtaaccaaccccactcctgcctgcttagaacagacttggtaccagtagtataaaaacttcatttctagtgaatcattccgagatgtcatgtgttaaatgtagcttgaaaggtgtgacaaatcattatttaagccaacaatttgagctgaaaattgctaattctcaaatttttaccttttttttttcaacaagaaaataggtgaggtgacatacattcaagaaaattttcaaactgatcgttgaagtgccacaattatgggttctcactcgttttcatttgttgtttgatttttatttgacagcatttgattactgcttcttttgttacgtttcctgcaatcagtgtgccaaaggattttgattggatgaaccaacactatgtatacagtatacttatgctattgctttataggtgaatgctggacttatcttattgctcatactctgtttaggttggtgacgatctga

SEQ ID NO: 10545 - DNA, 6166 bp, Vitis vinifera
  Intron number 2 from transcript GSVIVT01014071001 (locus G SVIVG01014071001) derived from phytozome v7.0 (chr-ID chr1 9; pos 101679 to 107844)
tcaatccgtcgtggtatgcaccttgaatttcattttttggtttttgcatttttattaaatgatcatggagacttgaacagtgatttccatcgccaagaatatctgctactaaattgtccaagagtttaagcctcgatggactattatgtaatttgaatctcacataaagcttttgggtgtgttgggttgacacttgtttgtgtggaatcaactgagtagtgaatttaagcacaggcccatgattatgacgaagtttcaaatgtgaaggtaaatcttatttatggattagcacctatagaggatgaataggtgatttgaaaaattttatcctcaagttttgtcatcctctgattttttttccacatgcaacacgagcattaatgaatgctgcaacactcccccaataattaaaatatgctagtcacatgcaaataaattcaacaatctcccaatataatagcgattccatctagttttcattctcaatcacacaacgtactctaatgcaaattttactatttcaatactctcccagtgatagcaaattaatcaataatcacagttatgatattcagttagaataaaatgaaattgagatagtatagagagggatgaaagtcaattttttttttttgattggaaacgacacaaagatatattgatgaaagtcaaatatctgaagaaataaaaaccatgggcccccaatgattacaaaatccaatataataaaagacaatgagtatgagattttactaggggtgcaatttgggcagacgggcttaacccaacctggcatttgggcgagtttgggcgatcatttttaatactagggttgggcttgtgttgagttttttcaacccgagctcaatttagattgggctaggataatgttcagacaacctgagcctagaacaaatttgaagctcgagaacactctcaagattgctctctcttcttaaaccctatttggaaaaagaatggcttaattggtagagtataattccatctaatgatcccaatcatttcagaaaaatgtaaaatttgtatgctgtgatcgaagctcgattgatccattaattagttagaaactttctggataatcgttgattttaaagttggcacccatccacaattttgcactgatccttttattttctcacaacctctagccactttcaagagcattgatcttcaatatgataagagtctaaacgaagatttgaagtatttgaactaggagttcacaatggaattttgatctagaattgccaacacagacattcacaaaatgaatgatgcccaaatggtttgtgtatagtgttttaaggaaaaattaggtagatgtccctgattgtgcaatggattacatgttatgtcaatgagtatatcagataagcaaattggagaagttgtttgcagcacaaatcattttttgttttctttgctgaaatgcttggctggtttttcttttttcaaacttaatgacatgtgacgaaaattttgcaaaattgggtccattaatgcagttgaagaggcaaattgggaagctcaatactcgaatagcattcctcctttaggagaaggctatgtggataaccgttgtcatgggttctggttatagacaaagtgctagccatattattggttgagaaggaacccatatgtggaacaaccttctaagtttgaagtccaaactcatttgaaaatggtttatttgtgcctctctaaatttcctttttccttttttctcttcaatctcacttaatcagatgtgctaactttaatcagaggtgtagttaggcagttatgttttgggagctcaaattttactgttgaaatggatttgtgttcctcaataatatgaggttgtgtgaattgaaacatgtgccacaattatgggaaatcaagaagatagcttatagcaacgttataatgtcaatttttatagtttttcatcattttagatgttcgctacttctaatccaggagcttgtagctgttctttatcacactcaaatcattgttgaactttcaacatccaatttgtatttatttattttattttttgataggcaacaagaattttattgtaaaaagtgctcaacaaaaggagccatacccatgttatacaatgagggtgcctaaggcaccaacaacaccttcccctttacctaaacggtctgtgagatccatagattacgtaaacgagcacattcatccacaaatctggtactaggattcgttggattgttgagagataattctggtttgtggctagtgtatgctattcagtacatcttaaaggccttctgactgtgaagttttaacaactacaatactttgatgctgatccataatagttgcctgaacttccaaatatcattagtataggaaaagacaagctcttattttttaacttgcaaacttcaattatgatccatgatagttgcataaactttcaaatatcaatgctggtagcaactcttgtctaatcaaggtgccattattttttattttaatttttttttgataggttatcagaaacattttataaaaaagaaaggtaaaaaaaaaagtgttttaaagtacataggacatatacaaagaaacacctcaagacaacacaaaaacaaagaggaacaccatcagcaacccccttagcccaaacccaaccactcacaaagtctacaaaggatagaggactaggaactatgtacaacttacaccaagccccaagattacaaaagaaggagaatttcaacccttgaattgaccgccccttattgtcaaacgccctactatttctttattttcaaacagtccaaaaaaggcataaaggagcaatccaccacgcttttttccttttcttacccacgaaaaaaccatgtcaccgaaacaaagcctctctaaccaaggagtggagcacccatgacacaccaaaaagagagaacagaagatactataaaactcttattctattacaatgaaggagaatgtgatcaacggattcttcctccttgaggcatgggaagcatctattcgccaaggaccactctctcctctgaatgtgctttaaagttagaaccttcctccaagtagcctcccaaacaaataagaccatcctcagtgacacccacggatttcaaatcacacttgttgggaaaacgccctgccttactagttccaacaccttgtacaaggtcttgacagagaaagcttcattcttagacgtggtccacaaaatttcatcatccctatccctagacaccatcctcccatgcagtctcaaaaggatgcactccatggtttccatctcctaatcgttgatttgcttagtgaagcgaggggcccaacatccttcctcaaatgaatgattccaaacctcctccacccatgcctctttggaggaagctacaacaaataaggaaggaaaagagatgcacaaaggctcatcaccacaccacttgtccttccaaaacctcaccctcctaccatttccccaccaaaaagacaacattgtagcttaacaagtcttcctcattcttgatgactttccataaccctaccctgtatgcttccctcacttcatgagagtgccaccctctttcctcctcctcatattttctgctgataacttgcctttaaaaggcccccttctccttagcaaaatgccaattccatttgcatagaagagatctattgagcagtaagagattcctaacccccaatccacctttacttttgtctaagcaaacaataaaccaactaaccaagtgaagtttcctctcaagggcccctcattccttaagaaagtctctttgaatttgctccaatctcaacccaaccgatcttgccatgcaaaataaggacataaaataaatagcaaagctagacaaagtgctacaaattagggtaagtttccctcccttagaaatatactgtcttttccaaagagtcagttttttccaaaacctctcatccacaccgtcccaaactactatagaattagaaggaacacccaaagggaggcctaaataagtggatgggagtgccccaaccttgcatccaaacttgtgagccaactcccttatattctccacccttctcactggcattagcttgtttttttccaaattaactctcaaccctaatatgacctcaaatcgcataagcacccaaatcaagtaagtcaattggtctaaggaaggctcatagaacactaacatattatcagcaaacagtaaatgagaaatatccaccccccctcgtccccttcctctcacctaccacctcagtggaaaaccaccaaccttggccctttttagcaagcaactgtgggcctccatgacaatcataaacagataagaagaaagaggttccccttgttttgaccccttagagctctgaataaagcttgaagaagaaccattaacaagacaaagaagcttacggtagaaatgcaccacttgatccaattgatccacctatcaccaaaacccatctttcttagcaacatgagtaagaagctccaattgacatgattagacgctttctctatatcaagtttgcaaattatcttacatttcaaaagcgaatcaatgtcctcattagctatcaaagaagcatctagaatttgcctcccctacacaagcattttgagattaggatattaccttacccaccaccttcttgagtctattggctaacacttaactaacaacttgtcaaggctactcactgagcttatgggcttaaagtccctaagatcttcagcagccgcgcccgcgccgcgcccccgcgccccccccttcttaggaatcaacaccagaaaagtagcatgcattcaaactctttacgaatcttccatagtcatgaaaacccctaacaaggtgccattatgcttgtaataacttttccccccttacaatggctgcactctggcccatgttaccccttatataagttgaatgaaggatttgcagtaggatgagaatccatatgttacgaaccaaacaaattatcaaaaccctgaagattgatgattcatgtcaaatcaagccctttttagctttttgggattgcgatttgtgacaaatgcatcttatctaggaagcatgtctccaactgggaagcagtgtggggtaggacctcaactatagacttgttaatgatgaggaggtggacgatggttaatagatgtagtctttgcaaagaatctgaagagtctgctgaccacatttagattcattgtgcgaggacaaaggtgctatggtcatttcttttaatcaatttttggtcagtaaggaatctgctcctcaagtagaagttcaagggattggctaagaagagttgccatgtttggcaaatggcgtccctatgcttgttctggtgtatatggaaagagcgaaaccacaaaatctttcatggagaagagcttgcagatcagaggttgaaggagtgcttcattaaatccccctttgattggttcaaagtttcattagaaatggaaaatatctggattatggccttcatagatagtcttagttgcagatagtttggttttgcggctgttttttctgtaaatgcctactagtattttttgttttgatttttgtgcatacttcctatatatatagggtactccccatttcattgctgctcttttaatagatttctctgttttcttttcaacaaaacaaaacaggaaaaaaaaaaagaaaactggggaattttttggtggtaatgtttaaaatgttgaaagtgcttcagagaaacttggcaagtgttaaatgatatgactagcaaagcacattttctgtaatagttcttatatgtgtttttaaccaatgtttgtggatattccaactgatcaaagtgcaataactactctagtactacctactttttaagacagcaataagcaatccagccacagaaaaaaatttcctacgatgccgacttttatttaaataagaattaagaagacaataaccttttaaagcacttctctaacattgtatatattattctttatattttagaagaataacaattatcatgctttctgtttatgttacattttgaacatttagatcattataagctttttgattctaaaatgatttattcttgtttttgactctggatgaatagattccaaaggggc

SEQ ID NO: 10546 - DNA, 10846 bp, Vitis vinifera
  Intron number 19 from transcript GSVIVT01011619001 (locus GSVIVG01011619001) derived from phytozome v7.0 (chr-ID chr 1; pos 5869923 to 5880768 reverse strand)
tggcttcaatctttggcttcattctggggtcacttgtatgtatctgtttttttgcaagaccttgtgttgttgcatattatttgtcatatccacctcaacatgttaatattggaaattattcgttatcctgcatttgtctatatgcgtatgtgctatttccttgtttgttgttttcattcttgtactacttagaaaacttgtttaaaattttatacgcatattatgagttctcaatcatgggctcctaagctttattgtccttctgtgtaggtttatatttgcactaattcctttgaggcatctattacaatgttcctcatttttcccctttgtttgtctcataatatttacataagtaatctttcatgtatattcaaagtactgatgtgtcttggagttactatgcacattttatccatggtctgtagaactagaagtatgtttcttaggtgctttattccagtttccaggttgcagattagcctcaccataagcaggatgactggaactgagatgttatggagattgcagattttggagatttcctggttgggaaggacagattacgctcagtgtcttctcttcgcttgccatttgggccaggctgcagttagatatctatatgttatccattgacaattttgataggagattgttagaaaaggcaatgtctatcagagaaaggagggggaagtgattttcatcagaattattcttttactgatggtgaaaaagcacctttagaatgtttaaatgatatcacttgtttagtggaagatcatttctatatgaaaaatggaaggttttctggggccatttacatgactctaaatggtaggtggcagtacagagatggatagcttatgagtatggtgtgcacatctgtcaaaaccatggagggaacaagttggactttatctagtgacctgtttgtactgaaggtggttgtggagaggcatgcgtgtatttatgattttataatgggtgtgaaattggtagtgggaaacagaggtacagtgaaattttctgacaacttatgctttggagtaagactgcctttggcaaaaatattgcagttggactgtggactacatgactggatgctcattttctgctggaaactaaatgactaggaattgaagatttactttttccatgcagagcttaggttttggtgggtggatggcaatggaaggtggttgttcccaagtagtagaggatttttgttggtactcttttctttcttcttggtgctcctctctgttagtaattgctcatcctggaagattccaggaaaaatattttggtgtgatcgactcttgttggtaaaacttttagcatccatcaagctgaagagaagtgattgtactgtgatgagatgtgcactattaaatcagaagaggtggatggtgctgttcttagtttgattctagcttctttaagctgatgttggttgtttcatatatcctgccttattcatgattgtgcaatccattcatggctgttgtcagcctgccttttggtgaaaggaggtgctgtaggatgcttcttcgtttgccttattttgtgtggtatagaaagtgagaatgatgactttttgaatcaaaatttctgtggagccaacactcagaagatagagagctgcattgttttcttgacgttgatctgccaaagttcccaagggtatcaggactactcagtgtacattaactcttgtttttgtttttggttgaaactcaaatagttttgctttacttcatttcacaatgaccatcacacctcatgcactatttggtccaattgctttttgacataagtaataaaacttactctttgtaaacataaagagattgttgaagttaatgcttagcttgtcttgaagtagcatgtccatgtcacatttcatttaacatgtcattatgatatttttataattttaaggattattatggagtttgtccaggtcttgtttactttttccctgatatttctttcttgatgcctttgttgcattgttttcagatgactattaaggtttacaccttgagggttatggtgatgctggaaaggttgagagttacatgatggaattaatgaaattgtcctgtgacaaacttgggcttttagtcactttaggtgttaaggcctgtctcatgtctgaattgtacaccttgaagcttaaccaaatataaatgaccctgtctcaaattaggactttaggtgttaagtcctatcaaaaatattttctacttttttattatttcttaaattttctgaaatgaatgttttatttgtttctatttgatacatttaggttttttagtgactttttcagactttatttagatttataaatttcatgagtcaacatatggtctatttggagcccgggtccacaacactcttcttcactttacagctgtttttatgagcaaaattgggattaatcaaaggattaacctgagcttcatcattaggctttgcgatgataacattcattggtagttatgctgataaatttttatgctatgtgatgatatttacttttctcttataatgtctctatttggtacttcagttctatctttgcatttttattttttaatctgattattgttttcatctttacacgttttatgcaattttttaaggaccaactcctcttcaccaatttatcaattgtaagaattttatttggcatcattgtccaactagagacatcattgtacgagtagaggcacactaaatttccataggatacctgttccaccctcaatcaaagaagtgaaaaaaagacccttcttgtattatcagttccaaaggatgggtttctcaactctctctttttttttttttgataaataaaaacgcaaaagtatattatatataaagaataaagggcgcccaaaagtcacaccaaagcatataaggagtatacaagagacacctcaaggcataacccaaaaagaaaaggggatacaaaaaaactcatccacccttatctagtactcaaccaatcaaaaaagtcgattaaagatataggtccttcgtctataaacatcttagtccaagaccaataactataaacaaaagaatttttcatcctttgaattgcaaactcctcatttttgaatgcaatcctgtttcttcctttccaaactgtccaaaagagacataagggggttgtcttccacaccttttgacgcttcttgcccacaaaggaaccatgtcaaccaaggaggatccctctatctgacaaaggaaggacccactgtcaaaatattgtgtgaatgaccgaatacttggccttgagttttgtatattatatatagactttacaaggatgctttacatggaaagaaaataaaagcaaataaattccagcatgattctagccctatacatgtaaactatagtctgtcaaaaaatatatgctaactgtacaaaataataaatgaagaaataaggaaacaattgtgggctaaaataaggaaagaagggtgggctaaattaaggaaagaagtgtggacagcaagtgtgggctaaaataaggaaggaagagtggacagcaaagctgtcctaatgtggatagcaaagctgtcctttgacagctgtcctttgaccagcaaagctgtcctagtgtggacagctgtcctttgacagcccccctcaaattgatgcaggttgatcaacaagcatcaatttgctacttagcaagcaatgtcgatgacgagggagagccttggtgaagatatcagcaatttgtaagtcggtggaaatatgtggaagagtgataacacgagcttcaaaggctttacggatagagtgacagtccacttcaatatgctttgtgcgctcatgatagacaggattggccgtgatctgaataacgcttgtattatcggcatgtagaggtgtaggatcggtctcagaaaaatctaactccgcaagcaaacctcgaagccaaatgatttcagaacaagcaagagacatcgcccggtactcagattccgtagatgacttagagactctgtcttgcttcttacttttccaagatatcaatgcatctcctaagaacacacaccaaccagtgatggagcgacgggtatccgcacaaccagcccaatcagcatcactataagcagcaaggcgagtagaattgcctgcagggaagaacaagccacgagtagaagtgccttgaacatagcgtatgatcctacgaacagcagccaaatgaagatgacgaggagtttgaaggaactggctgacttgctgtacagcaaaagaaatgtccggtctagtaatggtgagataaacaaggctacccaccaacttcctgtataaactgggatcagcaagtaagtcgccctcctctttgcgaagcttgacatttaattccatgggagtatcaacagaagtagtcccttgtagaccagctgtagccactaagtcactcgcatacttatgttgattgagggaaataccagagggactatgatgcacctcaagaccaagaaaatatgtgagagacccaagatctttcatatgaaaggactcggagagatgagttttgagctgaccaagtaaagcagaatcggaaccagtgatcacaatatcatcaacataaaccaaaagaacaacaatacccatgtctgatttccgaagaaacaaggaagtgtcatacttgctctgcctgaatgaaaattgtaataaagtggtgcggaatttatcaaaccaggccctcggagcctgtttgagaccataaagagagcgacgaagcttacacacatgtgaagtcggagagggaaacaatcccgggggtagcttcatataaatacactctttaagatccccatgaagaaaagcattttttacatccatctgatgtagtggccaatcactggaagcagcaagagctagaatcgtacgaacagtagtcattttggccacaggagcaaaggtctcttcataattgacaccatattcctcattattcccaagtgcaacaagccgagctttgtaacgatccaaacttccatcagatcggaccttgactgagtaaacccatttgcaacccagaggaacaatagtgggaggacagggctcaatgtcccaagtgtgattggcctctagagcggcaatttcttcctgcatagcttgtcgccaacaatcatgcttagcagcatgtgagtagcatgtgggaatatcaaatttggacaatgtagcagtaagggctgaaatagaatttccagaactggaagagggaaatccatacctattccgaggtacagacactcgagaagagcgacgtactgaaggtgctgcaactgactgcatctggagcgtggtaggatcagatatcgggtgagccaccgaaagagactgtgggcgggagcgtctcgtatacacaatacctggttgaaagcgagaactgactggatgaagatctgagaactgttgctcaaaggagggaaggaccacagtagaagaggatgacacagtagaagaggatacaggaaagaaatgttgattttcaaagaaaataacattcctagaaatacgtgtacgatgtaatgtaggatcatagcaaacaaatcccttttgacacatattatatcccaagaaagcacatcgaacagattgagcagataatttatgtcgctcatgatgaggtaaatgaataaagcatacacaacaaaaaatacgaaggtgatcataactaggttgcttagcaaataagcggaaatagggagactccatatggaggacttgagaaggtaaacgattaatcaagtgagtagcagtttttagagcctctacccaaaacatggatggaacagaagattctaacaagagagtacgtaccacatctaaaagatgacgatttttgcgttcggcaactccattttgttgaggagtagagggacatgaacgttgatgaataatacccttagaagccaagaatgcttgaaactcagtagacaaatactcaccaccggaatctgtgcgtaatgtcttaatagaagtagaaaattgattgtcaacatacgctaaaaactcagtgaaagtacgaaagacctcagatttagagcgaagaaagtagacccaagtaaatctgctatgatcatcaatgaaagtcacataatatttaaatttctcatgtgaactaactggggaaggtccccaaacatcactatggataagatcaaagcagtgagatgctctacttgcatgcaaagggaagggaagagttttacttttaccaagtttgtaagaatcacactcaagagataaagaataacgatccttattaccaggtaaatcagagttcaatacatgagataagatctgagtattgggatggcctaaacgacgatgccacaccatactaagatctgaaacattattacaagcaaaagacttaatagaagaacgtggggtaaaatctggaacaggtaaaaatagtggaaacaagtgccccactttaggtcccttcgcgatcggcttccccgttacctggtcctgcacaacacaaccattaccagaaaaattaacagcacaattgttatcaactaattggccaacagaaataagattcgtggaaagctgaggggcaagaaacacatcagtgaacttagaagagggatcgccgatagcagctatgggcaaagaactgccattggcagtctgaatggaagagtgaccagcgtagggccgaacatgacacaaagcggtgggattattagtcatgtgattagaggcccccgagtccacgtaccagagtttagtagaattgttaccttgaaaccccattgctgataatgctgaaattaacatccgttgcaccatttctggggtgcagtaatctggtgcaggaggtgcaggaacagagcacggagctgaaggagagtcgtgtgttgctacaggagggacaataaccgaagtctgaaatgcttgggcctgacgattctgggggcgaatacgacattctttgataatgtgacctttcttcttgcaataagaacaaaacttcttagggcaagtggcagcaatatgcccatattccttgcagcaaaaacactgcaagtttttagaatgcataggtggtccgcatccttgggcagcataagctacagttgtcgtcccggaactgccatgagattgctccaaaatagcttgagtactaaggcgttgctcttcgcgaagtaactcaccaaaacaaatatcaagagagggaacaggagatctattcagtaaagaggagcggacagattcatattccggacgtagtttcataagaaactgatcacgccgggtagtcgcgtgaatagtctgaatagttgagagagcggcaataggaacatccgctgtaaccaaatcagcatattcatgccaaagagtcagaaatgccgagtagtagtcctggatggaaagactaccatgttgaaacatggcaatcgcatgttctaattgaaagcgacgagcatcgttatcctgatgataaactttcctcaaataagcccacatagattgagcggagcgatggggccgcaagtgggtgacaatatgaggctccactgaaccaagaagccaagacatgatgcgtgcatcaagcacagcccatgaaggagaagtcccaacatcctgagatttgtcaaaagtggatggtttttcaacatccgtgccatcaatatgaccccaaaggtcttttcccttgagaaaaagttcaaactgaaatgcccaggtagaataatttgtgcccgtaaacttaacacacagaggtgcggaatccatagaaaataaatagaacccgagacaaaaggatggaccaaaaaaaaatcccagaagaaaactgacccacgacagccacaaaaatactgagtgcagcacggatcaacacagacttgaccgaaagacacgagaggcacctccgaaatagaaaagacagaaaagaatttgagggaagaaaaattagcaaccttgctctgataccatgtcaaaatattgtgtgaatgaccgaatacttggccttgagttttgtatattatatatagactttacaaggatgctttacatggaaagaaaataaaagcaaataaattccagcatgattctagccctatacatgtaaactataatctgtcaaaaaatatatgctaactgtacaaaataataaatgaagaaataaggaaacaattgtgggctaaaataaggaaagaagggtgggctaaattaaggaaagaagtgtggacagcaagtgtgggctaaaataaggaaggaagagtggacagcaaagctgtcctttgacagctgtcctttgaccagcaaagctgtcctagtgtggacagctgtcctttgacacccacgtcacatcgaagagtgcaaaaataactcccataataccttagacttagagcaatgaattaggatgtgatctataggctcttcttcaacaaggcaaaggaaacatctattggctagagtccacccctcctctttagttgatctaaggttaagaccttaccccacaaagcttcccaagcaaaaaagcccgctttggaaggcacacaagggctccaaatgattctccacggaaatgggactgaattccttgtctccaaagcaccataaagggacttaacaaaaaacttcccattcttagtctctttccaaagcatcctatcctttgagtccataaataccctcttcccttgaattgtcgaaaggaaccgctccaccaaatccacctcccaatcattgaaaggccttgagaaacgaggattccatcctccctcctcacccaaagaatcccacacctcccccacccgcacctctttagagtctgccgagacatacaaaaaagggaaagaatcacacaaaacaacatcactacaccacttatccttccagaatctcactctttagagtctcccgttacccactaagaacccaattttattactcattaaaaatcattcctccctaatttccttccacaaacccacaccataccccttcctaactattcgtgtactcgacccctcttcttttgccccaaacttcctactaataacttgcttccaaaagcccccttttcaactgcaaaacgccaactccatttgcacaaaagggccctattgagaggagaaagacatctaacacccaagccaccctttcttctgttggaacaaaccactacccacttttctaaatgagacttcctctctaaggcccccccaccccaaaggaagttcctttggtttctcaactcccttatgatactcccccatgaagcaaatcaatcaaatttcctacaaactccaatttcaaattccattgtagactgaaaatttaggtattctagtgcatcttgttttccttcaattatagtcaagaatatagggtttttgctgatatacagatcagaacattctggaaaagcaactgctatagctgagtcatagaggaatcaaggaaggttatggggtgggagtgtggaagacaattgggaggaggcgggaaatttttaagggtagaatggatttttagggtgggtagtgggaatagggtgaaatattggaaggataagtggtgtgatgacttttccttgagggaattatttttggaactcttctaaataacctcccttaaagatgcctgcatagctgaggtgtgggaggggggcagctggaaccttaggttcataggatggtttcatgattggaagttagaggggggtggaagcgttctttgggttgctgcatgagcagacaattgggagggacatggaagataatttggtttggctgaacatgaagagtgacaattttacaattaagtcctctttttcaaatggaagggtggaggaagtgtttccttttggcaccgttcggaattcttggggaccatcagggattagtttttttgcatgggaagtaatgcaaggcaggatccttactttggactagatcagaaaagaaggtttgatgattccaaatagatgttatatgtgcaaagaagaacaaacaaccgatcgcatcctccttcattgcctgaaagtaactattttgtggcagctgatcttatgccctttatgggtgtgcagtgagcgatgcattcttggtgagaggtgccccttttgagttggcatgggtctttcgttggaaagaagagaaaaaaggcttggttatgcttatgctgaacattatggagggagagaagtaggaaaattcaagaatattgagggagagaaccaagctattaaacagtcattcgtgtgctttttttcttggaatgggttagggtgtttgtaggagattgctccttgtccatgttagattttttggagtagttaggctctaagtaaggcgtggttgcaattttttgcgctcccctcaccttgttttttggcctttttggcatctttgtgcacatcgtgtatacttttatgcccctcttgtaggtgctgttttaaaaccgatattttacatatcaaaaaaatagccgagtcctcactccaaacataatgttaagataacagtactatcaggccccactgctgaggcaactgacttagtaatgtctcccaaacctcttcttattcctcttacctagttcacaatatatttgcctcttccctcctttgaaaaccacctctttctcaattccgcattttcatgcaaacactttcctccagaaacttgttctcttgagcaataaacattttcttttcaggatattaaatgtgaaatatatacttcataaaaaatataccacctgtaattattgctttcctgaaatttaatgaagccgttatgttgtttgtaggtgtaaaaaatacccatca

SEQ ID NO: 10547 - DNA, 24476 bp, Vitis vinifera
  Intron number 1 from transcript GSVIVT01022054001 (locus G SVIVG01022054001) derived from phytozome v7.0 (chr-ID chr1 4; pos 3622364 to 3646839 reverse strand)
atatccttactccagtgctcttcagcgaaaaggtcagttgtctcttagatttccttttcttctcatcttataacaattttcccttcagcacttgatttagaacaaagttttgaaagaaaagaatttcatgaatgaatagatagaggaaactacatttcagtatttcatttccttatcttgtttcacagtgggaagaacctaaaatatgacagaattttcatcaaaacttgtttctcaagcagtgataaaactaatgccaggactctagcccaagctggcttgatgtatcattggccagttatctaacaacttaggcagctgagtcaaattggaatcaaagccctgttttccaaatgatcaggagatatcattagtcccctaatgattggtagcttaacattgttggctacttggcctgatgcacatatggtatcgaattaattattagactttaactcatgctgactggataaattcttgatcaattacttaacaacttaagattttaggttggtatcttgacagccaaaaatatagataaacttttttaatcaattttgcttaatttctttgaaaggatgcacacttcataaatcaacttgagaatgtgcaatatgacaagaaaattatatgaccaagctatgaaagtgggtatctcaagtatcattatattagtagctaatgttagtaatagaaaatttttactctatggcttcaaaaaaaggagccgtgtttgtgttcacttggactatcccatgagtgatgactttagcgggcacccttcaaacaaggagtcaaacaaacccctatatcaagattggggatatgttctgataccatttataatgattgtacctaaccatgtggatattgctccctcttttaagttcaaaagggccctcatgactttaaaacacttctacaaggttaagaagagttcatacttatatagtgtcagaaactctctcttatctacatggttaggtatggatcgttacaaatggtattggaaagtattagagcctatccccgatcccgatgtgggagtttgtttggccctcatatgggaagtctatttgttttgcccccataagagatgtctatctgtttggccccataatcccgtgggacataacgaggaaattgtgtttacatagggtgcttaattgtaatgtcccacatcagataagggagaaagtttatgacattatataagtatgaactcttcttaacattgtaaatgtattttaaagtcgtgaagactcctttgaacttagagcgaataatatctacatggttaggtggaagtcgttatagagacattgaaccaaagaagtgttttcttttactgtatattttaatatcaaactcaaaagcttccatttgggaatgtatatggtaattgttgaaagaatgggaggttgaaaattgtgataaataaaaaatactggcttctaaacttgataacatgattcaaccatctattttctttgttgtaaggttcaaacacctttgaacttgtccttatctcctattcatttagctcttcaaagattatgttaaagcattgcctatctatgatttatgaacctcattaaaaaattctactattgaccgacataggattcattctttgggtacatagagggaatactcttttaacaaacctgtactggtaaaaatgccggtaacttcccctgaaggtaggtgttggtttggtgttgagttgaagacttttgagattaacatagaagaacacaaaggaaaagtgtgtggaaagatctgtgaaagaggccctaagttttcttcatggatcagatttggaggaaaagacttatctttgctgctagaaggggttgagtcatgttgtgggctaaaggaaagaactcatttcaggaaattttggttagaaggtgatagagattatagtctggaactcagaagtaataaagcaggaagattcttgttttgcgtcgtaagagatgtggagaacaaaagattttccttggcttttcctgaaggaaaagggcttgttggaggctaaaaaattcttgctagtaaacagagaagtgtgggagtctccccccttcagtggaaaggtgctctgttggatgaccacttaccttctcaagactcgcccagcagtagtgtagacatagtctcatcttctcttcaggactaccccgtgccacgcgatgccgtttggctagaaattgagaaagaaactttggatagaaatgaggagctgctgggtaggtgtcttgtgggctcttgggtgggagacgttgttcgccttcttgaccttgtttctttcggatcgtgggcgaagaactcatggttcttggaaggaaacctctggctgtcaaacaggagagaaaatctcatgctactggagtttgaattctaggacgaagcaaagagggtgtataattcagggacgagacgttttagaggaagaagcttctgcttagaaaaatggaaaccatttgtgggatgtcttgagggagatagaggggacgcacgccacgtgtgggttagaattttagaactccctctgcatctatggggaagaagcctcttcaagaagttcggtgacttttgtgggaggttcgtggctgtgaatgaaaacacagctgaacatcggaacctcaagtgggccagagtcctcgtcgaaaccagaggatggcaacacccaagttcactgcaggtggtcgctggctccttttgttatgctctgcaactatggtgggaagaaaaaccctacctctccactgtgatccccgcccacgggtctagtgcttggaatattagggaagaagatgagaccccttcacgcgctaaggggagtgtggactcccagccctttgccacagtccttctacagcctgaaaagctgccctcgtaagccttagggactggtgcccctgcctcagacaagacgggtgcagctgctcccctttctcttgcccgcgctatggaaacgggccagcatcccctttcccaagcccacgatgtggagacgggccaacatctggatgccatggcccattcgggcctggcatgtggaatttcctttgggcttgggctagggaaggcctaggtcccagccactttgggttctccttgtaaacccctcggtctagccctttccaaagatttagggcaaggaagccctagctgctcgccatgtcagaggagtggaacccctgctatgattcctaccatcgcaaggtcttctcagaaggaagcgtctccccttttggatgtgccgaatcctgcgtttgagtcttccctccctgtcgaagctcgcaagacccccccaattggaagcgttgccccttttggatgcgccgaagcctatgttggagccttcccttcccgtcaaagctcgcaagcccctctagctggaagcgtcgttccttttggaagtgccgccacctgtgaaggagctctctctctctctctctctctctctctctctctctctccccctcccccccttgtcgaagctcgtaatcaacaaggtatgctttctctacccccgatctccttgagaggggagtcatcctcttcttcttctcctttctgggacacggggcttgagaggggaaggggacctggctctagtcttttaaaatcaaaggcaagggatgtagaagtgacgccgaaccccttgtccatcatgctcagagataggtcgacagtgattctaactgaagccctgaactctgatatggaaaaagacatggcgaagcagagagacttgtcggatgatcccccgtgtgaagaaggttggtcagaagaggagctctccaaattattgcattttagcaaagtcttgggaattcctgttgaagggcataaagtcgagattctggttttgctcgcgaaattgaaactgaggactggaagtaactccctcagcaagagaaggaagaagaaaaaatcttgcaccacccattttgaaagagagttaaaaatattggaatgctctgttagttatggggggacatcaaggataaccaaaaatcctgtcagtgccccctgggatttgattctagttgattaatgagaattaaaattctctgttggaacgtctgagggcttaatgattgtgaaaaaataaatatgatcaagggagtggtgaggaatcaaaaaccaaatttggtatgtctcttcgagacgaaggtaaaagatgtttctacgcaattagtgaaaagtgtgggagtaggaagatttcttaattgggcttcagtggacgttaggggcacgacaggaggcctccttctcttttgggataatagagtcttggagaatttggaggtagaaagtggggggtactccatctctgttcgttttagaaactgcattgatggtttctcttggattttctctggagtgtacgggccagtgataggtagcgaaaaggaagattttttggaaaagcttggagccatccgtggcctctgagaagacccttggtgcataggaggggattttaatgctataagatatctagaggaaataagaaatgcccttagactcacagctgatatgaggagattttcagaggtgataggagaactggggctgagggatttcccactggctggaggtcctttcacttggatggggggcttgaactctcaagctgcctctagattggactgattcttaatctctgaccaatgggaggaccacttttctgccattacacaatctgtctccctcgcttggtctctaatcatagccccatagttctagaagctggtggattctcttcaagcagaagccccttccattttgaaaatatgtggctgaaaatagatggtttcaaagacctagtaagaagctggtggaatggatattccattgaaggctatagcagccactgcatcgctgagaagctcaaagctcttaagaagaacctaaaaaaatggaacaaggaggtggtagggaatgtctctttcaatagagcaaaggccttttctcgcctgcagcggtgggaagccaaggagaatgagaacactcttactcctgaagatttagaggctaaaaagctggatcttgaggaatataagaaatggacccttttggaagaaacttcttggagacagaagtcaagagaaatctggtcaagagaaggtgataaaaataccaaatatttccataaaatggccaatgctaaggcaagaaggaatttcctgtccaaaattaaagtcaatgggtgaatctctcttccttggtagatataaaagaaggtgtttgtagtgcctaccagaccctcctctctgattctggggattggaggcctagtataaatggccttaacttcaaggagttgggagaaggcttggtcagcagcctagaagttatggtttctgaggaagaaatttttgcaaccctaagcagcttctgtggagacaaagccccaggtccggacggcttcacaatggtcttctagttgttttgctgggacattgttaaaccagagattttgggcctctttagggagttctacctccatgggaccttccaaagaaccttaaactccacgttcctcttgctcattcctaagaaagaggggactgaagacctaagagatttcagaccaatcagcctggtagggagtgtgtacaaattgcttgccaaagtcctagccaatagattgaaaacagtgataagggagatgatttctgattctcagcatgctttcgtccatgggagacatattctagacgttgttcttattggtaatgaagcccttgaatctagattgaaagacaacatctcgggtctccttctcaaaatggacattaagaaggcttttgaccatgtcaattgggactttctcatggatgtgatgtctaagatgggatttgggcatagatggattaattggataaaatggtgctgctccatggctaccttctcaatcctcatcaatggaagcccctcggcttctttcgtagctctaggggattgagacagggcgaccctctatccccctatctcttctttttggccatggaagctcttaaccaattgttgtcccgtgcaagaaatgggggctttatttctagtttcaaagtgggaggaagaggaagtgaggggttgttcgtgtcccatctcttgtttgccgatgacaccttaattttctatgatgctgttgcagattagttgcaataccgtagctggaccttcatgtggtttgaggcaattttaggattaaaagtcaatctgagtaaaatagaggtcatcccagtgggggaaggcattcctatggagactcttgtgtcggtcttgggatgtaaaataaggagcttacctaccttctacttgggtcttccccttggagtcccctacaaatccactagggtgtgggatgcagtggaagaaagattcaggaaaaggttgtctctctggaaaaggcaatacctctccaaaggtggtcgtcttaccttgctgaaaagcaccctctcaagcctcccaacctactttctctctctctttgtgatccccaagagggtgtgcgcaaggcttgaaaagatccaaagggacttcttatggggcggtggagccttaggaataaacctcacttggtgagttggaaggttatttgtgccgataaaaaggaaggtggcttgggcattcgtagtctagctacttttaacaaggcccttcttaggaaacagctatggagattcgctaatgagaatgagtccctatggaagcaaattatctttagtaagtacgaccttcaagagggagtatggtgcttcaaagatgtaagagaccgttatggggtgggggtctggaaggccatcagaaaaggttgggagaaatttcgttctcattcccgctttatcattggggatggcactagagtgaagttttggaaggatttgtggtgtggaaatcaatctctggaagaagctttccccatcttgtttaatctctccgtcaataaagaaggatgggttgctgaggcttgggaggaagacgaaggtggaggtagctgggggcttcgttttaatagacaccttaatgattgggagatgggagaagtagaaagcttattaagcacgcttcatcccttaaccattagaagaggtgtggatgacttgttctagtggaaagagagcaagaatgagacattttctgttaagtctttttatagctcattctcaagggacaccaagccccccttcccggctagaactattttgacgccttgggttgcaattagggctagcttctttggttgggaggcagcttggagcaggctgctcaccacggaccgcctaaagagatttggtaggagcatccccaacaggtgctttttgtgtaaatataaggaggaaacccagatcaccttcttctgttttgcgagaaggccagaatgttatggcttctgatcttctcattttttggggtgcaatgggtgatgcactcctctgtgaaaagaaacctcctaggttggcatggatcttttgtgggcaagaaaagagagaaagcttggagagctgccccccctctgcctgatgtggactatctggaaagaaaagaataggagggccttcgaggataaggagaggaattatcaagatattaaatccatttttttgtacatttttgtgaattgggctagggtctatatagaggaacacactttgtctttaatagattttgtagactagctagccaccaagtaagggtcaggtttgttttgtccctttgttttttgcctctttgtttttggtatcctccgtgtataccttttctctagccttttggctcttaatgaaatttcttttcctatcaaaaaaatttgaaaaattctactattaaaaagattaacttgatttgatcattccatcattttatttgtattgatttatagtgagtgttttcatagttagaaaactctttgaatgtttaaaagaatggatgcttgaattgcattgtgtggttgaattagtcattattctatgcatttgtggcaatatgagttgacaagaaagtaggaaacatgaacaatagtaggtcgtgatacttttattataatttaacatgaatacaatgaaatttcaatgcaatgagatcattgtttttttataataataaaaaaatacaatgaaaatttgaaaaaacttgagaataaaccaactcaaggtgagtagaatgccattttccattagagcacatggaataatgtttaagtgattaatctttattttctttaagtattcatcaattttgagtttaatttaaaaggtcaaaagttcttaaagtttgtaaggacatatttggttgtagttttggtaaaagtgcttttttacttatgacctttttattagtagtacttctatttaaaaccttctttataccttctataaagaagcagggagtgtttaaaatagacatgtctatgaagatgcggactgcttgcacctagaataaaaaataaaaaaattgttttcattgctttttctaataatttgttaagcaataaagtgatatatatatatatggaaggagtacctatcaagtcctagttcaagaataacttccaatgattttttagatttttaaaattttgtcaaaagctattttttattaagataacactttcaagtattagaaagtgtttctaactttcacaaaatctcttgaaaataggctttaagtttggggttgatgttgtttcaagtgaatgataaattttgtgctcccaatcttgattaattaactgtttgtaataacacatgtgcagtatggaaatgaaattataatgagctatagaacaagtaatgggtgcatggaagtatacacggtgtatacaatgtgccaaaggccaaaaagagacaaagggaatacaagaacaccacactcaccttactaattagagtgcaacaggtcaataaagtccattagagataaggagccctctcctatgcgcaccctaacccattctcaaaaaattcacataaaagattgtttaattgcttgatttgtattttttatgcttttgaaggcccttctatttctcttcttttgtatgatcgaaaataaacataaaagagttgctctccacactttcctcatgttcttccctacaaaaaaatcatgccagatcagaagggcatccttgattgaaaataagatgttccattgaaccctaaacaaagcataaattaattgccaaaaaagcataacaactttagaacaatgaaggaggatatgatacaccaattcttcctcttctttatacaaataacacctacatagcaacctcgaaccccttctttttagctgatccatagtcagaattctacctcaagaagcttcccaagcaaaaaagctaaccttcatttgaacctagggttccatacaacgccaaaaggaaacttctccactctatattgtgttaagaaagaataaaaggatgtaagtgtgaatttactagtctttaaccttgccaatggtgtcctttatatcccttctaattgtctaccattgcaatctcctaaaaagagcttccacctctcttatctcccaatgattgttatgtcttatgaaaagtggcttccaacaacctcccttgatttgctcccacaattgatcaacccaagcatcttttgcagaggttatagagaacaacttaagaaaggcctcttccaaggattcatctccatttcacctatccttcaaaaaattcaccctcctatcatttcccaccttaaacctaacccttttgttaaacccctcccacccacttctaataacctaccataaccccacaccataaccatccctcgaaactctagaacaccagcccccctcatccatcccatacttccctttaatcacatgtttccaaagagactcattctcatatataaatctctaacaccatttaccaaggagtgccttgtttagagttgataaattttaaatacctaagcctcatcctatttttttttttcatttagactattaaccaattcactaagtgaggccttctttgaagcctacctcccttataggaagtctctttgatttttttttcccatctaaaactcaccttatgaaggatcacaaagaaagacatgaagtcaatttgtaagatagaaagggttcttttaacaaggtcaatctttttcctttttaacaagtattgccttttccatgtagtgagtcatttccaaaatctttcctccactatatcccaaacttgcactaatttaaaaagagttcccgaagggaggtctgataagtggttggtttccactctacaacccaaccccctagtcaactactctaaactaggaaactcccccactagggtcaactcactcttttccaaattaaattttaaagttgagattgcttcaaaccacatgaaagtccaactcatgcactctattggctccttgctagcctcacaaagaatcaaagtattatcaacaaataaaagattagacaatttcacaccctctcctcatctacttgctccaaagcccttaaaaaacctccttcatgagccttcttcaatatataagagagtgtctttattgccataatgaaaagataaggggagagtgggttaccatgtcttaaatctcttgatttttgcaagaagcttgttatggtcccattcatcaagattgaaaaatgagttgatgagacgcacaacttcatccaacttatccactttgtaccaaatcctattttttccataattgcttgcaggaagccccaattcaaatgattattacgcttctcaatattcgtcttacaaattatctcgttgttcgatcttttagcctacagccaatggcttccttgctatgaccattgtatccaaaatttgtttccttttgacaaattcatgctagattggacatcactttccctaccacttttctggatctcttagccaagactttagctagtagcttggaaagtcgttgcaccaaactgatagagcaaaagtcttttaaatcttttgctccatttctttaggactagaactatgaaagtggcatttgaacttctttcaaagaagtctagttcattgaactttgcaaaaaaaaaaaaggaaaaagccatcacctcattctttaacaaagtcccaacaaaacttccaaaatgctatggaaaagtcatcttggccaaaggccttgtctccactcaggctggaaagaccgcctgagaaaacctcttgctcaaaaaacagattcttaaggagcctagattctccactcccaaagaggagaaagccaacccactcatactcattcataataccataaaaagcattgaccaccccttcctttatctctaactccttagaaagctttctcccattcactttaattgagcttacaaaaatccttctctctaggcattttccattttgtgaatttttagtccttcttttagtcatatttcttttaggttatgtttgattcccataaaatattaaggaaagaaaaaaaatgtcaaggaaaattattttctcatgtttttatgaaaagtataaaagaaaataaaatataattaaaattaataagaaacttacgtatttttaaattatttaatctttatatcgatgaattaaaataagcaaaatgggtttgaagtaacaaataaaaataatttatcgactttgaatctatttttattttccttcattttttcgttctttctacttttttttttctattttatttccttcgtattttccctcaaatttttcgggaaccaaatatagcattaatttttatctccaagaaatctctttcaacattggccacttcgtcaactcttcacagcccctctcctggcctcactctcctctgcagataggccctattccctttcttttacatcccacaatccaatctggttgagagctacagctttattagtggacacattccctaccatctctttatttcatgctttcaaatcttggttcaaagcctttagtttgctatctaggatgtggctgcaagaacatctaaaattatagcttttccaccatcttctaaccaagcctttgtaacctttcacctttagctgcatatttacaaaacagaaagacatttctataatagaataggtttatgtaaagcatgaagatcaataatattaggtattaaaattagtaatagaaatttattaaacacaatgatttaaaaataatatggttaggagtaaataaatagttcaaaagattttattgggaaaataataataaatgaaaaagggttgtgttttgaaggcatttggtgtaaaacaattgaaatggtgcaaataacagtacaagtgaacatatgaacatggcatgtgaagaaatgtcatggggatttgtcattgatgcgatttatggggtctctgcaggtatcatttcctaatttggagatcttgaaactctctggacttttcaagttgaccaggatatgggatcgccaacttccgctcagctccttttgcaatctatgctttctggaagtggagaagtgtccattactattgaatgttgttccaaactatttgattgcaagtttacagaatttagaaaaactaaatgtggaaaaatgtgatcaactacaagaagtatttgatcttgaaggacttgacaatgctgatcatggacaagctaggatgctctcaatgttggaagaactgaagttaattgatcttcctaagttgaggtatatatggaataaggaccttcagcaaatttcgtgcttccagaacttggaattgctgcatgttaagcagtgtgcaagtttgacgcatcttttctcttctgggatggctttggatcttgagcgactgaaagacttatgcgtggagcattgttctatgataaaagaaatcatcatggtggaagacagggttgcagacaagattatatttcctcaaacaacacagctttcacttctatctttgcccaacctaacaagtttttataggggaactcgtacacatgaaaaggttcatatggaagactgcgatatccttgcttgtgtgctatttcatgaaaaggttagtttatctctgttatttttttttaatatcattttttttttcttttaatgctttattaggaatcaaatgcctcaagaggagagaaaaaaaaaagaattaattaatagaaaagatttctttcttttatttggaattatggaagttaaatgttatagaatttctattgacactatcatccataaggccatccaaagattaggttaaaatggaaagttaaggaatcctttttcggaaatacttgtgtacttggtgcaaagcaagtattttatgaatcaattatttttcatgaaataaaaattatgaccttacacatggagtatcctcgagattccaacttagtgattgaaactggttaggcttcgattatgaagcctagcccaagtcgttgttaaacttaaccctcagcttcttgttgcatcatttgaattaaaagctaaatttagcagcatcttaggccttgtttgtttattgaaacatattcaaggttttttttgtcaacttatcacttattccaagaaaaaactatttcttttaacaagttttcaaccagacacttttagacaaaattagaaatataatttttaggaattttttaaaacttataatcaaaataccctctttgttgtcatgcaagagccactaaatatattattattttttaaagaaatacaataaagagatataaatttcttatcaatcaaacataattagaaattctaattaccatcccaaaatttattctttatcacaaaactatctagaggaggttgaataagtagtctgcaaatttatgcctaaaactaatatctcaaattcaattccttttaggccaaaattctaatcattgatttatttaattaaattaatttattccttttatgaattgtttaggcctacaaatattttattccttttaggccaaatatcatacaatttaattataatatgttgaaaatacataaagtaaattatatattattttatttaatgttttaattataaaatactttttatttttatgataaaatatataaaatttttattagtatatgatatttataatttaaaaatatattttaattttttataatttttaaatatataaaattaataaatttatataggttaaatagatcataaattggttggattataaaattgtcattttgacactattaagtaaatgagttatagagggattgtgacataaattaaacagattaactgagtaagatgggttaaacccaaactcactacaatttgtatcgtttttgagtcatatcatcattatatcatatcaaaattgtcacccctaaaaattatgataaattagacatatatattagcttcaaacttgataacataatttaatgatcacttggttggaaaggtaagagccaaagtacctttaaattcttccatgtctatgtcttgtagctctctaaggattgtgttaaagtattggctatctatcatttatgaacctcattcaagaattctagtattaaaaaaattagcttgatttgatcatttcatcatttgatttttgttgtttaatattgattgttttcatagctagaaaactcttagtttgtgaagtcatggtttttcttaaagttagtagcctttttattagtagtacttctattgaaaacccttctctgaagaaccaattagtaattagatacaaactacaactcaaaaaaaaaaaaaaaaaaaatcatcactttttctagtaacgtgttatgttaacaaaaaaaatgtgttttttaaaaagtatctatcaagttgtagttcaattcaaatgatttttcaaattttgtcaaaaacaattttttatgaagataacgcttccaagtattaggaaaatatgcttctagccatcattagatctctcctgaatatgctctgagtttagggagttgatgttgtttcggtgaatgattttttggtcccatttttaattaattaaatgtttgtaacatgtgagtatgggaaggaaattatgagctagtgcaataatataaggccttaaagttaataatagaaaattattaaactctatgacttaaaaataatatgctttggagttaataaatgatttaaaagattttattgggaaaataataataaataataaaaaaaaaaagggttacaaaggcacttgatgtaaacaattgaaatggtgcaaataaaaggacaagtcaacacatgaacattgacatgtgaagatatgccttttgtctactagtttgcaattacttcaatttatggatctctgcaggtatcatttcctaacttggaaatcttgaaactctctgagctttccaagttgacggagatatgggatcgccgacttccactcagctccttctgcaatctacacatcctggaagtgaagaagtgtccgttactatttaatgttgttccaaacaatttgattgcaagtttacagaatttagaaaaactaaatgtggaaaaatgtgatcaactaaaggaagtgtttgatcttgaaggacttgatcatactgattatgaaaatgctaggatgctctcaaagttagaagaactgaagttaattgatcttcctcagttggggcatatatgcaataaggaccttcggcaaatttccttcttccaaaacttgagagtcctacagctgaagcagtgtgacagcctgatgtatcttttttcagcttccatggcgttgggtcttgtgcaacttgaccacttatgggtagagcattgttcacagataaaagaaatcatcaaggtagaagacgggattgcagacaagattaaatttcctcaaactacccagctttcacttctatctttgcccatgctaacaagtttctatctaagaactcaggctcctagggtgctcttcaatgacgaggttagaaagtctctgttattctttcacatcttataccttatctttttaacactttattaggaatcaaatttctttaagaaaaaaaatatttgattaatagaagttttctatctcttatttggaattagaggactttaaatatgaccccattttcaatcagacattttctattcattgattctttgaaaattaggttggagtagaaaagaaagaattatttgcaatttatggtgtttctaaataataacatactaactttttctaaacaaaaatccttctttcggcttcaatttctgatggaaatacgatatgatgaggaacctcttgtcacgactacctttatatttaaacactattttagatctctgatttatcataatgtgaagtttccctccatggatgtgcatgggatggaaagtaaaagactacacctaacatgatacccatattatttcttaaagatcccagcttaatggctaaagtttaagtggggttgcactatcaagtctagttcaagtccctgccttgtcaaatgcacctattttcatcctcttattgcatcatttgaataaaaagcacagaagtagtcacaccagtcttggttttcccttcttcctaacttattcttgctgcttttcctcatgctctattaattaattgtcatcttataacaattttcaatgctctccaatgacaacctttgcccaatgctcttcaatgaaaaggtcggttgtctattagattaccttttcttctcatcttataacaaattctccctttggcactttatttagaacaaaactttgaaagaaaggaatttcatgaatggatacaggaaggaaactacatttcactatttcatttcctctatcttgtttcacagtaggaagaagctaacatatgattgaacttttcatcaacttgtttctcaatcagtgataaaaatagtgccaggactttggcccaagctggcttgatgcatcattggctagttatctaacaatttatgcttttgagtcatattggtatcaaagtcttgttttccaatttaatgaccatgagatatcattattcccctagtatttccaaagctcatattggctggatacatccttgattgattacttaacaacttaaaattttaggttaaattggtagtttaacagccaaaaatattaataaacaattttttatcaattttgctttcttagggttcttgaaaatctgccacttttcaataccatgtctatttatacttgaaaatcctaatatttaaaatctgccacttttcaataccaaaaagcctttttagaatagaagttagatttaaaaactgaatttggaattggaaaatgaaattatactcacaccatttgaactcctgaatggggggtgtttgaacctccaatgggtgtgctctcctattttgtcactttttttttagctgattttatgctatgttcagtttcaattcacgtgttaatcattccaaaagttttactaatccataaatgtatatttaccttggatttgatgactctagagtgattcgaagttaagtttgataaagtccaacatcaacttgatattgataaaatctaagaaagcaagttgcatctaatcaagaaaaaatggaacaaatttgtcaactaaacctgatatattaatctctaattattataacccaatatatgaaccattaagatttatcaaatttggaagaagaggtaaagaaaagaggggttcaaattttgatcatttcacttgaataattcgacaatctgaatttggcaattctgtcagcttcatttgatttggtcatatgaagtatttgtgaaggcaaatgtttgattttttgtcttttttattctatctctgttctttgtgaatagtgccttacatgttatatcctattatgtgtagttattcagagtatatagttatattactaatgccacagattaatcttgtctgcaggttgcatttcctagcttgggggacttagatatctccaacctggatagtgtggaaaagatatggcacaacgagtttgttgcagattcctttggaaaactaaaaagactatcagtgcggtcttgtcaaaaactgcagaatgttattccttccaatatgctgaagaggctaccgagtctacaaattctgaagatagtggactctaattcactggaagagatttttgatctggaatccatagatagtaaggaaagtcatgatattcctacgcttcagttgcgagaattgtgtttagataatttagagaagctgaagcgtgtatggaataaggctcctcaaggacttcttacctatcctaacttaaagtctatacaagtttctcattgtccaagtcttataattccttatgaaggttatgtagtgagaagccttatgcaagttaaagaagaagatatgaattcttgtggagtgaaggaaattgtttcacacgaagatatggcaaaagtagtgtccatgttctttttccctgaagtgacctctctgacaagttcctgtctaaaacaacttgaatgtttctatctgggactgcataatttggagtggccaatgttgaagacactggaggtggaaagtcatgaaagtttggagaaattggcttccgaacttgataagccagttaagcaacccatcttcctttgtgataaggtaagagcccaaattctttgattttgtttctagtttcatagccttgaagttttctaaaactttttgttaaagtcatgccactttagccacacatgattgtgatctatgatattattataaatgccataatttatgatttaaattattcaaacaataccttgattttatcattttgagttgtcaagttttgtttatttacaacgaatgttttgaatagctaaacttttttttagaatgcttcaaagaaaatagcgcatgattaattgcttggctaaattagtcattttattataaatatgcgataataagtaaaatttagagcaaagtaggttatgatagttttgttaatattactacatgaataaagtacaccatatggcaaaacttgagaatcaaggcacatgcataattgttaagtcataggtgtgtgtgtgtgtgcatgtgcatgtcgataggaagtatgaaatataaagtaatgtataaccaattttataaaaaaaatgataagatttaaaagagttaaactatgtcatatcttatgaaaaaaattgaatattggagttttgaaatgttcaaattaaaaaaatatgactttaatgtatagattaatcacataatctacaaaaatgaacttcttgaatttttagttccaaattctaacatgacaagtgcacttatatatatataacctaatatattaagtaaaaacaaaaattattcactatttaccatcattttcaatgttaacatgcaaaccattcaaatgaaaattctccaatatttattataaaataaacttacttaacttttaatattttatttgagaaaagtataaataccttagcattgaaagaaaattagcaaaattactaagcttaaaaaaattaagttcaacaattttatgaaagaatgggttgcctttaagagaaagaaaattaagataatgaattcataaaaaataaaaataaattaagataaaatcttaaaaattatttagagaaacaaaattaggataatggattaatgaaaaaagaaacaagtgaaaacgtgagaagagagataaatataaagaagtactatgttttaagctaggaccataattttataattttatagaatttaattttttaaggtttatttttgaattttgtcttttagtgaaagaatagtttatattaagaattttggagattttagccttagatatattcaattccaccttttcttcaaccttttgaaaaatgaatcaatctaagaatggtatagtgtgtacaagaaaaaataaatattgagaaagttatgattttttaagtggggaatgaatattttatttttatatttttagttttaaattttgattttagctttaattgtagttttgtcatttttattattttttatttaattgttatctataataattttttattgaattttataatggaaagacatgagagatgaaatgttttcataaaaattagattgttagaatgtcgggaaacaaactattatgagaatgaggatttttctaattgagataatttagtcccactttaatattgaattattacctattgaaaagcaggatgaatcataatatatcacatgaataatttggtcccattgttttgtaccaaacttgtgtcttagtaccttaatatatatatatatatatatatatataacatctacccaacaatactgaagaaatacccatccaaaagtgaaactatgtcgtcaaatgtacaatttggtttcattgctttatacttgatttgtatcacaatttttattatcctagttccattcttttgtattttggtttcatttgttaatacttggtctcatttgtttatattgtaatcctatatatttgtacaattattcaattgtttaaatttcactatatactttcaacaatgacctaaaattatatatataatgactaggattgtttgtaattataaactaagcattactcttttttctcaaaaaaaaaaatacaaaataacaagttcaatgatgaaaattttctcatctcaagtctaatagttttgtagtttcttaaggattatatcacattgttttgtaccttgattccattcttttgtattttggtctcatttattaatacctattcccatttgtttataccatatcctatatatttgtacaattatccaatagtttatatatatatatatatagattgtattttggtctcatttgttaatactcgattccatttgtttataccataatcctatatatttatgcaatatccaacggtttagatttcaccaacacttttatatctatatatctatttatatatgtgtgtgtttgtatatctatctacctatatatgtgtgtgttgagggggggttgttgggtaatgactaaaattgtttgtaattataaaccacgcatcactcttttttataaaaaagattacaaaataacaagtccaatgttgaaaattttctcatcttgggtctgttgtgtagtttctgaaggatttatggtaaatctcatttaagacttgaattgtcaaaagcctcctagagtaaaggtcaagtgatagtgccctttggtaatgaattagaggtcttgagttagggttgtatttaagtggtgtaggtagaagagcaagcccataataagcagagtttgcttcgatgctagttggaagaaatgccaaaaatactataaaagtttttaatggaaaaccgtttagagtacataactgaaaatatgagtagcatgtctaaattagtctgcttatgttttttgtttctctgattcatttgaggtaataagttagattcacaataaaagaggtcatgattcttttgctacatgaataaaatgcaatttaaaaaaaaaaaatattgaaaaaaacttgagaagcaaatgtcgaggtgtgtgcctaaagccatctcagtagatggagtcaacttacaggtgcttcatttatacattcctgtggataaatgtatggtacaatttagaagctcacagttttctcttcaagatttgatggagcatgggaagtattaatgagctagaaaacaagttacataagtgacaaatcctaacaatattatgatctaatgtttttgatacaaagtaagttctatagcagtccataaatagtttaaaaagttctgttagtgaaataaaaataattaattgaaagagtttcttgtattaaactttgaccatctcatttgaaaaccaataaatcgtctatgagagcaagttaaaccttttacagcattcaacatcacaccttgtggacttattctaagagtcatcatttgggtgacccatccttgatcttaagagcagcatttgcaccgcaatagggtttgtgttatgaaagtggatggatagttttaggaatatgtatgaacttattcatttggtttatttattttatgggtttatttgtaatggaataaaatattggcaggatattttggaatatatgtccctaacttgcaattgatgtaatgatctattgggtttttgcaggttgcgttccctaacttggagttcttgaatctctctctcaagttggagaagatgaaggatcttcatgttttattcggggccctctctaatctaaagatcctgatagttgaaaactgcccattcctatcaagtcttttttcaccccaatttatacagtgcttaaacaatttaaaaaagctaactgtgaaaaaatgtgacctcctagaagaagtatttgatcttaagggacttgctcatggtgatgatgaacatgttgagacgctctccaagctagaagacgtgagcttaattgatctacctcagttgagagatatatgcaacgacagccctctacaagttttgtgcttccaaaacttgaaatcgctagaagtgaagcagtgcaacagcgtgatgtatcttttttcaccttccatggtgttgggtcttgtgcaactccaagacttacacatagaacattgtcccgcgttgaaagaaatttttaccgtggaaggcagggataccgataactggcccccacaagtttcctgcttccagaacttgaaatccctacaggtgaagcagtgtgacagtttgatgtatctttttccatattctgtggccttgggtcttgggcaactccaagaattatgcatagaccattgttctaagatgaaaaaaattatcatggaagatggggatgtggacaacaggccccaacaagtttcgtccttacacaacttgaaatttgtacgggtgaagcagtgtgatagcttgatgtatcttttttcaccttccatggcattgggtcttgtacaacttcaagacttatgcatagaacattgtcccacgatgacagaaattgttaccggagaagacagggattttgataaccagcctccactggtttcatgcttccagaacttgaaatccgtacaggtgaagcagtgtgacagcttgatgtatctgttttcatcttcctttgcattggctcttgtgcaactccaagacttatgcatagaacattgttacacgatgaaagaaattgtcagggaatatagggatgtggacagcaggcacccacaagtttcatgcttcgggaacttgaaattcatccaggtgaagcggtgtgacaacttaatgtatctgttttcatcttcctttgcgttggctcttgagcaactccaggacttacgcatagaacattgtgatacgatgaaagaaattgtggcagcagagaagggagttacagatgagatcatttttcctcagataacccgtgtttcacttctaaagttgcccaaactaacaagtttccatcttgaaaagattcatgtgggagactctaataaagtgcctggggtgctcttcaatgaacaggttagcatgtctcttaattattctttcacatcttatatttttgtttttcttttcaacactttatgaatcaattttttttataaaaaaaaaaaaaaaagatttaactcagaaaagatttctttcttttatttagaatccaaggactttaaatatgactggatttccaattgaaacttttatccattgggtctacaaagattaggttagagtaaaaacagaaagaatgttgattaagtgccaaaatattttttttttcttcacattctatatcttttggctaaaattcaattgtgcatgttaattctttacaatcctctctcaaattatttgcaatgtttgttgtttctaaataatagcatactaacttaatttttgaaacaaaaatcatttttttcggcttcaatttctggtggaaataccatagaaggaacttctagcagtcattgctattatattttgtgactactttgatatttaaagtaatattaccattatgtgaagtcactctccatagatgtgcatgggatggaaagtaaaaagatatcatttgctaaagaccccagcttaatggctgaagtttaattggggtcccactatgaagccaggttcaagtccctgctttgtcaaatgttcctatcttcatcctcttgttgcaccatttgaatgaaaaagcacaaaattagtcacaccagtcttgcttttcccttcttcctaacttattctcgattgttttccttatggtctattgattaattgctaagaagatgaagaattaatgaatgcaaatgatttctttctttcttcgagttttgtgttcttttcctatttaccttttatgtctcatttcctatcatgtcgtgatattaataaatttgtaggtattttattaacatgatgggatgggctctgcaggtttcattccctagcttggtgtttttgt

SEQ ID NO: 10548 - DNA, 2830 bp, Vitis vinifera
  Intron number 1 from transcript GSVIVT01029195001 (locus G SVIVG01029195001) derived from phytozome v7.0 (chr-ID chr1 1; pos 18694463 to 18697292 reverse strand)
ctttgtcttcaggttagttttcccatgcttcttcattggcatagcgtgttgtgccagcgaaagctttgatgccaacaatgttagttcaagaacacaaagataaaacaatcacacatacggtacacgaggttttaacgtggttcggccaaccatgcctacgtccacggatgagagagaataattccactatacaatagagaatattacagaggataaaactagatacaactattaggttcccgaaacatcccatgtttccccactctttgtatccataccttactacgagccctctcgctccactaggtacctcccgttcttccttacatctctatccacctcgtatagtctctataggcccatctccatctcatgacctagaatatttatagagatatttccaacaaccttccttattctataaggaagtctaatattacaataatatatcaatctagaaatattttgtataatattttttacaaaaaaaggaatctatactaattaggaatttgggacacttcctaacatagcgtccctatttctattaaatttttatcgcttattgattcgcaaagataataatatagagtatagtgctaaccaagaaggaacacctttgagatgaatattgagagagagaggagtattgaactcatgaataaaggaaataacctcaaaaaatgaaacaaacatatttttttcttcctccaaaaaagtatatgtagatgataaagggagtggcttaagaattaatcttggcttggccgttcttttctactcagacctataaattagatacgtacacgtattgtagaatatcactaataagctggcatttcttttattactgatcatagcaaccatctttgaatggcatagcaaccatctttgaatggcatagcaaccgtttgaaaacaattaattaatggctacttgacatgcattgtagttgtatatacttgaattatcaacagtagtgtctttgatcatatttttctatatatgtgtatgcatgggagatgatgggttattttgctgaatcattatatactatgtccccattttaggataagttggcatcacaatagattctgattaattaatcaactatgtatggtagcgtttgtgatgttacattgggtgacatatcacatgatattgacaaggatgtagaggatgttatatgaagtagaaagttcatcatgcaatattactggatctagttgatgaagagtgaaaaaccgacttcaaagaatgtgagtttgtcttcttagtcgagtgaaaaagttcttttggacgagccagtagcataaggaaaagtgttcaccgtaaactctgatgcctgaaaataaatctatactacatatttttcatgagactcgtaaaagcctttgtaaagtgaacaatataacatgaatgactcataatataatttaagccaaatagtcatgaagataatgacatcaaagacaaaataaaatagtccgtgcgagaacttgatgtatacatgccctaaagccacacggaccttaactcaaagtggataatatctatatgaaaggaagtaagttgttacaaattaaatggtacctaaagtgaagcaagttgtcacaaatagtatctaaagtaatactaaagcttgatgctagagtttatctatatgacttcacaatctcataagatgtgataatgatgtcgtgcctacatggggatgggtgtgatattccacatcgatgattgaaagaaattttaaaactatatatatagtgggcttctcctaaccatgtaaatattttttaaaatcgtaaaggtcattgcactccaagtgaatagtatttacataagagaaaatgagttattataaatggtattagaattgatcatcaaccctaatattaagactatttgtccggtcttggaaaggaagctttctgtgtctagttagtcccatcccgtgggccggatacaatgagaacggtgatctacatgactgaggttagagaaaaaagttcatgattatatatatgtaacgagcttatcctaattgtgtaaatatgtcattaaatagtaagaaccccttgtattaaaagagtacaatatttatataggagggagtgcattattacaatgagtgtgattgtaaggagatagctaagtcttttacattatgtgtagtatgttttaaggccaatcaaataagaaacaaatgtattccttaattttaagtcaatacttaagtgtatttgagatatttttaaaaattgttttcaagaaaacggttttaaagaatagttttcaaaaatatttatatgatgttttctaaaataaaagtcattttaagaacttggaatatttaacattttttatatttttaaatatttttaaaaaaaatagattttatatgtagttctttattttttttaattattctttatatttgatgcattattttttttttaaaatcatcagaaaacaaattataacaaccgaaaataactaaaatatattctttatatatatatatatatatatatatatatatatatatatatatatatatataaattgttctctattttggaattaccaaatatgttttgctacttttctaaattcttaaaaacaaaaaaattgcttcggagatcgtttaacaaatccgctgtaaaattccacttccctacccctctcagtattttacgttttatgacaaaaagacaatatctttaaattttctattttctcttaccattgttgcattgcaatgtatgatcataattgcttaagttcgattcttcttttgtagctattgatcttttagaaaataaaa

SEQ ID NO: 10549 - DNA, 3982 bp, Vitis vinifera
  Intron number 4 from transcript GSVIVT01012197001 (locus G SVIVG01012197001) derived from phytozome v7.0 (chr-ID chr1 ; pos 612125 to 616106)
ttagagacctctaatcgctacatttcctcatcacagtcaatggtttcagaccaaactgttgatggtgaaaacgaagaaaggtggatgggaacttgtgtcattccaatgcctgaagaaaatttgtctgctgaaaatggtgtcaagactggagatggcagaacagattgtggttgcctggataatgattctatcagatgcgtgcggcaacatgtaatggaagcacgagagaaactaagaaaaacccttggacaggaaaaattcatggagttaggattttgtgacatgggagaagaggtggcacttaaatggcatgaagaagaagaacaggcttttcatgaggttgttttctcacatcccgcgtcattgggtcagaatttttgggaacatctctctgcaacattctcatatcgagccaagcaggaacttgtcagctattatttcaatgtctttatgcttcggcagcgggctgcccagaacagatccaacttcttgtacatcgacagcgatgatgatgaatggcatggaaataatagaagcttaaatgaagttggaactgcagaagaagaagatgattctggcatagaatctctttctgatcaacataatcacgcatatcatgaagaggaacctcatgaagaagatgacgacgacgatgatgacgacgatgacgatgaagaagatgatgacaaggacgacagtgattttgacggtgatggtggttttggagatgacaagcaaggtgccaccaaagaggatggcatggtgcataatgggaagttgcttgattacaacatgtttgatcctgtagctcggaacatggataaggtaccagatagcaatggggaggatttcagtgtccaagatgactcatgcatgtcttttgagtgccaacccaatgttgccaacccttgtgctccttctgatccggaggcttctgttcaagaaagtggagctaggattacccagcaaaaatcctttcatggtgacgatgatgggtccagcaccagggtagacccaggatatttattggagccctctgaaaccaaagtttgggatggcaggtactggacaggttccataaatggcgttgatctcctgcccacatgcaatatgattgaagagatttttggactaggcacaccgaatagcaagacaaaggacgacaaaagcatcagctaaggctccctgagccaatcctcccctgtttctctgtgtctatcttggacattcatggcagccctgatcactgcgaagctcctgataatcaagactttggcagatagggccgtaccaattttccccacaaatgtccctttccctttgtgaatctattagactcgttgatttttacaggaatatggggatatgacaactgttgtttataattctcttctaaacctttatctgggcaatacatgaaaatagcttaaatgcttgctttttgtcgatagatcttcacaaagatgagaaatgaagaaaagaatctctaccctttatagtagagacatgtatgtgtcttgtattgtcttggtgtcttctcaaaaattattttgtgcaaagtcgagtgaacaacatacatagaagaggactgatgagaagccatgaattgtgttgacagctgagctgaggagttatggtcctaatgagtaatggcactaagggccacatgcctctcatgactggagttacagcatgaaatggacatgaatctatgaaaagactgaatcttattcatggcctgtagctttatggatctacttccatgaatcggactcacaacataaatgtgaataaatgcccctcaatttgttaaaaaattaaattagatggtatcctgtcggatgccggcccacataaagtaagaatatgattaggataccaaaaatatatttcatcttcaacgtcaatgctataaattatatactaaaatctaattactgatattaaaaatttggtaatgctaaaattttcctttattttataaagcaattttgattttggtgtgcatagatttattttattaaatatgaatggatgaaaatgttatttttcaatacaattattaaataagcttctcctagtagaagccaaagcgtatggttcaacaataattgaaattgtaaagaatagtcttttactattaaatacagaagttaaatgtcatctaagattggagattaagtatttaaatatggggatgaactttagagggagtgggtttaattgttgacccaatcctctcccagtgtatcatatactttccattaatttttcttctcatcattgacgtcaatgcttagaaagggatacaataattttttaagtctgtttgttgggccattgggtgttcaacaacaacacgataaacacccaaaaataattccaaaaaaaaaaaaaaagcaaaaagagaaaagaatggtccgagtcagcttgactgtaggtgacacgttgccaccaaagcctctagtgtgtcctccaccccaagacacatgagaaagacaggtggctaatataccatttccatggtttacccactgagttaaattaaatcctaaaaataaaaataaaaaaaatcaaatcaaatcaaatatgaagaagaatatgaaagaaaacccacattaataataataataataatgaataaaaaaaataaagcattgcgtattagaaaagcatatcggttttgaaccagaaaggtgggtttactcaatcaaggaagaaaacagtagggttgttaggtaaaatgaaacccaaaaatcaattaatttcatggaccaactggctgtgttttcaaccctttggtactttccaaaacccttacggtttttatgtctttttaatgatatccaacaattatttcttaacactattgaaaactaatattggtccattgatgccccaaatttagtcatttattaaattatttaaatttaaggcttttgggtatatatgtgtagaaatgtaaaggtccaagtcccatatctttgcatctaagttcaattaatttaataatctaaatttggttacaaatgttgaagtctaagattgaaaaggttaaacataaaatcatatactcaatttaatcataaaccctattcagaatctttttcttttaatttcgtttctaaaagcaaaaccgggttgtgagttttttttatttttttatcccaaggtagagagaggaaatgaggaagggtgaaggggaaaaacggttgggggcatggaagatggcaggggctggtgttgtggggtgagcgccgaggtgaagcaaagacaaaaaggaagggcatggtgggatggagttgtttcagtattgtatatgcttctacatggtactcatggagtagaagccagtacacagatcacacacattgggatccttacaaccccacaaatcctgaccgtccaatgtaacagcgaaatattctcacttgactacacgtgctttctatccttttccttcccttattaatctttgcttccatgcatggaattctcctccaactacaacacagccaggccaagagagagagaaagtggagataggtagcccgattgattctgattctccttcagcttgggggtgtgacccatttctgcaaatcttgattttgccttgcaaaccccttttgattttgggaaggtttggtttgagagcgtgtagatatggggaattctgaagggctctttttggtgggttggatcttgtactttacaaaactgtcacatcccaatagttgattctcgtctgggagttgtgcaaagagggaaactttatgatctgttttgagtcctgcttgccagatttgaggttttggatccgggtctgtttctgggttcctctgtttcttcgccatttgggtcttgtaggtcaagaaatgtagcattgtttgggaggcttgagctcgcattgggttctctgatctgggttcttgtttactgggtgagtttggttttgaactctcgttgatcgagtccatct

SEQ ID NO: 10550 - DNA, 5474 bp, Vitis vinifera
  Intron number 2 from transcript GSVIVT01024517001 (locus G SVIVG01024517001) derived from phytozome v7.0 (chr-ID chr6 ; pos 9378602 to 9384075 reverse strand)
attttctgcaaaattgtaagcattcttgtttggtttagtaaaacgtgttctatttgattgcttattagaataaaaacataattgtatatgctggaataacaatgtgtagtgtgtaggctaaactactgctggatagagtaacttggaaggacttctaatattttggataagacctaaagagaggttataaataaattgatcataaattagcttacaactaattttgattcccttccaattgaatccagctaaaccaacaagtaagcacaataaatggagacaagataaattcttttcacattaattatgtgcagaaccctgaagcatcctttgcatacaatcttgattcatgacacatgatccttggggtcctatttttcctccgtgctgagaattgaaccaggaaccttccacattcccacactaatcccttgtaacttgagccgagcatcaaggccatgatccccaaaaatcctttactcgagttttgcaaatccatgctgaattaagaaccatttcttgcatcccttctactagatctcaccagttcttattgagatcactagaagcacggtttccttgcaagtcacagacaactaatgtgaacagcaagttttggggctttttatgttacaaaatcaatggaaatcaggtctcatgagaaagattgatttctgaagttggtatttcaaagagtttcttcaatcaatatgtaggagaatcaatgttcttggggcttcatatttatgggcgacagtttcatttggccaattaagaaaccttacttattacactatgtacctgcaaagataaacaaaactaaaagaattttttttttcccaaagaaatattttaataaaaaaatttcctatttgaaattatctctttcccacttttcccaaatattgatttggttttttccattccttccatttgatatcaaaggaagaccttgtgttaattggaaaattcacttctttttttcatgggcatctccccttcccatttgtcctcccaattttttatttaaagaaaacaataatttgagagacccaacttgaactctttgcaagaaatcttccacccttggttgattgcatctttttttttttataatacttcatgttggaagaaaaacatttgcatttagagaagttggagattttgatttagaatctccgaatttgacttttttaatgtaaggaatttattgctttggtttaaaaaatttgtcaataaagattttttttttttttttttgtggcataagttttatttttttattttctaatacaatttaagtttttataggctagaagcaatatgcagtttaagttcatgttttgaggggtatcactattcaactttttgttgtattagataattgaagtgtatcacctcatctattgcttgagcatttgtagaaacgttttgtttgaatgaaccagacttctacttatgagtacgttttgtccattcttgcttgcttgaaggaaaaacttcttattgtttttagagcataatagagtgttgaggtttgaaactaattgtagtaaaatttgatatcacactcttttcatcctcatcggtgatatttttgcccctagtaatatcatcttcaattccttcaatagacatattttcatttgcatttatttttataccaagctctatgtcatgtgctcatgtagcaaatttttcaaaggtgtaaggtcatatgtcttggagaatgtatagaagcccttaatgcataccttgtatgtacatttccactgtagacacctcaaataatctatccttgcaaccaaggctaagaatgccatcaattgatgtagtcatcaattaactcttcttttcatggcttggtattcatgagctccatcttgcttactattctttaggtactatagaagcggctgaggaatttacgcttcatttgttcccaactaccaatgcattcggtttgaagattcgtgtgtcaattaaaagcgttcccttagatggtgtgaacaaattgtttgacaaggagatcatcctcagtgcctacattgttgcaagtttcgatgaagtggacaatatattgctttgactttccctttctatagaataaatgaaattttagaggttgataacccataggcatatgtaagttatcaatattctttgtgtaaagtttaaagtacatgagcctgctttgtgacggtccaccatactgtattatgatagtgttaattatcatgacttgaagttgttgaacagatagtgatgacattaagatagatttagtggtttgccttccgacatacactgacttagatgcatgtgatgcatcaccttgagatgcagtctttggggggtgagtgagtccatgacttagctatgttttgggtttgtgcctcaaacatagttttaaaaggctcaaggcacactaaggagcaaagtcctcttggaacctgaggcgcaaggcacacctaaggcgtaggctttagtgaagtgagacacaccctattttacatatatgtttttatataatataatcaagttctcgaaaattttcctctatttttcctcttcttcttcgtcatcttctctttttcactctttggaaggctagggcatttttttttgtattttacaagtccaaaacgagcatatattgggttctggaagaagaagaggccaaaacggtgtcgtttttggcctttttttttaaaagaacgaaccaaacgacatcgttttggccttcggaaattaaaaaaaacaaaaccctcattgttctccctttgctactctataactcgtcatcgaagggtgagaagatgaccaaaagaagaagaagaagaagaagaagaaaaagaagaagatggcaatagaggatagaggcgcacctgttgggggcatcgcgcctagtcaagaggcgagcgccttgcacgcctaattagcgcctctgtgaagggacggtgcctacagttaggcaaggcgtcaaagggtggcgtcacttcacttggagcctaagtgtgccttaggtgtgcctttcacaactatagcctcaaccttgttatgagggaggctatttgtagatctttttcttcaatggttttttgttagtttggccatagaatgagccatcttatctagttattcttctacgggtgtaatgcctgttgttattaccaacataattttttttagcaaaagagatgagaggcaaagatgtccccaccaagcatgccaaaaatttgtacgcacaaattccaaagtgtcctacaaaaataagcaaaattacgagaaaaatatacgtgtaaaattatttgtattgaaatatttgtgaggtacaatatctgtggtaatattttttacaaaaaaatattttcctcttatttaatcactttgatcccaatcaaaaggatggcaatggaagttttttttttttttttttttttgaagttgaagatcaattgagggcctaacatggcttgttcgtaaatgactttgaggatggtgaagagcacgtgtgttgtactttctatgctttctcacacttgtaaggatgtcttgtgaagcctctactcttgtgaagttgtttttcccctccattgaagggggtcatcattatttataggtgaggttaggggattaaatatggaatctccaagatttgaccacttaattcaaatttggctccttgattttagctacttgtcttctttatttaggaaatttgccaacaatagaatatttctttttaattcacttttgacttcaattgagaaatttattgccctcatttaggaaatttaccaacaagagagtatctctttctaattctcttttcaatttaattatttgattttattttattttgcaagacttgattttgtagctttccaaatttcgtcacgtgtcatcttttgaattgcatgtcacatggtcatgtgcatgacttacttgtcaaacccaaattttgttgagataaggagtcacaattttgaaaatcaattttgtggtaatttaatccactaaaattttttatgtctacacattgcttgatcgatatgggacaaggcttggattgttagttgcaattttcacacttgatcaatcaaggctttttgtcactcaatttgagtgaattttatgtttgacttagaacaatcaagttatgacatagacccgttgatgatccttttttttttctttaaaccaaagccttatttttgcatacttgaatcttgatgcaataaaaacaattctaagaatatgaagaatcgttttaattttcgttgactaaatatttgttttgtggttcgctcaccatccctatcatgtactcaaagataaatgcatagttgtttcaatatgcataatgactgatgacctcttcaagtcctaaatggatggattagatgaaataggtatgcttaggaactgaagtcacaacttattgaattgtggtcacaaaaccccaacaattcttgtaatgtatgccataaaacatgcatccattcccccaccatccccaccctaaacttaagcacttaagtagaacatattatgcttatcaaaatgcaaacagatgtaggacttgagtaggacatattgtatttatcaatgcaaatggatgtagtaccaccattagagtgacatctattttataatcatggtttgataaggtggttttgaactcacctaagtttcttcatgattatgaaatgatttgaaattttaaaaattaagcaatgcctctcataggtgtagcactcccaagccaaggctcaggcaaagatgtgccttcattacctcttgtggctttaactcctgagaatcaccttacttcacctatattatgttccttcaaaaaaaaaacctttgagatcacattccaatcaacctttttatatttcatccttaagaaagaagaatgtttgtttttttaagagaaagattttgggttataattttaatttttttcaacaaatagcaaaaatgaatcaaatatttatattaatctacatgtttaaccctaaatgcacagtatcttttgactttgaatggattttagaaaaatggaaaacaaagaaagctaaagataagttcttgggaaataattctttgttggtgattcctttaatttagtaaaaagatgaatcccaaaatttctctctagcctagcttcaaaatccaaaatgctttcttcaattctcttaaaagttgtcactagaaacaaatgaaacttacccttggtcctgtgatacacagtgtatcctcttctctttctttttttctttattatcactgtgttattattatttttatgttatctttttgttttttaattatggtctggattttctgtttcattttacatgaaaataaaaacaagaatacatttaacctcagcataagatttatgattttccttttttgttcataacttacctttctaagtggtccctttctgtttttgaaggttt

SEQ ID NO: 10551 - DNA, 3735 bp, Vitis vinifera
  Intron number 1 from transcript GSVIVT01019557001 (locus G SVIVG01019557001) derived from phytozome v7.0 (chr-ID chr2 ; pos 1596547 to 1600281 reverse strand)
taccctccaattcaccaggttggttgtttctttcgttttcgttggtgggttcttcgtttttgagagattttgttggtgggttgttttttttggttttgatatatatttatattttttgcgggattttgttggtggggttcggttttctggaactgggattggagggggtttcttggattttcattctcagtgatgggtttggaattgaattgggattacataaacccttaaaactggcagaactttggcaacaaaagaaatatgcaagatttctgaatttcatggaattcaaagtccaaatcaagttcaattttgtgggaacaaatgaaggatgagggcatttattggtatggagttgttgatttggtggtttggattgggatttgttgctgggttgggttcaaatgttcagttgtgattatgagttaaaaggattatgtgattgttgcatatttgctaatcatgggatgcttatttttattgagaattcatacgtggtcgtgaatcatattaaccgggtcgataattgccaatattttaagttttgattagattcattagtttgggagatcaaaatgttcatcgatattttccaatcaaaaaaaaaaaaaatgttcatcgatattaatggtcactttaggttaagtggcaagttgcctacttgtagaattgaagtctatgggattttaaaggcattatcaaattagaattttatcataattgattcatattcattgtacagtcacccacccttaagtgtagagtaactagaatgatggaaacaactacaattataagagccaataatgagcttaaacttactccagttgggaatgtttcaggttttatttggaatgaagatgacagattctcttgttttgtgcttaaattttataaatgctgatctgctgatagtgttcctgaaaacatttttcttattgagaaacagagagcaccctctgaacaagaataatctgcccaaaaattgttctcaacatgtgttagtcgatgaataatcttaaataaaatagcattgaaagtgaacaaactaatccttgaatattgaggtggagacctttaagggaaacctaggatgcagaaactaaccactgaagtggaatagacttgttcacaattggatcgaacttctgagcaacatgataggtatagggagggcagtgttttcccctctttagcaaagatagagggtcaataggttttgcaaggtagatcaaaaaggcaaatatgaatggtttaagccttttaggtttgaattggaactttccagggatctgagtaaaaaattttcaggtcatctgcatgcctcatttctatggttggattcttatcttcaattgatggattaatttgacttattccatgcatggacagcactggagtgagacagtgtccatatcattttgaaactacgagtaaatagaaactttttccttggtaatagaatagtttttcacagttattcctatatatactattctatctcatttgagtttccttgatttttttcatgtaaggttcatttcaccgtaaatagcactttattctttagattggactatggagcatcatggcaactccaaggaatttcgtattccttcataagggttagtggtggtccttacacaaatttctccattaccttggaaaatgaggacatgaattactgttctgagtattcccaaactctcattgtcatttgtatatccaaactcattatgatccaaagtcttatcagaaaaccatagcatttaccttagctttacagtgaagatattattgtggactttttaaacattaaggtggttggtttaagttacattgttcaatatgatatcatttgcttcttctcattacattacatctttgacttccccttctgattttttgctaggcatcttcttgaaggatgtgaacctttgtttggagattttctgcaaggtgcacctttcagaatagtctaaacagtgcttttgtggttttgattcccaaaaaaaaaaggtcgagccaaagatttataggagtttagacctgttagccttgtgggcaatttgtacaaaaattttagctaaagctttggttaatcgattcaagaaagtgattgggaaagtggtgttggagtctcaaaatgtgtttgtggaagggagacaaatcctagatgcggttgtaattgctaatgaagctacaaacttgagattgagcctgaaaaatgggctaaaattcaaatggaatgagccaaaactaaggataaaagtgggcttgaaaatttaaaataaaaatggcgctaaggccagttttggggtccatagatgggtcaagggagttatgatgtttggtccaatgatattcccgtaaaggatgcttttccatctatgttttttttttttttcttttttttcttttttgatagctaaatgtttgtcgccattgggacttgaacctgaaaccttccataaaccctccctatccatttatcacttgagccaagcctcaagggccttttccatctatgttctccttgagggaatgattttcgggaggtaaaaagcaagatgatcatggggaactcatgcttcttaagacattttcaagattgagaaatagataatgttgagacgtttcttcagaagttacacgtgccaggaagaagtagcggaaaagagaattaaagggtttggtaggctagcaaaagtggggaatgctctgtgaagtccttttaatccgccttagaatttgaaggtgaagttttattcccctcaaagttagtttggggctcttgggctctttcaaagggacgtgtctttatttatttcttatttatttatttattcatgtattttattttattttatttttttgcatggaaaacgtcaaaagaatcaacttaaaaggagaggatggtttttggcaagttattgttgtatgtgtaaagatgaagaagaatcagtagaccatttactcatccattgtaggaaagttagagagttatgacactttctattctctttatttggcacttcgtgggttttttcatatttagtgaaggatttgttatttggttggaatgggagctttgtgggcaagaatagaagaaaagcttagagaacaaatcctctttagcttttttggacaatctagaaggaacgcgatcgaaaaaccttcaaaagcgtgcaacacactaacaaatctctaaaggactcccttatatctagtcaatatatatggtcttaggggtatcttatagttgatagtcaagctcgtccactatccttaatagattttgttaagtggttgagcttttctagattggggttgtggttgcagcttgcttctttttgttttctcatatgtatgcttctagtgtattgtgctcgcctttttttattggtgtttttaatatatatttattcttatatgcctatgaactagttatcactttcaaaatgaaagccattacaaatttccctatggtgtaccaggggtcctctccccttttttgattagtgcttgttaatatatactctttgtttgccaatcaggaaaaagaaaaaataaatctctgatttatttctatataatgtcggtgcttcttatataatttgttatttatttctattttttattttctttagtacatatagtatatgcctgctaattcctatttggctggaaattaattgctacttgtaataacttggcatttttttcagtgccaca

SEQ ID NO: 10552 - DNA, 6436 bp, Vitis vinifera
  Intron number 1 from transcript GSVIVT01033502001 (locus G SVIVG01033502001) derived from phytozome v7.0 (chr-ID chr8 ; pos 20206835 to 20213270)
aatcaatttactaaaattgagttttttattaccattcatttgaatcaaataattttcttataaatcttggaccgcgtaccaaaccatacaaaaataataaatgaacattgaacgaacagccggccttttaccaaaataattgtatcttgttatactaagtcacgccaccatgaacatcatatgaaccaaactaatgaaaattcatgttccttccaagttgataatgtggtgacctgagtatgacacgtacataccttttcttccaaagtggccttggttttcttcaagccagccctcgcagaggccgtcacgttgctcacattctccgtcacagcctctcctgcattcttcccggtccctcctcttatcgtattcttcttcttcttcactgcaaacacaagggacaatagagcatatagagtgggttaatatatttgtagaaagtgatgtgggtttgggagaagtgcaaggagaacgagctacgtggacttctcaaggactctcctttcgacacatattgccccctgtccctattaaaatggtcagaaatcttagagtaaccacgtggcatgcttcttatcgtctactaggcgattcggctgtggggtgccacgttttttatcctcgcttctcacgaaatttgaagggaaaaaataaatagaaaaaaagaagaagagagaaatgggtatttcggcattgtgtttgatccacgaataggaaacaggaatgtggattgattattataatttatagccatcgctagggcctacttcggcctatgggataataaccattaaccactaactgaatcattgaatatttgtgtggggatttaatgggagagtcttttcaactcaaaggaacgcgtgaagcgtaaacaaggccaatgtgtaaaatgtgaaaaagtcgtgtaagaatcgaactgttctttctcgtcgcttccatttttatgcttttatgcaatgtttgtgcgtggaagaataagaatcatcatatcattcattttaattttttttaatctatcctcatgtctacataagcagttgaattaaaaatgtgttaataaaaataaaatctcacctaagaaccggatattaataactaattttattatgagataacttatgatatttatatcgacgtttatgcatttgtctgtatttgatattagataaacttcatataataatcctcgatattttttgttttatttcttatttttattaaaaatttactatcataaattcaattcaatgcataatcttaatattcaatgtgtatttttaaataattatatttttttaattattaaaccatttcattttaccaaattcggtaataaccaaattagtaattttatttttcttaatcttgttatttaataaaaagaataaaataaacattcttttaaaatataaataaaaaatatttaaaaatacatttgtctttttttttatatatatattatcatcattcttgttcttgcaaaaattggaacaaatattaattctaaccttataatgttacatgcttccaaatataataattaaaatcattaaatttatccatatttaatgagaaataataatgaaaacaatcatttatatataccaaacatggccttaagtttaaaatttattaacaaaaataaaaatgcttataatgatatttcaaaagtatagaaaatattttcaaaaattatttttataatttttttatgattttggacaatttttaaaaacatttacttgtgagatgttactgttattgatttccttttagcaattctaatttcatttcatatttaaaaaagaaaaaaagaaaaagcatgcttgtaattttatagaaaggagtgaataaaaatgttttaaataatttgttgatattttttgaagtggtatttagaaatttcttaatatttaaatgtgatattagttttattttattgggtttctaatcttacttttcattttatgaaaataaaacattcttatagttataaagccacgagtaaacaaaaacgttttaaaactcttttataatgccttgtaaaacaaaaatttgataagcaactttaaatatttttaaatatattttaaaaataatttttatgtctaaaaatttatttttaaatattatacatgtttgtataattattattttttaaacaattttataaaatacaaatgaaaataattaaaaaatatatatatatatatatatatattaataacaagcaatagaaaacactttaatgatcatcaaatgtgttttttaattttattgtttttaaaaataaaaaattattttagaaaacaacaaccacactgaaccttagttaaaaaaaaaaattaaaacaaagttgcatccaaacacgtcccaattgactctccattattggaaatatagtgtaaaggatgaatcaatttactaaaattgaatttttttttttaccattcatttgaatcaaataattttcttataaatcttggaccgcgtaccaaaccatacaaaaataataaatgaacattgaacgaacagctggccttttaccaaaataattgtatattgtaatactaagtcacgccaccatgaacgtcatgtgaaccaaactaattaaaattcatgttccttccaacttgataatgtttagaggcttgacccacatacaccataaaatggcacctttctccaatggaaatgggacccatcttgctttccgtaccaaggttaggtgcactccatgaatgttgcatcttacttttcatctttcaccaccggtggaaactgatttcccgccatttaaaagtttttgcgtgagtcaattttggagtggttgtataaagcattttcaagcaaaaattaagcaattgataaattttttaaaaatctaaaagcgatgattttattttctaattcaaatcaaatgttataacatacctcaaaattcaaatgacataccgaacatggcataatttaaccgatttacttttttttttcttttttatacatataagtgatattttgaaaacttttatatcaccgataatattaatgtaaaaaaatatatatttcatatattttgttatctcattatataacaaatattatttcaaattagtatttttaatttaatataatattctttgatattttatctagtcatggcagttttgtttatatttaatttataaaataagtaaaaataaaataaaatatatattattcttaacattccatattttaaaattttaaattatatcacattctaatatttgttattaaaaaatgtgaaattttctcttccagttaacaatattcattattggaatatataaaaatttataaataaataatgtacacttattaaataatatatattaacattttattgtaaatattttttagttttacttttaaccatagattttatttttaatcaaaatttgttatgttgaaatgattaattaatatagaaaataaataaaaatcccttaaaaaaattatgatgactaagtatcaacgtaaagggtataacaaaaataaaatatatcatctcacttattttatcacgtttaattaaatacacattcattatatttaattatcaatcaaaatatatgatatgatatattatatatatatttttattatatatcgtactacatcatacaaaagaaatataaatgatataagtgatcagatattttataacccaaatataagagttccgtaacacttggtttatttctatttatgttatagggacaattgtgttttgaatctagttggacttaaaaattaagttttggtctatataagttcactgttaaggttaagatataaaaatatatatagaaattgaaaataacgatattaattttttatttttcaaaaaatgaaatttattgactatgaaaaaaaaatttaatttaaattttattcattttgtaaaccttaacaacatttaatttaatttaatgatttggaaaaaaatacacaatttttcaaaaaaataaaaacaaattattattattattgcttaaaaatcaaacatcttgaaaaaatatatatataaaattatgtatgtaaaaaataatatattttttaaaattaattttctaaaaataataattattagaaaaattaaaaaaaaattatcaaaattatgatataaaatattcaaaatagttttaaagggtatattgatctcttcaaattttatatcattttcattaattatgtaatttttataggccaaatgttaattttcaggtcgattgattcaaaacacaatcgtcctacgttatattcaatcattaaaacaacgcggttttatagaagtgatggatgatattaatgacgtaaaggtttaactaacacattcggcgaacttcaccggtaatgttgaattataattacgtaaattgatagcataccataatcatttaaaactctggttatcagcatagctgcaagcttatccacgtcaagccatcgggatagtcagcagttgatttaacgccacataatttgaggtctgcaaactcaaagtactttattggtgggattcttggagattcaatgctttgttgtacggttctctacagatggatatattctaacgatgtattttgatactcattcactcttcaacaaaatgataattatactattgaaatcatttaaattcaaattcaaataatgatgatattttacattgcgtttggatcacggtcagtgttaaaggtagcgccagaaaatatcttgaaggttatgtttgatttatagaaagtgctaagaagaaaaaaaaaatatttaaaaaaattatttttaataataaaatatgaaataaaataaaatatttaaatattattaattaatttatatatttttatatataaaaactataaataaataaatttaaaataacatataaataatttattaattttaattttttttcccttcattttttatccctattttatttctcttacattttacaagttgtcattaattcaaaattttatttatatattctatatgttttaatatgatttatttttatttagtaacggagatctctagtataaaataaagaaagcaagtggtatttaattaaaaaatttcaaagtttattcactcttattatttgatttacttaaaattaaatatttggataaaattataagataagataagtgataagaaaaaatgttaagaaaaatggttttttgtgtatgattttattataaaaaataaaaaaatataatataattaaaatgaactataattgtatatattttgaaaaaataattgaaatgaatttaacaaactagataaaaataatttattaattttaaatttattttttattttattttatttttcttctctatttttttttttttataatttcactttttttgggaaagtttttaagatgcaaagataacctggggaaaaaaagaaaaggccaatgatttatggatgatgttttgctaattctttttatattcaatcatattgcttattatatataaataaaatgtaacaaaattgtgaatacgccttctaataataccaattttaatcaattacttatcaaatttcgtttagtaataattgatatttctatttttatttcacatactaaatgtatgtttttaaattgattaggtagacatggtatttttcatttatataaaaaaaaaactattttagtaattaataaataaatacttattaaaataaaagcttttaaaatcattatctatctaaaaatgtaatttagagaaacgttctatgaatctcatttaatcttctgtgaaattaaaagataggcatgaagatatgagtcatatggcacggtaattttatatttttcagagggcaaaaaataaaaagtaaaaaataaaaaattaaagattccaactttccatcccaaccctttgatttacttttagaaattaaaaaaagcaatttccggccttggcaacatcatcatagtgctttcggatcagaattaaatatttgcagtacgcctctgatatcacgtacctcaatgatataaataaattgacagtggggctgttttgtcattttcgaagatattttctgtgatcaggtccgatcgccaccgttgagagtggaagggacggtcaggattaaagtgcaattcagaggtggagcatcgtctcatctgctgaagaggagttatctgaaccaatatccgcgtgacacgtatgaaacgcgaagctaagagacacgttggcttcgatggggcccaccagcgaggagggaagagggaaaaaaaaagcttaaatagggaccgtatacagaggtaaaaggcgaaggccggcaataccagaaggccagagagagagaggttgagagagagagagagagggtgtcgtgaagggaagagctgctt

SEQ ID NO: 10553 - DNA, 3925 bp, Vitis vinifera
  Intron number 1 from transcript GSVIVT01029601001 (locus G SVIVG01029601001) derived from phytozome v7.0 (chr-ID chr9 ; pos 20893776 to 20897700 reverse strand)
tctgggatcgtcagactctggtcagagaacaggaggtaaatcgtttttttttttttttttttttttttttctttccaatttttatgggttgtttggttgacgaggaaatggattaatttttttgatagattatggtataactaatcggatggttcatttatttatttgggtgggactagagatttgattcagctattatatttttctcccttggaattgtttgagccatgatccgttgctgggaagatggaggaaaattttggaaatgccaatacacgtaaacagatttttaattttttaattttttgggaaatgaattaaaatgcaaagcgtaacattaaggatttaatcttgtttaattttttttttctgggaaaatcatttgtgcaatactgagtggctaacaaaatgtacggaaatttgggaaaccttaaaataaagaattggatttttttccctctttattattattatttttttggtggggggaaatgaaacaattcaaagcgtaagattgaggatttctggctgcttttgttgttgttgttgttgttaagctgtttgggtgcgacgttttattcctgagaaaatgtaggaaaatttgggaaacctcagcataagtgatcgcattttttttgggaattaaaacaatgacagcttaagatttggaattttgtgtgtgctttctctttcttgcaaagggtagtgtaattaatcctactttttttgtttttgatcttttctttggcatttgtatgaatgcaaagagtgtgatagaggattttttttttatttttttatttttttaaattttatatttttataagtcatttgtgcaattttttttggttgctgagacaatatagcaaaattcatgacctgcaatgtatttgaccagattttttttttcctaattattattattattattatttatctttttgaggaactgagacactgaaaaggatgagattcaggatttcagggattgttttgctgttgttgtgccaaaaaaaagggttagatttactaattctaattttattctagtaagatttgttgtttgggattttgagcttgaccatcacattttagatttgatttttggttttggacaatataattctgtttagtagttaatataagcgtgtgtattgtggttggatttttctattactaatgaaaaccaggtacaattttgcagaaaaaatttaggaattaaaagacttgaaatttagaagtgccgtatggtgaagattctgaacatgctgcagattctgaacatgctgctgtcttagttcattgagatgattaagtttaatttagatagtctgtatggaaccttatctgttactgctttatgagattgtggttggttttatggcgataaagatatggggaaagttcatgaagtagtacctgtttgtttttcctatgcataaatcatgagtgatttttctattcaactttgcattagaagaagatttttagtttgtcacagttgtaaatttacttgctagaagtacccaaagtaattgtactctgatacgatgatattctctgcatgtgaagagacaaaacaccatgtttttttttccaattacaagtggcaggagagacttgaacctaagatctctggttgtaataccatgtttgactaccgactgttgtaaaaaattaagttgttaatatatgggcccttacatatatcaagctaccaatccaaaattcatcatgctattaagaagtaattagcacccttttttacagttcctgtttatatttaccagagcttttcaccaaacttgggagattagttaagacatcagtttgactctggggaataggaagagaatcaatattagatgggcaaagagcactagtagaaggaagattgtagtgggatagttcttgaaaaaggtggatgcatgggaaattgaaggtcttcaatctgttgaagcttattcttcaatgaattggcatttattgggttcaatttgattctatatatatttgtcctgtttgaagaaagaaaggatctcaggtagtcaatcctcattcttagtaagaattcttgtggttccaaaggatcaactataggagagcctggaaaatagagctttccttttttggtaattggtcactgcaatcccctctgtgagaaggcacctcttcttacaaagttatgtgtttgttttgttgaattccttagaatgaggtcatactctcatgtattctttacccacctatctattttggtttcaggtagaagtatcgctatgttcaaggtccaatataagctcctgtcgtgggaaaagcaaaaacagtttgaaatggagaacagttgggaagagatgaaaccaagaagattgaagagataaactataggaaggttgggctcaccttacttagtgaaacagagacatgggtggaatgaatgcaaattttaagaaaataatgctaccgaaaggccatgggaacagaaaattgaagtaagaaatgttaattgcaagaagtacagaaatttagggaagaagagattaggtgtatgggaaagatgtagcaagaaatttgttggttgggcccttggaatattccaagaggtgcaaggatgtcttcactagaaaaaagaagaaaaccatgttctaaccaataaaagataatcatgagacaatttttctcaacttggaaattttcatctttagaatatgtgaattttaaagagggaggtggtggctgatggctgtctagcctaatttctttctaaatccaaactccttggtatatgtgtaaattggattgcaagaaattctcaaaatgaagacattcctaatatacttgtgcaagattatatttataaattggattgctagaaattccctaaatggaggcaacccttatatactggcatgagaaggaaaacaaatcttaaaaacctcaatcgtatcacctatttgtatggtcttgggcaattggagttagagctgaaattttgtttgttagctatttatttatatgctcaggaagattttggataggaggtgctcttgtgcttggaattcctggacctatcagccttaacccaaggctagtgagctggcggtgtttccatttattttgatctttgagttatccttgtatttcactatacctaggttgtgcctttgtttgttagggacttactgatttattgtttgtaacatatttttagaagtttctaatttattgttctataaactattgtaaaaatagatgtcttaataagtaatttaatttttatgatgtaacaaatgaactttattttcattccagtcatttgctattgctaaattctattttgaagtttctgatatgattacacctggatcaacctgatactgagtcggagatgctatgaggatttggatgcagagaagagaggagaaaaaagaataaaagacaatagaagagagatggaaagggtgtaaatcctttcccaacttacatttttatatttgaaagtcacacaatagtaccattgacaatgcctcagtttaccgcaaaaatactttgtgcttattttcatcggtttgtaatgaagttctcgtatcataattggtgatttttggtaagtttggatttttttttctattttttttaatgggcaaataaaaggttgtattggggatcctagcaaacagaaggggcgcaaccccagtacaccaggcctcttaccccctaaaatagcaaattagtcttctgtaattaactgtttccatatgaattttaagtaatgagtatcttcacccaggtaaaaatttatgctgaaaactgaagcttgctatttcaatttgagggacaattgcttctccagttgcgtttatttaaagaattttgtgtggattttgcagattgaggttgccagcctaaaagcagaattgaccca

SEQ ID NO: 10554 - DNA, 8744 bp, Vitis vinifera
  Intron number 5 from transcript GSVIVT01033615001 (locus G SVIVG01033615001) derived from phytozome v7.0 (chr-ID chr8 ; pos 19252019 to 19260762)
cttcaccagatctatacagaattaatttagaacaggtttttatcttagccaaatgtcattttttatgattgtcaattagcattaaatttctcactttaaatagttcctttttttaaataaaaaaaaaaaccttcaatattttcattacactcttgatgtttggtaagatacattatgtatgcccatctatttctgttgttgagtaggaaagaactttgtgggtgtaacctatttatctgcaagtgcagatatgataatgttgcactcaatatcattagtcccttagtggattggcctcttggattgttaaaactgattgactgaacttctccactatgcaaggagacttatacaacaaagtttacacataacatttattccccaaagacaaatatctccttttcagctgatccaaagtcaatatccttcccaagaagtgagcatttcccctcaagcataatttggaattccttggctcctgtgaaggtgggattctttgcatgggaagcaacatatgttggattttaacgattgattagattaaaaggaggggatggacaatgcttaatcgatgctatttgtgcaaagttaaggaagaattggctaatcatttgcttcttcattgccctaaagcaagtattctgttgagtaatgcactctactataagaggaaattcgctgagttagcatgatcttttgtaagaaagaaatggaaaaatacttggatggttttacttgtatttgttttggattcaatggaaggaaaaaaataggaggtcctttgaagattttgaactgttagaacaaaaaattaaatattttttttatgaatactcttttggaatggagtggagtgcacgtagagaaaccagtatgacttagccgagtcatatccgcctcggccatggctagtacctggaccaataaccgagttcaatattcggttgacttgtgaatagactcgattgaattgaagataaagcaatcgtctttaagtgaaccacacaacaactttgagacaacttcaagattatgccgatactgatcttcttgggttatggatgatggtaaaactggtaatgttggagctgaaacggtggagaacaggagagatcaaaacccacaaaaatggagaactatgtatggagagttcggaccctctgcttcttcatccttcaaattttgcatcttcgtagagatgttttgtcttcaatttagagccttcaaaaagggcattgtgcagagaaatagggagtcatctatttagagttaaaatgggtgttgtgaaaagaaagggaataggcgtttgccgaggtgtgtgggtatttgacaggattaagaatttgggttttgaatcatgggcatttgtttttaagtagataatgagtatttggggggcatttgtatttaaatggataatggaaatttgatggaaattatgattatagcaaatgaataatgaatatttaggtttacatcaaataaaaggcaaagtgtttaccaactgtgtagacatacagaagcactttagaaatatacattactatgaactgatttacttgtgtgaatgaattctttgttgcacaaatacatgtcttttccatgacttgctaacatattcctctacaccagcttttagttaacactatatttgttaacatattttttatcagtttttgtaaatgtcaagaaggatttcttgtccttttttgtacttactaaattcaatacaatgaattagtttgtttctaatcccaaaaaaaaaaaaagactaaacacaatgttctttgtctttttagtctagtaatgtgtggctcacaaaatagagggcctcagtattatagattttctggcaagcaatttaagtagacatgtgaatctctttctgaacagaaacaaacagcttcatttatttttaaagataaatacaagaaggacaagcaatccttcaaggatgtacaaaaaggaaagttgtaaagtaatcaagtgtcaaggctcacaagaactaatccaaccttacaaataaaaaccatagtacaaagaaatagaaatattacactcaaggggggaagaaagtatccaacaaaagaggaagtagatatgtgaataaacttagtataaagaaatagaaatgtaacacactcaagggggaagagagtctctaacaaaaaatgaagtagatatttgaatttataaacactgaattcaacaaattttggcattagtacaaaatttaacaaatatacttgagaaatttcatgtggctaatcatttcaaattttcttaatcgtgaaggttaatatttatctttttcctttgatttgaagattataggtcatcttttcttatattttttttctcttaatcatgtcaatgttgatatgtgtgtgtgtgtgtgtgtatagtggtttgtttgtccagactatgttatgtattttgttttttttgtttttttgaagattaaaagtatattaaatgggacttgagaagtgaatttaaagattgagtggcttgtgcatttcactctcttttgtctaaaataggggagtggagacccaactgtgaaagggctttttgttggggcattatgagaggacaatgcagctatgctggaagcaccattctcaaaggagaaggtgttaaatgccctctcagctcttagcggggatatagctccaggccttgatggcttctctgtggctttttggcaagtcaattgggattttttaaagcttatttgttcttgtcaatggttcttttttgggctttttttagagctttagggtattgatacaagggaatgctctttctccttatgtgtttgtgattgtcatggagaccctcagttgtttgcttaagagggccaaggttggtggtttcctaccagggtagcaagtgagaggaaaaggaagaggaaggtgggggggtagatgtttcacatttactgtttgttgatgatatgttagtgttttgtgagccttccccaaactagccgacttacttgagttaagtgcttatgtggtttgaggccattttggggttgagagttagtctagaccagagcaaactaatcccaatggggagggtggagaatataaggaagttggctaacgagtttggctacaaggttaaggtgcttccatgcacttatttaagtcttcctttgggtgctcttattaagtctgtgacagtttaggatgatggggagaagaggtttcaaaaaagactggctctttggaaaaggctacttctaagggggagagacttgccttaattcgtagcactctgtctagcttgcctattgattttatgtccttattttgcatgccaagatcatttgggctgagtttggagcaaattcaaagagactttctttggggaggaagggcccttgaaaggaaacctcacttggttagttggtctattgtctgtttagacaaaagtaaaggtggattaggggttagggatctcttgctactcaataaatcccttctgtgcaagtggaattgtcgttttgctaaggagatggagaccttttggaggcaagtcatgagcagaaaatatagggaggaggaaggagggtggctgagggaggcatatgaggtagggttatggaaagctattaggaaggtgggaggcttgttaagttgtagagttgcctttttggtggggaatggtaggaatgtgaggtttggaaaggacaagtggtgtggtgatgagcctttatgcatctcttttccttccttatttgttgtagcctcttccaaggaggcatgggtggaggaggtttggaaccattctattgagtgtaagtgttgggtcccttgcttctctaggcaaatcaatgattgggagttggaaaccatggagcatttccttttgagactgcatgggaggagggtgtctagggatagggatgatgaaattttgtggattgagtctaagaatgaggccttctctgtcaagtccttgtacaaggcgttatacttaggaatgcagggtgttttcccaacaagtgtgatttggaattcatgggtgctgctaagggtggttttcttggtttgagaggctacttggaggaagattctaactttggttcacattcagaggagaaggtggtgtttggcaaatagatgcttcctatgcctcaacaaagaagaatctattgatcacactctctttcattgtgatagaacaagagttttatgatattgtggaccccgtatttcgatcgctcgaatgcgtttcccactcgaatggcgaaactcgatttttatttggaaaaatgatttttattgattaagaaaaatgacttggagtcgccacttatttttgttttatttttaaaagggtaaacaaaataagaaagaaaaaccctaagtgtgactccttattttgaaaaaggtgatctacgaaaaccggatcgggttcgggggtcaggttacttatcgggaaggtacggtaaagaccgtagcacccctctaagtccctaaaaacgggtctctactaataaaatgaagcaattgtggcaatcgatgagtaaatcaatgaatatcttgaacgatcatgcacatataagaatcagaacactcaatgaagaatgatcaaagtgagagcggggcgtaccttagcatcaaacgatcaatgtgctatcacaaaaaattgggtcagtgtacaataaagagcataaacatagctcacatgtcactaaatcaagcacaaaggtcatcacatgtcacaattcattcaaattgatttttattttaaagaaaattctttgatgtagggcccccaccaaagcccgtttatttttgcatgaattaattccataaattccattattcggaattacggaatttaaattcatgtttattttaaaacgttttaaaatcatgaaaaattcaaaagtggctcgccgaaaagaaaatggcggccaaatttgattaaaaaacggatttttggaacctaaacgaaaaaacactaaggatgaaaaaaaattaaagagatgaaattatttgaaaaaaatagaatttgaaaaattatttgcaaactagagtttaggaagattattttcaaaaactaaggatggtgaaacgaggggaatgaaaggaggtgacgcgtggccaccaagatttgcatgccaaaggtgaccatgcaaagaaatgggatcatacatgtgcccgccctagaagtttcaacagtgttgggttgtattaataagaaaagtctctgacagaccaatcccattatgctggtgaagactcatttttggtgcattaagatgagacaccttgaacttatgtcttggattctcttggctccatgagtcaaactgcattcaggttgcaccattaaattggctagggttcatcctggaagaaactctgaaaccaccaaaataacgtgcactgatctctggaatggacttaggacttgaagaatactcaaggttgggtggaatcttcttgagccactatctcacattgctgttgtgctcacttgcgcctagaaaataatggttcataggatacgagaccctcaatagagtgatcatgaacacgtacaggggaagacaagttgctggatagcatccataaagagcttagaaaaacttaaagtcaacttgataggggcctgatcaaacacttcaacatatgtcttcatctgttttctaaccaatagccagatttattgtccaagaatgccatctggaatgattgaaagcaataacgaattgcttttgaatctgttgtttccattcaagtccactttgaacccgtctcaattaatacttccatttttttttattctcgggtaaaaatgccaatattcagtttcaaatggtaaacgggtccctattaccaccagaattcctctccttatttcctctattgtcaccatgatcagatggggaatgagctttgcaaaagcggactgatctcatggtgaatcttattatatatccatgtgcaatcacgctgcatatcagtaccgagccaaggttacacgctgcttcgactgcggctcctgtcccgggcatcaccaacagcgtatgagacctgctcgatgcactaggattttgttctcagcaggaatgtcatagccactgagctttgcatcattcagattcatgtgagggaccaggagaggaattgccatccttagccggagagtttctttgattacagcctgaggatatggaagcttttggacatcagacccagtgacttagacgccaggtccaagcacaatgttcagctcatccctgatatactgatttgctccactagatgatccttcggatgttgatgccctcaacagtggattattaaaataaagagaacccgaactggttcaagagattggagattgtttgaaggggatagatgttgttttccattggagacaatttgcgaaaggattgaagagggtgcagtggtgaagattagagaaagcacgagtagtgcgaagcttcattgcaggaggctgcgcggtgttcggtactcaaaagcagagtagtgagtggcgctcgctgcttgccgttgggtcaatagagggcaaatggggagtgggagattgagggcggccactgtagggtgtaggaaatgggtatggaatgggtttagggagagagacgggttaagtgatacggttagggaagtgataggtgtgagtggtggtgggtatgtgatgggtaggggcataatggaaatgtgggtatggacatgaaagatttaatgggtatgaaggaagtgggtatgtgaataatggaattacaagaggggagtatgaagaataggatgagagaagaagtcatcatcaaaggttaaattcaggccaaccacttttcccatttgacatgtggtgctttgctgccatattcttcccaattatttcttaatgacaatatgagcctgattttatacttccttgcttcactcaaaacaaaatcccgggccttgaacacatcttcatcataaacagaaggagacttttgaaaaagctctccactggccagcattgaaagccccaaatccagcacacagttaagcccacagagactgctcattaaaacacctcactgaccttcccctttgtggattgattcacggcaaattccatcaaccaataagtgttgaacccgttcacataaaaaaacttagcattaaccacaaatcggttccctctcttctgcaccattgtccatggctcacctccaaggtcacttatctcataaaccttcgaagtccaactcaaatgaaaatgagagtcgatccaggctgtgccctttacagcttcatattcaagaaaatccaagcacgaagagcagagagaaaaatagcaaaaacagagcaatggaggaataagatatgatgaagcattaagaactatgcttcatttcttcattagtgggtttgcagatgggtggattaaaaggtctttttctttctttaaaataccatagaggaggtaaaatggaattaaatcaatttttaaacacaaacaggagcaaaagaggaatagtcagccatgaagaacaaagcataaattgtcaaagatcaacaacaatgcatcccaataataatacatgaagagaaaaagaaagaaacagaaacacaatggaaaacttactctcgggaagaaaaatgttagagaccctttctttatggctctctctataacctccaacttgcttctcgcttcctcctcaaacccagactctttgtctcaaaactcccagcttgcttcctctagaaaagaaaagatatctcctcctcttctcaccagcaagctcaccctggtttttctactctctgccagaaaactcctctgtttctttttttttcactcacagctctccactcttccagctctaatctccttccctctgcccaaaatcaccaaacaaaagcccttccccccaaaaaaaatccctacagccttcttcttttcctaatatctccaacggccaggctagggaccaagcagctggccaccccactcccttaaccgtctgcagctttttgcagattctttggacacgtgtcgacctctggttggccataaaaaacaccactctggtgccccaacagccaaccatgcatggacacgtggctccttgagatcgtgacacttggcaaaatcaagctgcagaaaatgagctccaaatgggggtctacagatatcttctgttctctttttttggtgtgtcatggatactcccctcctcggttagagaggctttgcgaggatgggttgtttttttcttgggtaagaaaaggaaaaaaggcatggtaggctactcttttatgccttttttggactgtttggaaggaaagaaatagtagagcctttgacaatgaggggcagtcaattcaagggttgaaattctacttcatttgtaatctttgggcctggtgcaagttatatatggtccctaatcctttttcctttgtagattttgtagagtgattgagttagggataaaggggttgttgttggtggccctctttgtttttgtgttgtcttaaggtgtttctttgtataagtcttgtgtacttggaatgttttttttttgcgatcctttttataaaatgattctgattacctatcaaaaataataataataataataataataataatatttgttgaactgcttttaagtttaggtttcatctatactgattttgacttatttcttcacagggacgtttcctctcctctcttaacacccagtcccc

SEQ ID NO: 10555 - DNA, 7995 bp, Vitis vinifera
  Intron number 3 from transcript GSVIVT01031615001 (locus G SVIVG01031615001) derived from phytozome v7.0 (chr-ID chr5 ; pos 18992816 to 19000810)
aagggctgattgtgcagtggtgttcccaggtggaggtgttgtgtcaccaagcagttggatgtttcttgacgcactgtgggtggaactccatcatggagagtctagttgcaggtgtgccggtggtggcatgtccccagttttcagaccagacgacgaatgcaaagctggtggaggtgtgggggactggggtgaaagcgagggcgaatgaagaaggggttgtggagagagaagagatcaaaaaatgtttggagatggcgatggaagatggagggaaaggggaagagatgagaaggaatgctgagaaatggaaaggattggcagtggaatgtatgagggagtgtggttcttcaggcaacattaatctaaaacattttgtggaaagcttagaaatcaggactcattgatgcaaaagccatctttagtgggcttgggcatgagatgtaatagttaccacaaccaaaagtaataaacattttggatcatatgattgatggtttaatagtttagttgaaggttactgaaagtttctgaggaactttgagagtggttattactttattaattatggccaaaattatttctgttgttcagattggttattgctttactattatagtattttttattttttattttgttttctttcttcctttagtggcagtaatactagaagaaatattatctccttctgctatagagttttgaaaacacaagtgttgttcatgtgtgagtagcataccatggattgagtggatatgaacatcatctacatgagttgtgagaaaggcaattatggatttacaatcttctccaaggcctctaagaagttgcaaaatttggtctctttctgctataggttctttgattgtagcaagattatcacaagaatctttgtcttgagtatatattccatcatccagagtgagcctttttgtgttgtctgaaatctaaccgaagttgcattacccatgcctttgacaaggcagagaaaatattctccaaggcaaaccatgctgcatgagaggtttgataatcgacaatctgtcccatgatctccagagtaagagatgaatagatctaactcaggatcacaccattgaattgttgcaatgcaaaaaaattaatatggatttgattcactagcatttgttacctttggaggacaaaccttcagtcttctaatatgttcttcaaatccattggaaaaaatcacattcaccatttgtgtacgctaaaggacgtaattacttctatctagattgtgagagtatgattagcatctgcaatggtcgaattgttccagaggattgagaaggagtaacattcatattggcttgcgagttacaaaactacgttgaagtagccacgtgagttgtatatgtgtttgtcatgggagaaaaatgcaagaaagctaaagcgacgaaacaaattttataggcataaaccaccaattgtaattgcaatagccccatcatcactgtcccttactgccctaatttccagtccacatgattttgcaactagacaagaccttttttttttttaattctcgtcttattttttggtgtgaaatttctatggccttttcatcgaaacgagattttcccatgtttctagtatctcgttatatattttaaaaatatcagtctcaaaaagaaaacattttttactttgaaaagataatccatatttttgaaattgtaagtaaattaatataaccttagttgaatcaaaacgttgtcttttataatacttttgtgagatatttttttacaatttctccgacctataaaatatcctttgttatttaatattaaagcaatatactcaaggattaattaccataaacactatgtagtcaagaaccactagtctaagatattatgtggtgagatcaacatattgagttccttcaaagatcatcaaaaccatgggtttaggacttagctctacttaactatgataagtttgaatagttgacttatattttataagttacttgaccatattatctatataaatatttgtaaatattaaggctaattcttattaattttatcttttgaagatgataaatgtctttattgaatgactaaatttttattaatagtgccattgactatagagagggatttaatagaggagaacttatcatttcctttgttgggaggagctatttataagcttctttatcacaggctttctatgaaattgcctatttttgcaggttttttttctttgtgggctttgttgcaggacaattgttttattacctaggaattgtgatttctaatttctttttgtttcaagtatctattcttagtggacttggagaaaagtatgtttagaggttcttcccttttgctaaggtaaaataagttttttacccctttaatagccctagtcccccaacctccatttcttttaggcagaggacttgaagagtactggaggctatttctttttctccttttgttgcaagttgtaacaagttgtggtagttgcaagatgtttgttaacttcagtagattcttagtcagtcttatacaacagtaatagacaaatccactttgttatcagagatgccaaagagccaccttctttcgctttctgatttacacttgactattcttttttcttaaattacgtgctgggcattgattgtcttgagatgccaaagagccaggctagtgtcgtggtccaaattgttcaagaaatatctattgtggctgccaagggcattaaggttgctctttgtggattatctctttgtgatggagacgagcctttgaaaaaccatgggaatcatttagagaatgatgtgacccatccatgcttagatcttaggaagggtagaaaatggcaccccctatatgttaagctcttccctattgttagtctttcaaaatctggattgttgttgtagtctagttttatccacctcaatgggaatttgttaattgttttttgcaatgatttgggagtgttagtctaggtttggataatttatcttacattttgttggtacttatttttgctaattcttctttagctgaatatattagatgggaaaataatgtgtatatgggtactacaatgtctttctcgtctacttggcctatagatatagccaactatgattgggttctttttgggaggtggttaactctatatgttaatatttcttctttaattagatacattaattttaaaatttatttatttttcatgtaaaagatactcatgagtcaacatgttcatacacgatgaagaaaaaaggtctattttgtggccaaagtaagcttctcatgataaataaataaataaataagtgtatactaatgactattagtattattatttatataaactattttttcctatgtaacaacacggaggaatcctataattttgaatttgtttcttagttgtatttaaaggattgaatcaatcgatgtttaacgagtaaagtgtttatatatatatatatatatatatatatatatatatttcttctatatttccagaattatttattgatttatcaatttttaaaaataattttattttaatggaaatggtgaaatatttttactctttagtggaaagttttacttctttattttctcttttcaacctctaactttgttaaaatactcaagcctagcttatcacataaaataaaactaaatttatttaaatatttcttggcttaaaaaaaaaacaccaaactaccttaattttgtgcaagttggatgacaaataaatttatcaaaaattaggataaaaaaatgtttctaagataggttatgttattgtcattccaaaactaaaactaaaattcaactacattcaactactatttttttcccttataatttatctacttctcaaggaaattaaatccatacatttgtctagatttcttgttcaaaaatggaaaaaaaaaacccataaaagatcataacatttaaattaaaaatgaatttaccataattcttcaaaatttgaccccttgaaatataacaaaaccaaaataaaccaattatcaactttaatgaaattttttttttataattttaaaacacaactcatccccatctaaatatctactaaaatgaacaattctaatttttgaaaattaaaaagttaatatttggtggtttttcctaaattaaaaatcaaaaaattaataaattaattttaataattaaacacatattttaatcataaatccataaatcttaaagattcacagcataaaaatagtgagtaatcaacgaaatttcactaaaaaattcttttaaattttttacaatgaacagtgattacaaactctaattattatctaattatcaattttctaactaattatataattaattattatggactttttattattgtaatgaattttgatatttggtgatcataaaaaatatgctaaattagtttttgttttcaaattattaattttttaaatattttattttaattatataaaataaaaataaacattataattaatttatagatttttttagcatataaaaataaatgagtttaaaaattcacattatttgatgttaatacaaaaaaacaacttaatgcttaacaacattcaaaggggataaaaacctaatgcttgacaacatttagaggtcaataaaatctaatctcctgcacacttgagttccattcaaatttacggcaaattcaagtctatttaaaattcaaacaaaaagataaaggccaccttgtggtatattaataacattagtatgtatgttagctaccaagaacaataggtttttaaatctagagattgagggtgacttgaaaatagttatagattgttacaataaaaggaataatattcttaattctattatgttattaataaaggatatttgaaaattatattagaatctaaatatttattattattgttctatttataaggaaacaaatagaataacagatttcttaactaaaaaaatgtatttataatttaaaattaatcatttggtggtcaaatttccttaaaagatattaaaaagtttaatttaattttgaagattattgctatttatctttcaatcatatttataggtattttacttcattctctctctctctaaaaataaaaatcattagtagtagagaaaggaaggatcatgcttttgggtctcttagagaaagaaatgaaattatcaaaattgttgatggtgtctaaaattatgttacttttatattaaatttggaagaatatattataaagtcgatatgaaaattttcttttagaatttttaaatttctttatcagtgaaagtagataacaatcggaattcttcatcttctcatatttaactttattctttacatgttctctttatatttattttgttcataagatatggaggtaggatgtttaaattcaaccaaattttctagtaagattattttcttttattatatctaatggctgaaaaggaaatgggtaataattttgaaaaatcaagatttttcttaaggcaatggatcgttgaagacaatatttataacataaaaaatcaagatttttcttaagacaagggattgtcgaagacaaccttggtagtataggtactatgacaaattaaggtatataaaatatcagtgtgggatccatcattttagaccttagtcttgtacatcaaatgtttcaaacttggttggtctaacttatccaatgtctttaaatgttttctaagcccaatgccccccatctttgacttttcttcatttcctatttcatgttgttttcacgcattgaataacgtaactggcatggcctagattattaatggggtgtcatggaatccatggaaaataatttaaatttctttatttgattttacatcaaaatgtgacgaataattattctatattgaaaagaatacttttgttcctatgattggccatggttaaacaaatgttactcttaatttttatttttatttttaacaaatttcaagatgaaaaataaaacatttatgaatcaaaagataggtatcttatatgtaaatattaaaaaaaatattaaaacttataaaaaaaaattataaatggacatgactattaataaaacatggtatttaatgggtgtttggtaaatcgatttaataacttaaagtaatttaataacttaatttaaattattaagtaaatagatttggtaaaacaatttaatagtatcaagttaaaaacaattttaaataataagtgaaatcaattaacttattcttaagtctacatctttattttatatttttatccttatttatcctaattacctctatgaccttctttcctgctccatcaccttcactgttactaaaccttatttgctttaattataatttatgaggataaatatatccattttatgatttaaaatatattttaagttaattttataaaataattttaatacttataaaaagaattaagtaataagttttaatttaataatttaaatataatttaatttaaaatcaatttaaattattaaataataaatattaaattttataagatacttatgcaatccaatatctaaaaggaaagaaaaaaaaaaccattttaatatttaaattccacccaagttgaaagttattatataaacgtcaactcaaatatcaattgcctttgctgaaaggttcgaataagccaagcttaatgccaacttgatttgatatttaactttttgttatattgaaatattgtgttttttattatttaaattttgataaaatatattttttttaaatgaaaaattgacagccattgaacgtgggttcaccgaatccaaccttatccagtcccaatttgatttgaccaattaacctaattatcccaactttgaaaaaaacgaagatgaattagaatggattgagcatctccattaagtcaataaatcaggcctttgcgagaaaggaaagcacagacaaggatggacaaacatcatttcctcttactatcctgcccagcacaaggccacatcaatcccacccttcatctggccatgctcctcttacgcctaggggtacgtgtcaccttcgccaccttcgtgtccggcctccgccgcatcgccacccttcctactatccccggcttgcactttgcctctttctcggatggctacgatgatggaaacaactccaactactccatggaagagatgaagcgcgtaggctcccagagcctctccaacttgctcttaagcctatccaacgagcgcggtcctgtcacctacttaatctacggattcctcctgccctgggcagccacagtggctcgtgagcacggcataccctcagcctttctgagcactcagtcagccactgtaattgccgtttatcatcgatacttgaaggcccatgacggtctcttcaataccgagctcggaagttccttgaatatttccttggaattaccaggattgcccccactgaaatacgaagacctaccttccattctgttaccaaccagtccacacgcttcggtcgtccccagctttcaagaacacgtccaaaacttagagcaagatcccaacacatgcttgctaataaacacgtttaatgcgttggaagaagatgtaatcaaagcccttggagactttatgaatgtggttgcaatcggacctttgatgcagcttgattcctccatcagttgtgacctgtttgagaggtctaaggattatcttccatggctcaactcaaaaccagaaggctcagtgatttatgtgtcgtttgggagtcttgcgacgttgcagaaaaatcaaatggaggagatattccatggactaatggaaagtcatcgcccttttttgtgggtgattcgatctatagagagcgaattagaggagaagatgaacagtagcttgagtgaagaacaagggctgattgtgcagtggtgctcccaagtggaggtgttgtgtcaccaagcagttgg

SEQ ID NO: 10556 - DNA, 9596 bp, Vitis vinifera
  Intron number 4 from transcript GSVIVT01023235001 (locus G SVIVG01023235001) derived from phytozome v7.0 (chr-ID chr1 2; pos 20820686 to 20830281 reverse strand)
tgaaactctatacctatcaggtttgtaaaagtttttcctctatgctaccttttttcatcagtccttttgatttgaaaattaacacaaattacagttccattgtccttattaaaagagaaagcaaagggtcttcgtcaattctggctggtatactaaagaaagacaacttttgtctggtgtaaatttgcctcctaagagaacatgttatatgaattagcttggagagaagtaacttctccacttccaagtgaagtgactgctttactaatcattagagcaccgtgttagtttaactctgggttagtgatgaagtaacttggactgggagttggtaaagttgagtctgtcaggttttcttgtgaaatagtctggaagagagaagaggaagagaaggttaagagagattaggttcttcctccaacttagatttgtattaaaaggaattcaaatgacagaagtaccccatgctgcccaatcattaaagatcaagaaaatagtaatagaaaagggtacaactattccacactgtaaatttctttacttatcagaaaacaaaaaaaaaaaaaaactattccacactttaaacaccttaattttccctcaagttgcttagcttgaggtaatgttgaacgattctcaaatattatcataaaaatcctcctttttattaagtgataatcttctaaattatagttcttggttgaactagtgtactcctgttggggatttaatcatgaatacaaagattatcacaataaacacggttttggctcttttgcgggaactcattcgccgtttatgggcacctaaatatattttccctttacataaaaaagatgaagctcttagaaacacaataccatttaccagttaccaattaggtgatgataatgcaacaatactatgtatggtgtattctttgtggcatttatttatgctgttgacaactatgctttgtggtttgatgcttgtctatctgacgtatgtaatgttggaaggttttcttctagtggtttttgacttatttgttctagtagttgcttatatggtttgaggtcgtgtcggggttgagaataaacttggaaaagagtgaactaattctagtaggtagggtggaggatattgatgatcttgctatggattttggttgtagagtgggtaatctaccgttcacttagttgggccttcctttgggtgcaccatttaagtcagtgacagtttgggatggagtggaagagcggtttcatagaaggttggctatgtggaagagacaatacatatccaaaggagggagggtgaccctaattcgaagcacattatcgaatttacccatttatttcatgttcttgctgcacatgccaagctcaattagacagagactagagcaaattgaaagggatttcctttggggagatggaaatatggagcaaaaacctcatttagtaagatgggggttggtgtgcttaagtaagaagaaagggggtttgggggtcaaatgtcttttccatctcaataaggctcttctttgtaaatggaattggtgtttcgcaaatgagagagaggccttgtggaatcaagtgattagagggaagtacggggaagaaggagggggatggtgttctcgggaagtgagggaggcgcatggtgttaggctatggaaaggaataaggatggactgggactttgtgggttctaggattttcttccttgtaggtaacgggcggagggtgagattttggagggacaggtggtgcagggattctcctttgtgtgtgtccttcccttccttgattgctttaattgatgataaggcaggatgggtggtggatatttgggaccccttggctaaggggggttggtgggggtggaacccttgtttctcaagagccttcaatgattgagaggtggagaaggcggaaagcttcttggagcaactgcatgggaagagagtgcgcagagatgtggaagacatggtgctttggaccgaaacaaagagtggaaagttctcggtcaaatccctctactatgctctaaaggcgacaacccttattttttttcaagttgtatttggaatgtgtgggtgcagcccaagattagcttctttgcttgggaggctatgtgaggcaaagctttaaccttggatttaattcaaaaagaggatgggccttggaaaatagattttttttttgtgccatgagaaggaagagactatagaccatcttcttcttcatcggacaacaagggtcttatgagatttgctcttttctttgtttggggtgtcatgggtgctgccttctttagttagaaagactctccttagttgacatggttcatttgtgggcaaaaagcgcaagaaggtgtggagagtagctcctctttacatattttggatggtttggaaggtgagaaataaattgacctttaatgatgatgtgctgtcaatctagagactcaaatagttttttgtttttttccctttggtcagaggtcaagttgtttatagctgatcgccctctaactttagttagttttattgattgattgggctctagctaaggttgttttttggcccagctgggtgcttgtttatttgtacttttttggccggtttggcggtgggtgtataggtattgtataccttgagtcgctcttttggcgctctttttaatagatcttttcttacctatcaaaaaaaatgtctagtttattccctgttcgaccaatatgcccatcagaaaaaaaaaggttcaaacaatatatttcagttctcatagctatgcttaagttgaaagcatattcacaattaaatttcgatttaattaggggtatgtcatggttctttttattcgaggatatatggtgtttttttgtcaggattcaggagaattggtgaaattttgaaagtgacgtgggcaaataaggaagttgaactttgtgcagatattgtgacttatatgctcaaagatgctaacatgttagcacaccatagtgtgtttgtcacgctagaagctgtcatgttagtcctatgcatagtgacaaacatattctgatgctcctttccagcttcttgtgtcttttcccgtgcaagatagaggcattctctataaattttgagatgttaatatgatttgttttaacatatgtagcttaacttttgcaacccaaatgggggatagcttatgcttcttccgcattgattccaagtcctttgagttgaggattgattggacaaaggatgggggtgaggttcagatagtagagaaaggcagaggctttcggagatggatcaaagcgaggaggggggtagtggtatggtttctgaaggcgttggaagtatgctgcaattggagggggaagaagccgttcaaggaagatgcgattgaccgagggaggagatacaagatagaaatgcgtcaaaatgaagctggtcgtttccttatgctctctgttctttcagaggatgataggagatacttcatttttattccagagggttttgacctgttgggttgggaattcatgagatgtaagttgaagaagttagctaaaattggtgaggtctctaagaatgaaacagaggcttctcggcctttgggaggagggtatggagggcatgcactttctcttgttagacctgatttaagctatgtgaatgcaactaagagattggcaacaggggaaagaaacaggagtgaagaagtgtggattgaagttggaaatgaggcctatacctcgaagctgaaagatctcagccgttttttggtgggaagatgggatgcggaggatgagaagggacccgaattaagagtggtggagatttgggctaacacccagtggagcttctgtggtaaagtgagggtagctgcattaagagatgcattgttcctttttgaattttccaataggggtgatgctcaaagagtgctacaggaggggagtcgcctgctcaaaggggttcgtttatccctagactggtgggttccaactatggggtgttcaagagtggagtttcagagggatgtttcctgggtgagaatcccagggctgcctcttcagttttggtgcatggagttcttcagaagagtgggggatgcctgtgggggttttgttgatgtggatgaggagaccaaaaagtcttgctacagaaggggtgctagaattttagttaaaaacaatgggaaggaggtgcctggaagattagaggtgatagctggactcgcctcattctctattccgttgtggtgggaggactcggtttggttctcggcacttcagggtgcagatgaaccagtgagcaagacgagtatcgatccatctgaacagggagaaggagggtgtgacccacgttctaaggagcgagtgaatgagatgcactatggaggaggaaatcccgctgctggtgttggcgatagagtgacaggctgggagatccagattcccgaggataaagctgggaaaaaagaagggggaggtcttgtttccctgcaagaggtgaccgggctggtgaaggaggcgcctgacgcagcaaaaggtggggcggctgaagtgattaggaaggacaaaatgaagctttttgaaaaaggtagagctgttgtggcaggaaaggctggaaaggatgggccaagctccaatcgggctgaattggagaaccagctgggagggcctgcctgctctaggttgcccagctcccacagggccaaaaatcctttgaagaaagtggtcttgggccgccttaaaagggaggggagatgggctgggtcatttaagcccaatagttcttgggagcccagcacccacagggcccaaagtctttttaagagaatgggtatgggctgctttaataaggaggggagatgggctgggtcaactaggcccaatagatcaaaagaaggtataaaagggtcagcccaggtatcagtcctagggctcccttcctctgctgctggggagaacaaggaggagctcccgacgctgccaaggtgtaccagggatttctcgatgcaggaggcgtcggcgctgggtcaagatcgaaacgccccgccgtggaagagctgtacatcaggtatgtaccccatctcgactattcttgggggggtctcaggggaatcgtctggcccttcttcttcttctccttctcctcccgagatgggggataccatagggatctcgcagtcaaggcagcttgaggagacgattgaagaccccttggagaccgaactgccgctttgcatgatcctcaaggatggacgttccttctctctgccagataatgaaggggctagttgccaagagggagggataggggcggtatcccctcggtctcaagaaggtgaggtccagacgtcacatcttcagatcattggagtaggagaaaaggaaaacgataaatccccttggataaataagaaattcctaggcttctgcaagtcggtgggggtctcgattgaaggttttgaggaggatattttgagaattctcaaggagattgagaataggagatgcttcatcaggaagtttaatgagaaaaaaagaggcaccttgtcggattcaaggaaggaaagagagctgaagaagctcgtcagtaccattaactatgatggagtggctggaagagagacagaggaaggggagctgagaaggcaaatgaccgtggttccttatgaagcttagagtattgtcctggaatgttagaggcatgcatgacccagataaaaggatggtcatcaagtcgatggtgagaaaacacaagccagatctggtttgtcttcaggagacaaagatgaaggaaatgtctgatagggttgtcaagagtgtgggaattgggaggaatttaggttgggtgtctttagatgcgaggggtgctgcaggtggggtgctagtaatgtgggataaaagagttttggaagggttggagttcgaagtggggtctttttctatctcttgtcgttttagaaattgtgaagagggctttgtgtgggtcttctctgggttatatggtccgagcaaaggaagggagaggagggagttgtgggaggagttagccgcaatcaaggggctgtggaatgatccctggtgcattgcaggggattttaatgtggtgcggttcccagctgaaacgagcaatggaaggcagatgtcaactgcgatgagagagttttcaagctttatcgatgagtttgaactagttgacccacctctggggggtggagctttcacttggataggaggggaaggaggggcccttaaggctcgtttagatcgttttttgttctcaggagactgggaggaacgagtgaccggggcaatgcaatgtcttataactagacctgtttctgaccattgtccaattctgttggactgtggaggggtgagaaaaggtaaaagcccgtttaggtttgagaacatgtggctaagggtggaaggatttacggataaggttaaagagtggtggcagtcttacatttttagggggagtccaagctttgtgatagcgaagaagcttcaggctctgaaacaagacctgaagttgtggaataaagaatcccttggcgatgtgtcagttaagaagaatgcagcctgggagaagttaaaatattgggacaatttagaaagtcttggctctctctctgaggaagataggaggagtcaaggggcagccagagatgaatttaatcactgtgccatcctcgaagaaatctcttggaggcagaagtcaagggtcctttggctgaaggagggagatagcaacaccaagtttttccaccggatggctaatgctaggagaaggggaaactttatcagtagcctaacagttaggggtattaggctgaataaagaggaggagcttaaagaagggattgggtcttactttaagtcaatgtttgaggaccccatagtgagaagaccagaagtggagtctggtctatttaatactcttgattccttggataatgatattttggagaggcaattctcgaacgaggaggtgctcagagctctctctgatctggggggagacaaggcgccagggccggatggctttacactggctttctggaaaacttgctggcctgttgttgggggggaagtgatgcaggtctttgaggagctccactcgcagaatgtgatttttcgaagccataatgcaactttcttagtgctgatcccgaagaaagagggggctagtgatgtgcaggattatagaccaatcagtctagtggggagtctttataaaattattgctaaagttctagcaaatagattgaaaggagtaatgggaaaattggtttcgaatagtcagaatgcttttgtagaagggaggtagattttagacgctgttttggtggctaatgaggcgatagactcaaggaagagaagtgttgggacaggcttagtgtgcaaactggacattgagaaggcttatgaccacgtaaactggaggttcctcatgtcagtcttggagaagatgggttttggtccaaaatggcgtaaatggattttttgttgcatatccactgtgagaatggcagtgttagtgaatggtactcccacagatttcttctcaacgtttaggggcctaaggcaaggtgatccactctcaccttatttgtttgtgctgatcatgcaagcgctcagtagtttaatttcaagagctgaagagaatggttttattaggggcttcaaggcaacgggaagacggggagaaggggtgtcagtctcccacctattgtttgctgatgatactctccttttttgtgaggatgatagggatcagctgattttttggaagtgggttgttatctgctttgaagtagtttcaggtcttaaaattaatttgcagaaaagcgaaattattccaattgggggagtggaagaggtggatagagctgctgcagttttcaggtgtaaagtggggaatctccctacgaattatctaggcctacctcttggagcatcccacaagtcgtgtagagtttgggatggggtagaagaaagattcaagagaaagttggctatgtggaaaaaacaatatctctctaagggaggtcgtcttaccctcataaagagcacactctcaaatctccctatctacttcatgtcgctttttgtcatcccaaggaaagtgagacttagattggaaaaaattcaaagggagttcttgtggggagatatggaggaaagaaggaagatccacttggtgagatgggaggttacttgtaaagatatgaggcatggagggttggggttaaggtatttgaaggatttcaatcatgctttgctcgggaaatggctatggagatttcctatagaaagggagagtttgtggagaaaagtcattgttggtaaatttggggaggtacaaggtgggtggaccactagagaggtgagagagtcttatgggacgggcctttggaaagacattaggaagggctgggaggaattctttctcagaactaggattcatattggaaatgggagacgtaccagattttggtgggacatgtgggtaggagattctaagctaaaggatctcttccctttgctgtttagaattgcagctaataattctgcaatagtggctgatctgtggggaagacaagaaggtggagatgggggttgggaggtgcactttagaagaccctttcaagattgggagttagaggaggtgaaccgctttttgagttacatttctgcagtaagggtgcaagaaggggaggattttctggtttggaaaattgagagaaaaggaacgtttaaggtaaactcttattataggtctttgaaggaagacaatagccctttatttccagtaaaggaggtttggggttcgtatgcccctttaagaactcgtttttttgcttgggaagcagtttggggtaaaatttccactatagatatgctgatgaggaggggttggtctatggctaatagatgcaacctgtgcaaagaaaatgaggaaacggcaaaccacatcctaattcattgtggtaagacaagggatctttggaacttattgttttctttgtttggggtggtgtgggtgctcccggattccgtaagaaatttgcttcttgagtggaaaatgaagggcatggggaagaaaaggagtgtagtttggaaaatggcgcctatttgtctgttttggtgtatttggggagagcgaaatcgaagaaccttcctagaggaagagatgacaaacacgaacttgaggaaactttttcttcggtccctgcttgaatggtctcaacaatttgtggacttggacttggactatctatcttttcggaatttgatgggtgatagggttgttgcttagctaatcctttttagtctttatttttcccttgttgccttgtttttgggccttctttgtatacaacctgtgtacttagggagcgccccctgttttctggcgtttttttaatctattggttctctttgtctatcaaaaaaaaaaaaaaaaaaacatatgtagcttattttatcactgtaagggttatgtactggagttgataattgatttatcatgcattactaattattctcttactctggttgtagatctgcagagcgcttgcgtatatacataattgcat

SEQ ID NO: 10557 - DNA, 6225 bp, Vitis vinifera
  Intron number 4 from transcript GSVIVT01036455001 (locus G SVIVG01036455001) derived from phytozome v7.0 (chr-ID chr1 4; pos 22269261 to 22275485 reverse strand)
tgagagtgtccttcttgctttcgttgctgcttcaagtgagattctctcagtaaataatttacactcctcacaaaaaattcttttttattttttatttttccctccattttggcttgaaactctatacctgtataaaactgtttagaaaattgtagggaattgtcattttcaagtactcactaatcttttttttctccttttccagcctgtcttgagatttagtgtctttagacatcagtttaatgtggataagttgaaggaacaattgcatctggcctcaaagctggagcacaaattcttatgcaccgtattcctattgtatttgtgaagaaatcagaaattttcattcatccgaagtgttccaaccctaggtgatatatagtagtacatttagtagtttgcaggtgcactattccgggctagaaaaataggagcaaattctaacctatctagaatattaaatctctataattcagggattgattctatcctaatttaaatccctaaaaattagggattacttaaccaccaaaatggtctaatttaggttaacaatatttacaattacccgcaatctcgtattatgtgaaattaggttctctcacattccccctcaatatggtgattcccatcttgccaatgatagtttgaaaaatagcactgtttaaacctttggttagcatatatgcaagttgtcctctagtggatataaaaagagtgcaaatcaatccaccatccagtttttcttttatgaagtgtatgtgcttggtacaattgtgttgcactggattatgggcaatattaattgttgatttgttgtcacaatagagtctcataggtccttcccacttaattttcggatcttccaaaattatttggagccataaaagctcacaaacccctagttccattgctctaaattcatcctctacagttgatcgagtgattacattctgcatcttctccatgttacaagattccctctaaagattatctaataaccaaatgtggatctcctattaagtagagaccctacatagtcgtcattagtgtatgcttcaagcattaacctctctccctttttgaacaatatcccttttcctggtgctcccttcaagtgtagtaaaatttgatacattgcttgaagatttctttgggattgtgcataaattggctgacaatgttgactacatatattatgtccgacctggtatgcaggagaaaaattagtctcccaatgagcctttcatacatgcccctgtccatgacagtgtctctatgagcctctctgagtctattattctgttcaatgggtggttctgttggtctacaccttgttttatttctctttcaacagatctaacacatacttttgttgtgatataaaaattccttaatgaaagtgagcaacttcaataccctgaaagtacttcaattttccaagctcttttatcttaaattcctttactaaacattttcttagggcttctcttccttctaaatcatctcctgttactacaatatcatcaacatacactaataggatcttggctccccaaggtagaatgtttaacaaacaatatgtgatctccttggctttgtatgtaccctatcatagctttcacacatctcccaaaccaagttctaggagattgtttcaacccatacaatgcctttttgagcttacttgtcatttttccttttgagtgtgattcaaaatcgggagggacttccatgtaaatttcttcatcaagatcaccatgtagaaaggtgtttttaacatcaaactggtgtaaattccactcatgatgtgcatccaatgacagaagtcttcttattatattcatcttcgcaactggagtaaaagtctcaatatagtcaatcccataggtctaagtatatccctttgccaccgacctaactttgtatctttctagggttcatcagctttgtactttaccataaaaatccatttacacccagttagactcttccttttagcatttgtactaacttccatgtcttgttcttttcaagggcctccatctccactctcacatcatttttccactcctaatgatctaatcccttgaataaatttcttagaatggttatactatttaggaaagtaagaaaggtcttgggtgtgtgacaatttatcatagggcacaaaataggacaaaggatataaaggaaattgagtgccttttctggcgcctttttgaatagcaatgggcagattaccatcattagaactagaattcatttccagatgagattcaaaactactagtgatctcgatactaggagctggttctaactcctggatttgcataggttgatcaatggatcttgtccttatggaataaacctataatggacgagttgtaccttgaacttgttttcctttgctggatttcttgagctaggtgtaccaggcttggatttggaagaatcagaaaggggatggttggtgtcgaagggagaagaaggttgtctatgtttgggtgcatagccgaatgaatgagaatgacttggaagatcaagcaagaagagatctttttccttatcttctataacagatgtctcccactaaagataaagatgagaaaagtaggtttcatttgtaacaaaggtaacattagcagggacataaaattttcttgtggggggataacactagtaaccattttgtgtggaagaatatcccacaaagatacatttaagagctcttggatctagttttcccgattatgaaagtgaatgtggacaaaagaaacacaccctaagactttaggaatgagatggttggtggtgttgaagtcaggaaagaattttgaaaagatttgcataagatttttgaaatcaagaactcaggaagacaatcgatttatgagatgagtagcagttagcactacttctcccaaatagtttttggaacattattgtgaaaaagaaaggccctagtcacggctagatgatggtcatttttcctttcagccaccccactttgttgagatgtgctgatggatgaggactcatggattatatcttccttttgaaagtatgatgacagaatttgattgaaattatctctagcattatctgatctaaatctcttaatttcaacaccgaattgattttattttattttttttatcattttgtgaaaggttgggagaactgaacatatatctgatttatttttccctaggaaagattcatattacatgggtacaatcatctatcaatgaaataaactagtgagcctggaaatattaggaactaatgaaggttcctaaatatcactataaatgagtgaaaaaggaatagatattcttttattactgattagaaaagaaacatgtttatgctttacaagtttaaacatcagagtgaaaattttcaacatcaattgcttcaaataacaatggaacataaacttaagaacgctaaagaaaaaatgaccaagatgatgatgatgaaaccaaactttattcttattggaaatggcatactaaaaaattagagacaaaggtaagtgattctccgtattagtttgcccacttagttcttcaagatagtaaagtcctttttgctccctagcatgtccaatcatctttcccatacccttgtcctgaaaaaaaaaaagggataaaatgttacaatacaattcaaatctttagaaagtttatggattaatacaagattagtgaacaattttggaacatggaggacattttttaggataaaggactggtttatgacatctccttggccaataattgttgtcaatgtagtcaacagtagcaattttcttactactagggcacaggttgtatgtgacaaacttgtgtgaggaatgggtcatatggtcagtggcccttgagtcaattacccatgagaaagaaaagggggtatttaagacactaaatgcaagagaaaaaggatacacacctaagagtgctagtgaacaagtatctgcacccataggtttctctagagttcccaacaatgtttttagcttcccattctcatctcgattgaacacaccttctttatgatcttcctctttgtcttgagggattccttcaccaatggatcgtgtatccgtcatatgggcctatccttgcccactttgatggttgtttctcacattctggtttctgttgggcattgatacagtttgtggccttccatgaagtttgtagcagcaatctctgatgtggtgaggccttttgcagtaggtgtaccacaaggtatctttatttttgcttttatgcttttagagaaatccgattgctcattgcttccaccaaactgttgttgatcaggattagaattcttcatgccttttgagaccatggtcgagctttctgttgacaaggacaaaaccgtaactcctctccttcctccctctactcggattatagcaatagtctcttttagtgaaggtagatcttcctttcccaatacttgaactcaacctagatcaaactttatgtttaatccagtgagagtcataaattcagtctttttctacgagtcttttaaccatagtcgcatcctcattgcccttcagttgaatatacggataatggtccatcccttgctacaagatcttcaggagattggcatactctgtgattgatcaactcccttgattggtggttgagatcttagttttgatctcatagatatgtgcagcatcacaaacctttgagtaggtttgttgaactgcctcccaaatctccttcaggtgtcacttattctaggtaacatagaattccatacccaagacattaccatggaatccttggatcatacttcggtctagttcccagaagatgactcaggttatccttcccttttagaaaggtttgaacagcttgagaccacttcaagtagtttttcttatttagcccatatgctacctgaacatttctgcaactctcctgttgatgatgagtttgtgttttctgccactgttagtttgggattggatttttcaacgatttctgacattataactcttggttttggatatatatcaggtaaccaaaccaaaggtataaactgggcttggttttggatagatatcaggtaaccaaaccaaaagtataaactgggctttaaatagaactgctaaaatgaaaggacaacagtaagaaggcaaataaaaagttcagcaacattgacagagaaggctgagaaagaagcttgaaggacaaagacacaaggccaaaaaaataaaaaaaagggagttcccagtgagcctagtgctctaataccatgtgaagaaatcaaaatttttcattcatctgactttttccaaccctaggcaatatatagcacatttggtattttacaggtgcacgatttaggctagaaaatgggagcagattcttccctatctagaatattaattccctataatttagggcttgattctatcctaacttgaatccctaaaaggattacttcaccatcgaaatgacctaatctaggttaacaatatttacaattacacacaatctcctatatgtgaacattgggttttctcacaatatcacatttatttgtcaaggaaccaccagaaatgataactctagactctctaattgaatgatttttgttacattttgtaaaaaatcttccaccgtccaattgaaaccggtctggtcatccttttttaaattatagacatcttagatatgagccctttatttttgggtcccaatctttttttcgctaggtatgtggaattgtagactaaagtggagttcatgtagaggtcccctgcaccactaaagatgttcccaagttgactaccatcaaatggtagtctgaaaacttatttatgtacttttcagcttgaatcggactgtagatgctgtcttcttgctcacctgatatgatgcttggtatttatgcataagtcgatactcccctgtcaagtaaacttactaaaattccggaaatgaacacttaatacaggtcctttttttctgagtcattctagagacctgatgaaattgaatttcttcttcaaggttaaagattttatttgtcatcttctttaaaattttagtgagctcttaagtataactccaagagaggaaatttctcatgttttatgttgctaatgcattttaacctctactaatctcaaaactgaaaatttcactttttcctatttgatgcagagattggcaatccgctgcc

SEQ ID NO: 10558 - DNA, 13016 bp, Vitis vinifera
  Intron number 3 from transcript GSVIVT01030692001 (locus G SVIVG01030692001) derived from phytozome v7.0 (chr-ID chr1 4; pos 13643020 to 13656035 reverse strand)
aaattgaaggttggaagaacttatggctgtccttacttgttagaaagaatttctctctttaattgtctttcaattctatctctccattaactagtctaatgtctgtgtactcatggatgagaaaggctgggacagcatgagctgatctaattgagaaatacctatctcaaacatcaatatgatcaacaaataaggattgaaataaagctcagggagcaatgtgactgtttgcttagattgttccattgtcttctatactatatcttttaggttgggcattttgtacgctagaatattgtcaacctgtgttaactgtagcatgcctttagtagcatgcctttagtgtacgatgattagagtgattgatgaaagagcatccaagcacatgcagagaccaagtgggttcattatttaatttgacttggttaggatggctaattagcttgaaattttactctctattcaagctttgattatttattttacttcttataaacttttcttaggattgaatgctttagtggttatatgagttgtgtaaactcttgaagtagcgtaaactcttgaagtagtgttaagggctagggttatactgtttcaaggttaatccacattgagattgtataaatcagcctagtataaagatttttaagagttgtaataacttcttttaatttgagtagaagtaagggaacatgtgatatggtgtttgtaatgtcacatttatgttagtaaattgctcaaaaatatcttgagaacctatctcaatttagaataaactatgaaaatggaaaaatacaatcaaaacattactactatggtagggttccatgtttgagtcgcaataggaacaagagaaataaagccctgtataaattgttatgtctactatggtcccttaaattagacaaataacatgaataacgtaaaagaatcataaaaaagagttttcaatgccttgtttgagctgaaatagtaaatctttttccaacctctgattgtctttctcttttagaagccaaaataatatatatggactattatatgcaacataaagaaaatcatgaacattagtttcaaaaaaaaaaaaaaaaaaaaaaaatgaaagatgaaatgtgataaaccttgttatcttttgctcctagcatgcaacataagattgatcatttttttagagaagctgtgagagggagaaattttttgtgagagcagtggaacagtaaagtagtatcaagtggttgagaaaaggaatgaacattacaagattaaggaagagaaggacagggtctcgagagattttaggatggtagtttatctgttttaaactttgcctgacaaatttccctaagatatgaggtttctgaagaaatttgcaaatgttggataacccctaaggttgttaattacaacagaaaataacaatggatcagtgctgcatgtttttaggtgttaaagtggggaatgagacatctgggttatatcaacaacaaacaaagttaaacttgagaagaaaaaagagaataaagagataagaaaaccttggagtttcataaaggccttttctaaatgtgatatatccttcttttttgttattcattttgccactcttgtacttgttgtcaaacattttgcagaaaatttcatttcttatatttccatagcaactcttcacaaaatatggtgcacattgaacaccttgtatgagtaatacataaatatgtagtgcacacctagatgtcttaaagattaaagattttgaacaccttgttttatgttgttataaagtaagtgccttattcatgtttttacttatttattcaccttaaaaaatgggttcatcaagtcaaattaaggaattctttgatgattacataataataataatagtgtaattggaggctttagagagaagaaaacctccctagtgatagatcgaaccaaaccatcatcatccacagtaggcatgtcatggttctctatgccggagaaggagccccaatagatcaactcttgcattgggtacttgtagcaatcatcaacaaaatcagtaacgttttggccaatggaaacaatgacggctacaacatgttcacaagggattcccaacatttcccaacccctacatgtgcatgtacggttcataatgtctacattcaacaaggccctcctgatacataccccaaatacgccattcatgaatggagtcaccagatacatctgatcatttgcaatattttgcaacatcttatcttcaatttttgggcctatagacagtttccacttgttggactcttctttatgctttacaagcatagaacctaacttggacatgtgctccaataaaaagttacaaatggagtgatgtctttcattccttaaccaagcattaaacgactcggcaaggttagtggtcattttatcctattttttttttttttgggaattttaacatggcccaatggtgaggcgcattttcttcaacccatgtggctaaaacattgttgtatttttttttaattcaaacatggaaacattataatcatgttctaaccgtgcatacgcaatactatctaggaattgaaatgcattttctttacccttgttctctcttgtgttatggttggacaagaaactactataattctccttcaagtgatggtagcaataggcatggttttcaaggccaaacacctcaggaacactatgaaggagagcaagatgtctatatgagataataataacttccttgtttccgacaactatcttcaagttttccaaaaatcataaccaatcttcataattttttgagctcagcactccaaaggctaaggggaacatggagtcattagcatcgtagacggtgactgaaaatagcgcaccaccatatgacccactcatatgggccaaatcaattgcaatgatcggtcgacaccccattagaaacccttggataaatattgaatgagcaacaaaaagttgctcaaagtggccatcatcagagtaactcaactcaacgattgatcctggatttgttgcaaccattctttcacacatccatgacaacaatttgtaataatttttaggtagtccataaatgcgctccttagccttctccttcatttgccatgcttgaaggtaagtcaactggatgccatgttgcctcataaagtccttacaaatttgtcatggttggtattcgggagtagaccaaatgacatcatcaatgaccaaaaaggcacgagtggatctcattaaaggttgagacaaggcaacatcttccaaactatggttgtgcacatttcgaaaagtgtgaacttgaacaatgttggaatcctttattgcatgagcagtgatttttcaaggacaattttgaattgtgcatactacggtcatgtgttttgaactattcattttgtaagaatattggaatttgctagccaaatacatcaaatagattgcatcccgaaacttcgaggcatttcggaaggtatgtccactacctataattgaatgttggaactggcttggttgaagttgaagaacatttgtttcagcacatctttgggaaaacccaaatgacgcaattgtaggcgagtcattagacatgtgcaatggtggctcgccaatggaggaaacatgtgccaaattggaagcaacaataggtgttggggcactatgaaaaagacatggaaagaaattgctcatccatctccgtaggtgtgaaaagtgattatacaaaggaaaaatgattgtgggaagacaatagatacctagtaggggcaattacgccatcaccaacttcagtacattggcagacatagacacgataaaacatgtcattgaatttgaatatcttgaatatgtttgcatcatcatgcaatgagagtagacatgatgggtcaaactttactgtgaattccaatttaattgaattgggctccaagttcagttcaccacttacttttgaaacaaattcaaaatgtgagatattcttgctaacgacaatgcaattggtctgaccacccttatattcgatagacccaacaacagtcttagcaagctcgccaccttcatgaatgtaacaagacatctcatcttccatttccttaatcacataaagatttgttaaaataatttaacaacgaaagattaaggaattgtgtatattgattgcatttacttgtatgtaggaaatatataagcttggcatacggactattgaagcttccaacaaggaactacctaattaaggtttagacatgaacattggatgatgcacacaagtagtgtgcaagtgcaactacggtagtacctaaggatcactaagttagtacctaaagattactaaggttgtacctaaggttaattaagatgtacctaaggtacagtcactagtatatgtaaggggaaccaactaagtagagtaatcaaacacttagtgccatgatcagttgtatgtggaagtgaatacattttaagttatgcatggattgaaaacaacttatgggtcctatttttgaaaaattgactcccttgggttaaaaaataagataaattatattcacaaaagaagtatcttaatattcaaaaatgttgtttcgagtcgtcacacaggtagtacccaaggtgggctaaggtagtgcctaatgttgactaaggcagcacctaaggtcaattaaggtcatactttcaacaagatttagctagtacataaggttcacttagcaatagaacaaggttaaccaactgatcaccaaaataaaacacgatgtgctaaggtagtacttaatagtttggtcagttctatgcgcaattgagtatgttttatggacgtaccccatgcaatgccacttattggttatatccttgccaaacggactacgtaacattgagaaaggaattacctaatgttaaggaatgaagtaactaaggcttatttatgttctaatattatgatggacatgtgaaacttacagtgtcaagtacattgagtgtctaaataatataggaaaatggtacgtacaagtgtaatatttaaacatagggatgacaaataaatgtttaggttcccatgtgtttataacaaaatccatgtccaaagcatgccaaagctagtttcataatgtgtactaattaataatgtttgttaaagaagaagtaccaatggacgtgtaccaaggaaccatactataggctgaaatgcctttagttcacaacttcaaatggatttggaacaagatcacctacataaaggaagtaagggagaagtcaaattgtatttatgtatatgaagatgaacaaaaatttggttcaatcacaactatatacagatttctaaattgaacatagaaaggttaataacaatgcaaagtagatgcccttaactagatttttttgccatcattgattaagaaccaagtgaaaatggtgaaatcacaaaatacctatgtaaggaccttgtaagggcaccaatataactacctaacaatagtattacagtgtaggccataaatagtaaagatgatagtgtgccataaagtattgatgtacttaagaagcctccataatagcttttgtaatagggctctattcttcaaggaacctccataaatactaaagatgagcagtgcatattcatttggttatccataaatcgttaacccaaaaaccatattcaatgacaacaacatggaataccacttcaaagctttccatttctggaacttaaagtttgtggaacctcatatcattcacacaaatgatttcgaacaatgaatcatgaagagactatgaattccaatgtttcatattcaagaattccgaatcataatttcaataaacctaattacaatcggtataaaatcagtatgaatgcacattagttacataatttataaatgacatagtcaatcatcacagactcattttgccgtttagttctgactctataatttaactgaaatgaaaatatgtaataaattttttaattgaaatcaagatcataaatggatgaaatgtgttattatgagctatagcaggtcctattacagaaagactggtttagagtaaatacatacttgttactgcctttattatcccacaccaaatgtttcaaacaaaaaactttcaatttaataattttcatgacatgtaaacattttcaaaatgacaagttcactaaacatgtaatgtataataaaatcaacaacatttagacaaaaagtacataacaaataagcattacagcaaactaaaaacataaatcatctaaaacaactttttgatttctgaaagaacaacaatagcgaaatgaataaatcctaagcctcaacttttgccttttctgtatcaaccacatagcattgagtaaactctactatttaaaattgaatttgatcattgaagttcttagtgaaccctctcatagatccaaaacccaaattagcatttaattccaatttgctaatgtagaagcaaagaacttattatgtaagtatcttaccattgtttgaagtttttgttgtgcaagcttcaaacccaatgttctctttttggtaggtgttgtgggttttaccaaaagtcccgaaggatgaggttatcctatgaagtttaataataatttgtttctttttctaggtagggtttgacgaatttgagggaaagataggtgagatgaatgaggaaatcctgtgtgtttggccattggagagtagaaaataaagcaaaagaataaatacgagaggtcatggaaaaaaatagacaatacaaaacaaaagggctatgtaataagaatcaataaaacatagacatccacttcctcattctcgattgtctatattttgctcattgtcattatattttttctggtttctatgccttgttttgcctcttcatgattttcctgatttgcctattgtggtcatagcttattctctgaatatcattcctttcagtctcttcaatattttttattgttgtatttcagcttgttgtgtgtttgtgtgttgtgtatgtggtttttcgcagttgtacagtttcaactttaaactacctttcaggagatgtgcaaagaaaatactgaaatgaagcgaatagaaaactccataactcacaaattcaccttttctaagtggagaaattgcatcttgaagaaggcctttgagctctctatgctatatgatgctgatgttgccctcatcattttctctcgaagatggaagctctatgaatgttacaatgatccatgtacaccactattgggaacctcatgaggggaatatcatcagtggatgattatctcaccatgataggaacatcacgtgtcttctatagaattcccatcaccttcaccaaatgtcccaaaaaaacaccattacatgcccacagcaaacatggtgatgaccaaacattctagatgatccacgtgtgaggggcgtgcatgcatttggagttggtgagggttgtcacatgagcaggtggtgctagagatcacgcatttttagagcctctatggaaggctctagtgggggggttatggactcttctcggtgtggacagatcatgcattggaggagaattctagaagctcaaaatttcgcagctatagggaaatgagtaaacgccttttcctggaaaaatgtcaaacttgacaacttggcgtatatgtgccaccatcggcttctcatccctttctaggttccagatcactgacacaaagaaaatgagaaatgggcgtagctgtaggcatggatgcgctaagtaagagagcaacaatgatgagagagtcagtgtagaagagccaaaccatcagcgacaacatcgtctccattctcggctccttcgaccaccgtctctttgccctcgaaactgccatgcgctccactcagattagaacgcattctattcgaagagctcatgagagacaaaacctaatcgaagagacaaatcgtattttggctgagatccaatctgatggcgatccctcctatctcgatgaccctgcggagtctgagatcaatcccaacgtcacctacactcttagcctcaaaattacgaattggaatgaggaacaaaagaacaagattgattattgcaggattcatggaattgagatcatgtacaatatggctcatcttgataaggaactcacttcttattgggcaaaactgtcattgattcggcggttaatgttataacatcccgaagtggagtggacagtggtgcgttgtttacagatatggtttttgagattcctctatccaagaatgataattttaatttggttgtacatgggtaccctgatttgatgtttaatcagaaatcttagattgctttgaatacgggtagcttttttgtttcggaactgtcagtggtcattggatttttttggtgcctgggcgccaatgggaccaaagggtacgataagagatgaggtagggaagattttgacagcgtttttagaagggagattaggggttgcaatgattcgtgcccaattggtgtctcagctgattcgtgtccagctggtgctccttgattgagggagtaatcaacaaaatttataacctattacaccatatactagggtagcaaagaaaaagctactatagtataacgactctaggatcgttcactgggaagggtttccaaattacaaatgataccaattcaaagtgaattggtgccttttcatttcaaggttagctcaagaaataaaacaaaaactttgattggtaaagatttagatttaaaatgactacaaagcaagtgatggaaattacttaggaagaaaaacattccttggagggtcaggttcactggggaggttcctcatgcaaaagacatagctcaggtcagttggttcatttcatcgcatgagagaatcaacatatagtcaattctctaaccggtgttgtacagatacatcctttaattagatttcagctttaattctctcactgatgcaacttgcaacggttcgagcctctcactaagccttaaccattcaaggtgatctttaaccttggacttcctttctcaagctcgcaagagataactaatggatgtctccttggagtccaaaagcttaccaagtgttggcaattccagaaaatcctaccttcaaatcacctctcaaaggctcgcaaggggtaaactagtgcatctccatggttggagatcacttgccttaccaagtgttggcccgggtgactccaaggcgttttaagttaactaaaatcatagaaatcactaaaggatttcacttcctcttcattcatggctgaaaccactaagctttgcattcttgcacttggaacctttcccggcaaccttagctccaatgaattaaaggtttagttactcattctctggggaaacttcctcagagagtgcataacttagaaaaaaaaaatgaaaaatacaaagtgagaaggtaaggcaaaacaaaggtcctaaattttacttgctttcaaacttttacataaagggttcctctctgagaacaggctctcgagagctatttatatcaacaaaaacaaaaactaattattacatggatatttactctttttactaacttaaaagctaaggaatcttataattggtggctttcaaggagaattttgggatttagacaacaaaaatctgatgaaaaatatctcccaatgtcggtagcaaatatcgggaagcactagggaccatttcgcaagtgaaaatgatgtctgcgagatttcgcagaggcacaaaaagggctaggaaatcacttcgtagcaaacggctgatttcgcaatgctgcgaagtggtctttcaacttgtggtattcggcttccatcgtaacgggaaactacaggggggaatcacagcactgtacaaaaaggctgcgaaatcatctcgcaacaaaagggtgatttcgcagcgctgtgcaaaattcttcctttagcttggagtgatcggcttgcaatggatgtaactccttcattggagtgatcggcttgcaatggatgaaacttaccattggagtttaaagaaagtgagactctccttggaaggtatcaagggcacatgattccatgaggagaaaaaccatctgacgcatacaagaacagggtgactcacatataaggggaccacgacatttttctgggcagcgggggatccatcaagcattcactcgacaagcaagagaaacacatcaggtaaacaaccttggaatgaataaaagactcaagactcttcaattaagaaaagggacctcgaacctattaatgttctaatgaatgacaacaatgtgaaacctttggcaaaaagttaattgattatcttgaagtaagcgatctaaaattcaaggatttcactaaaaagtagaactgtgagcagaaatccagctacagctaaaggtgatggcatcaaaagtccaactagaaacatcagaagaatatccaatgaaagatattattgatatggttgctcgattgcctcaaaccctatgaagacagggcacatatgcagttgctactctagcgggagatgttccttatagtgaagaagtttggaaaagccttctcgtgactgtgtgaactagtaaggatgatgctgaaactgattcttcctcaggatttgaaaatgattcttatgaagaattgctcgcaccactgtcccaaaccgaaactgccttattagagcactaaattctatttagaaaatctgtttgtcatattcttaagaaagtgattgggtcatttaagtgatgcttggaatcaaatattatcttttcattcctcactgttgaaggtcggaattcacaatacccatggtgcagtctcaatcccaccccgaacctcactccagcatcgactacctcggagcatactttctttcttccatggtctttcttttcttttctttgtgatcttactagttttgattcaagtcttcaaaatatttttcaccataataattttcaattttcaaatttcatcctcaaatatctaggcataaaatccaagttttaataaatttgttgtcattttccttttagcatgcattttcaccattttctttaattttcaactttttttttcttgatttttctcagtttttagcaaacatgaacaaaattcatgattccaaataatggaattcatagaatcaactcatgcaaaattaattagggttttggagggggcctgacattcatgatattctctttgatattgcttatttgatatctgattgattgtgcttcctctttgtggtacatgagattattttgaatctattattgggctaaccttgtttcccatagaggcatattagcttgctatccaggtacgctctctctctcccgcactcactttcaaaaattctataaacatgtatgctattgaagatcatatccctgtttaatgtaatccttgggtgcttagatatatgtttgacttgcttggataaaatgcatgttgtgtactatatttctacattaactttgatgttttatgatagcgcttgagaagaagtccaggtacacactttgactctctttttataatcatgatttgatttttcttacttgacatgtcaattctgaaatcaccttagtctacctaggtatcttcaatcaattaattaattaccacattcccctcaactaagtcattagagacctctgtaaggttcagaggagtgctaccttttagagttacattcctaataggtaacctgatcactggacctagacttgggtttttcaaagacacgcttttccaaaaactatggagtcccttctttagggttttatttcttattttatttcccttttaaaataaaataaaataagtggcgactctgaattttccaaaaataaattttcaccaataaaaatgagtctcgccattaagtggggacgcacgtgaaaaatatgggtccacagttagaatttgtaaattttagttttggttaactttgaatgatcgtggaaagttagattttttttaaaaaaaaattagttttgaattttgaattatagtggagaaataaaaaatggtaaattttagttttggttaattttggatgatagtgggaaaatgggaatttgaaaattttagttttaggttgacataaaataatttttcaaaaatgtcaattagtaaaaaatcataaaaaaaaaaaatgtcataaactcacaataaattgaataataaaaaagatataaacttcataataataaaattaattatttttcattgttaatagttctaatttagttcatttttctcataaaatttagctctctctcatggttttatcaaataattttcaacattattgttattgtcacaaagatcctcctagaaatataataatatccaattgctatattatgctccccatttgtgttaatatcacccatccctctacttcttcatataccagttgtagtggtatcttttatttatttatttatcaataattaaatatatatatataaaagatcaaccactaagagtgtcaataattcccttattctactcaaactctttttaccttctattttaaaagttacccaaaagttaaataaacctttattttgaaaaaggtttaatcaagttgatactcaatataaaattcatgaaatctatataaaaaatgcacaaaagcataaataatagaacctattaaaactcattgaatattgagacttaagcctcttataaaatatataccaaaagcccataaggtcgaaaccctttgggtatttgaggcttgggcctcaaccaccttgaggttgtagcctcaaagctaaaacccttgacaagatgaggcttgagcttcaattaccttaattgaggctataacctcaaggctaatttgtagagcctctcctgaggtgagccttgaggtgcaagcctcaaaagccttttaaaacatggctttgtttatctaatcataactatatttgcagtatcttaatgttttatgcatatttatttcaagagagtcaggccattgcatcctaa

SEQ ID NO: 10559 - DNA, 4383 bp, Vitis vinifera
  Intron number 1 from transcript GSVIVT01022968001 (locus G SVIVG01022968001) derived from phytozome v7.0 (chr-ID chr1 2; pos 17430187 to 17434569 reverse strand)
caaaagattcgattaagctcggtggtgagtctcttttgcccttgttttgccatcctctagagggtgttattttgtgtgattaggggttttgagtaagtgggcgtgtggtgtttgggcttttctgatgtttttggttcatgggtgtgtgtcatttcatatctgcaattagggttttgtcaggttttgagtagatgggcatgttgtgtttcatcatgttgttgctttggttgtggtttttctgatattttgagcaaatagatatgtgtacatatgtgtaattcaccttcttattagcattttgtgatgttttgagcagatgggcatggttttttttttcttttcaaatcttgatttaggttcatagtggttgagttcttatttgatgctctgtaagcaatatttttacccatttattctttgtttttatgggtctatgacctatcctaaggaagaagaaatattatttaggatttttcatctgtttaaggattctggcttaggcatcttccaggtgttgcaaactaagagtcctctttattttagtttctgtatctgattttttgattgatggatctgtgtcttgttaggattgaatttaggaaggacaacatcaatgggattaggattagatgcagaatatgttctctttggccaattttcagtatttcatcaacagcactagattttgatgagggcttgcatggttgcaattgaatgtggagatgatcatgattaactgatcttatattaattgatggccattgcccttatcaggaaaaaaaaaaaaaaaaaaaaaatgttgatggccattgccatcttgtgttcttcagtgcactgtttctgtggtgtttgtttataaaattgtattatttgcttaccaaagaaaaataaattgatggccattgttgaaattgcttgtttgtgaatgtagatgcattagttggtaagtagatgccatgtaactgaccaacttggtgacctttctatatcaataaagtgaagtattgattactgaagttttggtcattagtccatagcttctttcatttccttttttgtgagtaaataaaatccattagcagtgccaaaagatgggaccaaccacaactcaagtacatgccaaagatataaagctctgccaaggaaatgaaggaaaccaatgaagctacagaacacaaatgcctgataaatcctgcagggaattcccatttaatatttgagagcctgacatccagtagtacaacgaaggcctcctttcagagaaccataattaaacgtaggctggatgccttccaaaagtttcctcattttgttcaagaggttaccagaccaccctttccattgatgttgttgggaaaacctaagacattcccaccaaaaaaaggaaaaagtaccaaatctctgaattcatcttgaatgaactaggagacgaaagactatctcctctttttttttttttgcacattagcaccaatgggtagagctaagatgcacatattccccttcccgcactgtgactactgaattgttagtggttaagaactttcctgttgccgtgtccatctgaaaaaagaaacattcaagagaactcccaccacacagaatatcctccaagggaaactctcccgctctcctcattttataatcatggtagcatttcaagaaaagctgccattcataactttttcctcgttatgttgtccactctcctctcctcagccttacctcatacaaatacccaaaaacacatcaattttttccaatctcaatcttgaaatggacactatgggaatgcatgtagaaataaaagattcaaaagaggtcttatatatggaacctataactatctcgaggtctcacagttgttgaactagttaaaacccaaaccaagagagattttgttaagccaaatccaccataatcctaaaaggtaacttgctatgttagactaccagtgatggtgatggtggtgtttaagactatttgataggtccatgagacaaagatggatttgggaagaaagaaaataatttcattgaaaatgatcataaaggcaaatatttaggtgttgtttggatacgtttcttgttttctatttttaaaaacaaggaataatagtagttcttatatgaaatgcaagacgtctaaaaaatttatctcaaagataatggtttctaaaaactattttaaaaattgaggtataagaaaatttttactatctcaaatttaaaaaaattttaaagtaatttttaagaacataaagtaagttcatacttttttgtctaagacttcttacattttatatttttttttttttgataagtaaaggaagtatattaaacaaaaagaggaaacaccaaaaaccggtgccctctaagtgacttcttacattttatatgaaaattactactattttttttattgtttttttgtttttacaaacaaaaaaatagtaggtgtatccaaatgagaacttaatttccttattatgaattttatggttttcttattattattttttttgtgtgattttgttagtaatttcttattttggagagttttcttttttactatatatatttgtctttaaattgaggtttacatgttgttccgctattaagcttatgccttgacccattcggaaaaaatgcctcaacaccacctttagccctttgaaatattgaatcaatgatgaaggactctctttccatcataatagcataataatttgcaaattagtaatttgaattaccacatgatgcataaatgcctttatcttgtaaaaaggtgatggagaatttcatcatatatcttattgaaatgactgggaaagttcattccaagaaagtattagtaattggtccacatacatgcataatgatcaatgcatattattttatattagcttggaactagagtaaacacattgattaacaaatttcctgaccaataacttgttcaagcgaattgtatgcccctatgggaaatgccaagttcacaaactcatcattaacaccattcctaactcccaacttagagttaaacccaaaagaaaaaaaaccctaataaataaagtagaagagaatttttttttttgatagacaaataaagtaaaagggaaacgtaacatgaaagtgttttggcacatttgaatttttgtttgcaagtcgtagaaacatttcacttatttagtcaaatacttctctctattcctttcattttcacccctgcttcacaacatttggttgcacaaaacaatgccacatttgcatcatagccaagtccatcatagaaaaatcgtcatgcagacttcatcaaacctgaataagtcagcgaaatcaagggcccagatcagccatgatcctgacagatgcccttctctgacaccaccctttccaccacaaaaacgtaagagaataggactcctttgcactgtacacttggggtttcagttttagacagagaaagtagagagagaaattttgagttacagaggctctgcaaatggggaagattccagtacagcagtgccagcatctgcagaatgaggatgaggccttgcgcttcttctgccatagatgtttggtaggtaccattcagatttgtcaggggtttgatctcaagtgcaccatcattttggtgttgagcctctccatctttgtcttcgcgtttttctgggcccttcctctccaccctgtcaaaactgggtttgatgcaaaagatgcgattaagcttggtgctgtgtctcttctgcgcttgttttttcatgcttcatttattattattattattttattttattgtgtaattagggattttgagtaagtgggtgtgtggtgtttggggttttcagctgtttttggtagagcatatgtgccatttcatttatgcaattagggttttgtgatgttttgagtatatgggtatttctgtttcatctttttattgttttgattgtggtctatgtgcatgtgtggtgtaattcaccttctaattaggattttctaatgttttgagcagatgggcatgggttttttaaaatcttgttctgggtttatggtggttgagttcttttaattctctatgaataatatttttatccgtttattgtttgattttttgaatggtgggtctatgatcaatcccaaggaagaagaaaatttatttatgtatgtttatctgtttaaggatttggattgggtattttttgggtgttcctaaactaagagtcctctcaattttcgtttctgtatttaatttagtgtgaatctgcgtcttatatggcttcgatataggaaggtttacataaatggggaaaatttgagatatgttctctttacgcaaattttcagtattggagcagtggatttggaggggacttgc

SEQ ID NO: 10560 - DNA, 800 bp, Vitis vinifera
  Intron number 2 from transcript GSVIVT01038105001 (locus G SVIVG01038105001) derived from phytozome v7.0 (chr-ID chr5 ; pos 23522924 to 23523723)
ctccctatccagaaaatcattctttcagtcatcaggtaattcttctaatctttgaatttcattatctgggtgttgttttcttcgtaattttgcctctttttctctcatcatttttccacctttggctgtgatttttcatataaattcccatatatcattatggttgttgagattgttttggaggttttattctttgggttttactagggttctgtgatctgttttttttttgtagattcttgattattcattgtttcagaacatggatcttcttgaatcttgatttactctcaagtgtttttctttcctctttttttcgggtggggtgtttagtacttgaattattgtttgcttcaacatgtgtgtcattttttacttggtgaatttcccttcttatcctgtttggttgcctagaaaatgggaagataagaaaggaaattcagtccctttgcaactatttgccttggttgttattttatttattcttggttggatttgattgcattaacaggcataaattcatgatcttttatgttaaattcaacaataagattctttgtatatgaactcattcaagtacatcaagctgtcatacatggaattctatcacattttttggatttcatgtatttaaacgaaactcttagcagtacaaatttacatttttgaggtttgagattatcactggctctatgaaaatctttgatgaaaacccaaaagaattcttaccttttattaatgttctgggaagcccctgcatttatgatttgtttgtaattaaaattcatctgcaggttatt

SEQ ID NO: 10561 - DNA, 4207 bp, Vitis vinifera
  Intron number 3 from transcript GSVIVT01030979001 (locus G SVIVG01030979001) derived from phytozome v7.0 (chr-ID chr1 4; pos 20197632 to 20201838)
aagaggtggatgcttctctctttctttctctctctctctctctctctctctctctctctctctctctctctcacacacacacacacacacacaaaattttactagaacttctcactatctctaaaagttttactataatttcttcctaactcatagatgaagctggttcagtgttcatattattattattattgtcactattattagtttgtttttagatttttatcaaggcatgcccatatttaaagacccaaatccagtcatttgttttaaaagcaaatgagcatttccgtcataatcagaagatgtgaataaatgtcatttctaggatcaagcaagaagaagacacttgaaaaaaagaaggatatggtaaagaaaaagccttaaagtggtcttttcttaggaggaaaaatctgaaattaaatttattaaagtactggttgtaaaagaaaggggccagatggacattttacatagaaaggattgccctttacatgcattttttagagttggaaagggctttctggtgtgtgtgtgaaaggaaaacagtccttttccaccactgctgagtggaatcctttgtcagaaggttgggttaaactgaagattaatggttgcttcttaggaaatctggtctagagtggaataagaggcatctttagtagttattctttttttagtcagattatgcattttgagatataactgaccttctatgtacattccattgcaagtcaatgaaagaaaagtagatgccccttcatttttcaattaaaaataaaaataaaaatcctgcaatcagattctgtaaaaggaggatgagttgattctgttttcctgattcacctactctcaatattcaacataaagaagcatgaagcatcattctaacagtcctgtgaaggggaatgaaagagtggtatttggaggggattttgggactatacacatttttgaaaggatccatggtagaggttgatcataatgtggtgaggtatcattatgagaggtggttttgtttgcatgttaacttgcaataggatgggatttttgaggaaaaggtggatttcaggactgaggtgagagtggcgtgcaaagagatagtagatttttaaaaatttgttagagaaagaaatttagtgttctgtatcttaagaaagggaataggaatgccaaactttttcataaagccaccaatgcctgcgaaaagtctaatcatatttgcaggatcatgattgatggcatttggttctcaaggtcaacggtggcttcctgttttgtatatttgtataataactaagggggttagaagacctggcactgagcagttaacgttgtattcatctatgaggaggatggggaggggttaaagagggcttttgacagtgagagtggaagtcatagggttctttagagattttctagagttgggcttgtttgagaagagattgaatgctaattttttagtgttgatcttcaaaggaggtgtgatggaggacattaaagactttcttagtgttgctgactaagactttgaagtaggtggtggtgagccttgtattgaaataacatatttcaactttcaaggatagacaaattcttgatatcttcctaatcctaaatgaagctatggttccaaattaaaagctccaaggcaggtctggttcacaaattggatattggaaagacctatgaccatgtttcttctggatttcttgctttgttggcaaagattgttttttgtccaggggatttcttggatcaaattttatttatccattcttagattttcaatgttgcaaaatagtatttatctatggttcctttttaaagttctaggagcttgagacaagggatcaactctcttcttacttagttgttttggttttggaggagctaagcttttctttaatcccaaggtagtggaagttggtctttccatggtttcatgttggggatggagttgagacagggtttgaagtgcatagttgttatttgcagataagacttttgttccatgatgcagatggagatgagttttgtgccttgggtgtgttttgtttgtgcattgagcccgtgtcaagttgtggctcaacctggacaagagtaaaacttttctggtagattatgtagtcaatgcaaagcctttggaggtatgcttaggtataaggtggggaagcttctatctagctatataggattacctttgggtgcttctttcaaatccatactggtttatgatttgatggtggagtatttcaaggtgaggcttcacttgtggaaaatgcagtttcttgttcagattttcagcttcttttattctgatttcagctcgtaaccatttgggaatgtttcagcaagattccctaaggagaaggtgtatgctttgtactcctgtgaaggttggggcctaggtatttatattttcttatttttaataaatccatgttagacaggtggctctgcaggtttgtgattgtaagtgatcgtgaaaaatttaggggagttggaagtgggatggtgtttgtgggtggctagttttgatggtttctgggccttagcatgccatgtggaaagtttgaggtatcttccttggtttcacctgtatctcagtgaggaatgggtggagggccaaatttgtggcaggactagggccacttatcgttgtctgtacacaggacaatctgtcagttaattcccatatcctcctacattgtgaggtggctagtttcctgtggactgcctttcttgttttttggcatcacatcagtagtgctttcctgtgtgagggatgctctggtttgctagtgtggcagttctgtaggcaaaagtataggaaagtttggaatttggtgctgctgagcaagtcctggtgcatgtgggagaaacataataggaagctttttggggagaggtggggaggagattttagttgttaagagtaaaagacttttaagtccctcttttcttgggttaaggggggaggtttatccttctttctttctttagaaatcctagtgctggcatgattttctttcattttttggtgtcttattgtattacccctgtgtattagtgtttgctcccttattggcacttcttttactaagttcttaattaaaagaatgcagtttcattgacaattttagactgttaaagcaattaaatttccagtcttgacttgtcttttcgaaaaagtaattttaaaaccttctgatacttgatgggttggagaaagttgtgatcttttgaaagataagacttctaataagactgcttttctatgggcttcacatgaaatggggcgattatgtaagccctcacccattctgattgactggttctgtgacttctgtcaactgcttgggttgaatgagttatgatgaaatggtcagttttcctagaagaaccattataggggttagcttggatcagaaaagctgaccagttaaccatcaagtgtcatgtccagtttaagaacagtgctctcatttaatgtttctgtgcacatggagaggagataacttctttcttattaagccccttgcattttttgtaatttcttttccttgtctcacctgtttaaatgagtgttaaaagcatttgcaactgttgactgtaaaaggtcatgccactgtttatgcgtcattccactaactcaaacccagacagagtatgattcaaagatataaaataaatttatataaacacaagagaattgtgaatattattctattgtaataagcactttactgctttgagtaaagtatattatgacatgaaataattaattcgtagtctttatttgaaactactttgtctatcagaggtggtcaaaaaacccaaaacctggtaaactaatggttttcagggttgtcctgctgggccaatccaattagtaatccattagcttgatttattttaatttaatttaatttatttttcattcaattaggtcttcccaacaccaatccagataattcctggtatattaaataaaatcaagtaaaagaaatcatagaaaattttggattttgcatgtacttttcattggctcactgttctaagaagtcataattagcaacatgaattttagttgtacataacatgtctggatgcatgtacacatgtacttttatatagacaagatttagacgcaatattaacttttcaatacttctatcccaggttatcgaccaaaacctag

SEQ ID NO: 10562 - DNA, 4334 bp, Vitis vinifera
  Intron number 6 from transcript GSVIVT01004719001 (locus G SVIVG01004719001) derived from phytozome v7.0 (chr-ID chrU n; pos 15497010 to 15501343)
tcctcgggacattttgcgttgcaactgatagaactgtatgtaaatgtggtattattgtttctttacctttgaagtgtcaactttaatgcttagtctacattttttttttctttgataggttttgatgcttattctatgtatcatataactcttatgttaattaaaggattaatttgcatgataataaataaaagttcaaagtgggatttaataaaataaaaaaccttttaaacagtttggctgttaacattttatattacatttataggtcaatagtagaggaatgaattgagaacaataattcttagagatagagggatatcttggagattcacaaatgggatcatcctttgaatggacttaagagtctgagatccaccagaatttctcgttcttctcatacccttaccatatagctatatatatggcctctatatttcactagatgctatagcctggaaacacttcaaactcatggacactcattgatggagaagttctcatgtggatttcctaaatttgaaaaacaaatagtatcccattccagttatacattgtatcatcaatttgtcctagcctgatcatagctgatgatcaagtggagtggaggacattggttaattgtaaattgcaaaggaagacatattacaaatcagacaaagtggaaagatgaactgtttgacttgaactaagaccctcaaaatgtacatggtttgcttgaatctatgcccaaaccaattcctgatattaaattttgccatttacccatttgcccatttgagtctaagaattgaatccatgctttcaaacacacacttgcacaggaaaacacaaaaaatagctcctggatgaccatgaaagggaaaacctagtggaacttgcaatagaaaaacacggctaacgaccattattgatccgagcctaccagttgcaaaaatgcccatatcatgcaaaatacttggcgtctctctgagcttattcccttaaattctacaacttgaattttcttcaatcatatcttcatgcaattcacctagaaattcataaacctgttacataatagcatttccacccctagtttaggatgttcttacaccaggtaacgggggaaactgtaaatatcttgcctctactaatatgaatttggactgtaataggttgttataatatggatggtaaacaacagttggtgggaaaggagtggtggtagtaaagccaggatatgagataggaaaaccatttgtgggtggaggtcagcattatggttttaggccccttgccagaatcttcagtcccagttttctgcttaatagtgtggcatataaacacacatttccattgcttgtcattcctcttccagtgtgaaattgtgtcacctgatagaaaatgcttctttaagcctttgctttatttggatctaggaaagtattaggaaaaggaagaaaaagtaggaaggaattcaaaatcttttatttggtttctgtggaaatgagaaggaaaatcaaatattgtctacaaacttaagacattttcaaaattttcattcttgatttagaagaggaaaaaggagagagaaatttgaagaaacatatttaaaagacttgttgaatttaaactttttccccccttcaatttttctttcctttcatttcctctgtttgggaaatattttttgaaacaactcttaaaaaagaaaacatgatttttccaaagaatatcttttaattgttttcacttgtttttgaaggattgttttaaaaaaataattatataaatatggagaataattaaaaataaagtactacaaataaaagatattagtaaagcatatttacaaatacaaaaaacaagttaaaaatatttaagttttcaaatagacttttgtcctacaaaacctcaaagaacagttttcgaaaactactttcaaaaattgttttttagaattgtttttgaaaacactttgcaaatagaaccgaaaattgttttttgttttctaattgccaaatgcagtttcttttttattttttatcatagagaacaaaagattgttttaaaaaatagtttccaaacagggcctgaatgttctccatatactttgattttattttcttcatttcttatgcgaagttgttttttctttcttgtaattcttttcttgtggaaattttcaactcttccttttatttaatcttttcttttttttccttttctctcgacaagttatgttttcattggaagaagtaaatgaataataaaggtaaacaatagttgcaagggatctaattttttgaactgactttgcatgtcactcttattcttgtggagatttcatcatctttgtatttacttttttcttttcttttctttcaacgagttttgttttaactgaaagaaataaaacaataatagagttaaacagtggttgcaaaggaatcttattttttgaattaacagcccatttgggagtgagtttaggtgtttggaagacttttgaaaactacttctaaaaatctagagaatcaattcttgggcaatcatttggtgagtaattcttccaagaatcaccttttttgttttataatatattaccaaaaatattatcaaaacacttttttagtttatatccaagtattaagtgattctccttaaaagtgtttctaataaaagtgctctaccaacaaaagtgaaaaatcaataatctagaagggtaacacctagaggggttgaataacaatttttactcttaatagcccaaaaattgtttccttttaatttgattaattctgttgagaatatagggaagattaaaaaacaaggccttaaggcttggctcgagtggtaaagggatggggagggtttgtgggaggttctaggttcaagtccaaatgggggcaaaaatttatctatatattaaaaaaacaaagattaaaaaacaacacacaagacaaaagattttttacgtggaaaacctacacataatgtgtgaagataaaaaaaaaccacgagatcagagacctcaaatctacaatccacaatatgagaatgcaatgcatagatttacctagcagaagctaccttaagacttattctctaacacttcatttgcttccagtggatctcttctcaacgctcgagtggatgtagatctccttcacaacccaacagaagtacaacaaccttctttgagagctttgggaatgggaaagaaactaagatttttctaaacatttgcatcaaactcaaaaacctatttaggagaggtatatatagatccaatgacctagtggaccaattctagaagaatcccaaaaataaaccttcaaaaatattcgaagatggatctttggaaacctagaaaacttagttgcaaacacttgagcacccttggagcgcttgagtgctcattcagtttctaaaacaattttaaaaatcgattttgcatagttttaaaaactcggtgcatcccatgccataccaattctaatttgccttttcttggacctttccaaacttacctatgtcatcccttattgatcaaccaacaaccttgagtcttggagagtaagacacatctagaaagatcctatgccaaaatgaatgggaacaaaattgtcaattttagactacatgacctaatataccaacaaaaagcactacaaactaaaattgcttgaagtagaatcattcccaaatgggctctaactctgcttgtggctctaaaatggataagcacttcacttccttaggaaagaagaaccgaaggaatcatttcaaaattaatgttcacgcatatcttattgtaatctagatcacttgaccacttactacattgtgtatgcaatctcatggtctttagaagccacatgcaaccttctctcacacgtgagttcagtaaatagggaacaaaagtttaacaagttgaccatttgacacatactaaaccaccagttacctaaaatcttggcttgtagcgatgagtcaacaatgtctattaggtccaataatgcttaacaccctacctcgtatgtgacctccttttgcatgtaggttcaacaaatggaggaagtaagcaaatagagacatgtgcacctaagacctcatagaaccaaagctcttatatcatgttaaattacctcatcctacaaagtttttgacgcaagtggtagtttaacaagttttgttccaatattgcccttattttgcttgcttgattttatattttggaacttcacctcattctttatattcctaactgcaaagttctttttcttcttctttttatattgaggacaattgcaggtttttgggactcctgaagctctaattggtttcca

SEQ ID NO: 10563 - DNA, 1451 bp, Vitis vinifera
  Intron number 6 from transcript GSVIVT01005084001 (locus G SVIVG01005084001) derived from phytozome v7.0 (chr-ID chr7 ; pos 14376181 to 14377631 reverse strand)
tttgttcagttgctcttcctttgcctagagggaaggtaagacaccttgtgcttttgtggttgtgcttatgcgtataggcagttcagtattctcggtagattttgagatttcattcagttcacaagctcatcatttgtgtcctcaaaattgtgccattttagatgatatattttttgtattcctgttttcatatttattttgtgttgttatcctccaagttgttggtattacccatcctagcatccgagaagtgaaaaagttattggctttcaagaatatgagatccaattacaactatcctttaaaattaaagactcgggagcagacattgatgactgcaccatatcacaagcaaaaacgccatagacatgaaccgttttttgtttcttgaaaagtgagtgacttttgctgaccagccatgtaaagcatctcaataagaattcatttttatcatatatcccttggaatttgattcctaagtgaactttaaaaaaaaaaaaaaattataatggggataatgtctctatgttattaaatatattatattttctattgagattcaaagttatcatcatattaagagcaactgattgttttagtttatttccttttatttctttatatttttggtgggattttttttttatctgtttcctttcctatactaatttcaaattatggggaagcatgtcatatacaaccatggaaactcctaggactttgttgaaaatggtcaagatcatagaaattggggcaacatttgggaaaccacagggaaaatgttggtgtaacttcccaacatggaaagcacataatgaaatatctatttccatatttcactctaatgagagatttctgcaatcaaaatggtcatgttgattttgatatgtaatggagtgtttgttgcctattatcatatatgcatgtctcagttattgtttctcttgccattgtccactcgtttgccccactttcctattatctttatattttcttcatgagtaagatttttaggttctttttcctactttattttgtcatattggctctgcatctgccttccattttggaaataatagacaatattgtcaattaattccaaattttctgtttgatgccattcagtttgaattgtactgaatgaaaggagattacgtaagcatcttagtgtcttcgttacccaagccaaggctgagaaacaaccaagaaaagcttctatcatagaatacatacatctttaatgatgggcttattagatggaaacattttttttaatattttggagattgtatggcttacataaataattcttggattcatgttcattgtacattgacagcaatttttttttttatatgaatatgattgcacatgttttgagttgtctaatcttatattattcctttgatgtggcagggagcagtttacctaaaagagcttaacccacattt

SEQ ID NO: 10564 - DNA, 8443 bp, Vitis vinifera
  Intron number 2 from transcript GSVIVT01013567001 (locus G SVIVG01013567001) derived from phytozome v7.0 (chr-ID chr5 ; pos 21032054 to 21040496 reverse strand)
aaggcagaggaaactttttgtagtctacatttcaggtaaatgctcttcattgggtttatattatttttttgttggaagtccaatacctgtgtctaatgcatgcttcattgatacttttcttcccataataagttttaaagagaagcaccctggtgaagaattcactcttatttagttttttatcctcatggacataataatggaaaagcatcttgaattcaaatccttccacggagtaagaaaaacgtagggaatatggaagggtgaaatgcttggaattagtaataatgagattccttattggtttccatttctggatttaaatgttataattagtaatttgtggttatgtcaatgtctttctcgttgaagagttgctcaagaatttccgttttatgtactccttttctttcctttatatttgatgctaatggctcctttctgatgaataacatataggcattcccgtatttttttcttaggttaattttttttatttttcccttttattccttttcctttcttttgtctctttatcttttttcaacaagacttccaaagtttagtagttaatggtgagggagtccttatctttagttagggtaccttttgtaaatcaaatttggcatctattaaccatttacttattcatttttctggaataagaaactgaggaattttaaaaaagaaaaggaataatccagcaaaggatggacaatccttttaagtaaatgaaagaacaaaaacatccaagtcctagaccccagccaaaacaaatacatcattgtgaagccacaaaccagaaacctggtcctagaacatttagagggaaatatccccaacacactcaacaaaggatgaggcttcctcttagtcaagtgatcaacctctcgatttgccaacattagcaattaaatgaaggatggaatcatgcccttagacaaattttgaaacccttacatcctttgatgtatctccaaggctctctcctatggtcccacccgtggattctcaggagatagtagttgtggagccctttccgccaaaaggtttttttcatcaagatagggtttgaagtattgggcgagtctggtacgccttggccttatcatatttgcctcggctaggtccaagatgattccaatacccaaattacgatttatagcattgaacattgatttggtgctaactcattttgaatcgtctaactcactgtttttttgaataaaaacctgtttgacttgaccaagcttcggattcaaccccaataccccaagttatgtcacaaatccctcatcttcttcttcatccacaaaattgcccttcttctttgcctgctaatgctattgtggcaattgaaagttaagaagcaacgatccgacgctaatgttctctcttccttcaattattgtcttcaaattctttttgctattggctacatcttcaacaattatgtggattttttgctagcgacgacatcttagtggtgccttcatttttcttgcatagacatcttcgactatacttcatggaccttgaaagcttgagaacaaagattcacccttagttggagaagaagattcagatttgggaaaagaatgggtattgggtatttttttacataccaataatatatatatatatatatatatttttgataagtaaacaagatatgcattagaaaaggctaaacgccacaaagcatacagggagtatacaagacggctacagcctcaaaaagagaaaaaggaccaaaaagaactacctccccttaagtggaagctatccactccaaaaaacctataagggagaaagactcctcacctaaatacactttggcccaattccataagttacagacaaaagaattctttaatttctgaatattcaatgcactccccctaaaggctaacctattcctctcattccaaaccgtccaaaaaatacacaacggaatggatttctaaatctttttctttttcttccctacaaaagaacccctccaggagattaaagcttcctttacagtttctgagaggacccacttaatatctatcaacccaaaaataatatcccatagggggctctagtcactatacagtgtaaaagaatatgatttacattctcttcttcacaaccacacaaaaagcaacaatttgggagttgcacccctcttatctggagtctatccaaagtgagcaccttcccccacgtagcctcccaagcaaaaaagcagactttagttggcaccctatccacccatattctccttgtgggaaacactgtggcattaggcttgtccaacagcctgtaagcttctttaaccctgaaaagaccatttcttccctgcctccacttaactgaatcatcctccaaggaaggcctatgacccctcaaagtatggagcaaatcaccaaccatatccatctcccaatcattgaagtccctcacaaaaacaagattccaatctccttggcccgaatcttggtcccacatctcctcaatcgtagcgtccctatgcgcggcaaggacaaaaagatgattgaagcattgggacaacggagtgtcaatgcaccaactatctttccaaaatttgattttggaacccttcccaactagaaaagccaaattttcccagcaccattcagattatttcataatctccttccagacccctactccagccgccccactagccttctttgacctccaaccatattcctcttgcccatatttcgtagtaatcacttgtttccaaaggttatccttttcacaagcaaacctccaagtccacttgcccagcaagactctattcagagtggctattctccttaatcctagccctccattgagtttctctgtacagaccacatcccatttaactagatgaacttttccctccaagtttcctcccccccatagaaaatctctttgggttttctccactcttttagcaacggacttgggcattcggaagatagacatttggtaaattggcatgctagccaaggtactttttatgagagtgatcctcccccctttggagatgtactgtcttttccaaagcacaagtctcctcctgaccctctcttccactccatcccacatagaagtagccctattggggacccctaaggggagacccaaatagtgagagggcagagaccccaccctgcaccctagctcagctgccatctaaagaatctcctccacttctccaactggaatgatttcgcttttggctagattaattcgaagactcgaagccgcttcaaaccaaaaaagaatccagcttagatgagaaacttgctctttgctcgcctcacaaaacacaattgtgtcatcagcaaaaaaataggtgggagatattcaatgaagttctactaccaccccgaatgttgcatcctgatagatatcccccctccaccgctctcctgataaggacgtccagaatctccattcccataacaaagaggtaaggggatagaggatccccttgacgaagccctctagtgctagggaaaaacccagctggcactccattaacaagaatagagaatttagcagaagacacacagctccacatccattccactcacttggtcccaaagtccattttttgaaggaccttcattaaaaaattccaattgatgccgtcataagctttttctatatccaatttgcaaataaggcccttttcttttctcttttgccatgaatctatcacctcattagcaattaaggacgcatccaggatttgtcttcccattacaaaggcattctgagcaatagagactaccttaccaatcactttttttagcctattagctaagactttagccaaaagtttatagagcccccccaacagactgataggtctaaagtctcccagatcctcagccccgtttttcttaggtatcaacaccaaaaaagtattgttgaggctcctaacaaaggaattatactcatgaaattctttaaacatctccatgatctcctctttggtaaaatctcatgcgttttgccagaaggctacagtaaaaccatccggaccaggggctttatccccattcatctccatcaacgccgagtgaatctcaatctctgcaaatgggatttccagactctctgcttcttgctggctgatgcaacccacctgaattctaccaatatccacctgccaaaccatatcttcaaaaagcatctgctgaaacgaattcacaactccttctctcacctcctgctcctctactagccactccccattaaccttaattttgtccatagcgttgtttcttcgatgagcacttgccattctatggaagaaccctgtgtttctatccccctcccttaaccaaatctcccttgagtgctgtctccaatgggcttcctccaacaggacccatttcttaaaggagtctttagcttccttttttaattcagcttcctccacagtcaagattctctcactttccacccgatcccaaaaatctacttgttgtaaggctgaagctttattagtttccaacctcccaaaaacctctttgttccaaactttcagattctttttaatttccttcattttaacagccaatctgtagctagcgctgcccctgacttcaattccctgccaccaggttctaacaatgtctttaaacccctcgaccttcagccacatattttcgaatctaaacggggttgggcctcttctaattccacccccctcttaacacgatttggaaatgatcagaaattggccgagacaacctgctctgagtgactccactaaactgatctaaccagctaggggaaactaaaaatctgtctagtctcgcccacgcctgattattaagccccccattccaggtgaagtctcccccctgaaaaggcaggtccaccagctctagatcctccacagtctctgcaaatctcctcatggctgagctgattcttctttggctgctcctttcttgttgaaacagagtgatattgaaatccccaccgagacaccagggatcatcccaaaggcctcttatcgccccaaattcctcccacataccctccctttccactttggtaaaaggaccatacactcccgtaaatacccaagtagccccattttctatagtcttgaatctacaagacaatgagaaatgaccctcctcccaatccaaaatatccaagaccctcttgtcccagcatatcaaaatgccacccgcagccccctccgcatttagggctctccaatctataaatctccccgtgcccaggcttctcacaatatcctccgacatctcctgaatcttggtttcctgaatacacattagatccaccctctggttccttatatagttcttaataattttcctcctagagctgtcattagctcccctcacattcctacttataatcttcagcttcattaggcaactatcaactgattccctttgccctgtgaaaggacctttctgcttattcccccccccccccccacacataattgacagagcattccaacctctttagttccctttcaaacttggacttctccaagagctctttgctgtgtatcttttcccgcctctttctgattttaatcagaaaattcaatatctccttttccagctccttcgtagagaatcccagaaattggctaaattttgctaagctacaatcctcccatagttcctctttctcattttcggtatcttgagatccagatgcaccagtattcccctccttgcccctaaccttgtctttgtttttgttggcctctcccaacttccaagatccattctcgttctcaacgttcccctcatagactgttaaccaagttgacttgtccccctataattcctcctctattccccctagacgatcgaaagattccccctctagagcccgatcagaattagaagagagaggaagagatgtccccataacccgatttcctttaggatgggaattcaggacatacctcttagcttcctcttcaagcgctcggtcagtcatggagaagccatcatccctttgttcccttctaatctcctctggcacccagctcgtcaagggatcctctggaatggatccttttctggagataaaacggcccaaaaaaccagccttctcttgggtagcagttgggccatccctttccaagccttccacctcaactaaaggatggcagcccagttcagcagcccaattactagacgatgggcctacctctgactcaccagccacctttgacttattttttaactttcggcccaaaggcccgtctatcttagccagcccaccatccttctccagctctttaagacccatatttgggccatatgaggtcgacctagccacttttccatctaaatggacccaatcccggggcatcgggccatggatctggttcctgggctctagacccagcccattctcctgtagaagcctcccatcatctggcatatgcctttcctcggttcctgcgactatcagttccttccccacacgcttcttcgcgcgtgagtacgtgtcacccctgacctcggttctccttctgatttccgccgcagagaaaatctgtctcaccaccggcctaatctcccaccacagcgccaaagtgtaaacctcctcctctacctcaatttctaacatactcggtctaaaatcacctcttattttgaccagtatcctagcccattgaatctcccccatcgaccttgtccgctcgtcaatttcaacaaatcccccacattcctcccctattttcttcagaatcaccgggctccataacgaaattggaagaccgaaaattttaacccaagcttcctgtaccatctcctcctctacccaacaacccgactttggattccagagatccaaccctaagtgggctcctcccatcactctgctccccgatgagaccacacggtgagcctctcttagatcttcaaattccaacaatgccctacctcgttccaacttggccagccctaacttgctttttaggccccaagaattcgcccaaagacttcccagcctctccaagtcttcttcttcctttttgttggacttccagctcgcgacgaggcagtactccagcttctgtaagtttccagcaatctcctccctagtaatcttcatcttgattgcatttgagcctttcctatttgtactcatgactgcttctgcgtatgatttcgccggagtagcttttccgccgacccttacttcctgcaaatctgttcttctaccagccagctcttccatttgacgaatcatctccaccatagtcgtccatcctcttttgtccctcctacctctcggtatgaagatacagaacctttttcgttccagatccacaacccccaaccttaaaaagccacccgccctattgaatccccaagccaaagtgtaccgcttgcctctttctctccactccttttcccatctcccttctttttcgtctcgtatacagtggattagcccctccttgaaaagccctaagctttccagccctaatcgaacccatgtcgagaccccccgcttcttctccacaatgaggatctgacgtttccctttcctttcatccaggtcaagctcgaaagtcttggattccaccgtgaagcttcgctttctactcgcctcgccggtctcatcgtcatcgtcgtcgcacgcgctttcactctccctaatgccctctctctctctctctcccatcagtccacttaaagtgctcaagtccccaagtgtttccttctttccttcacaccttttctcctttcagccccatctccacgttttccattaaagatctacaaatatttatagagttcctaatacattccttatttacataccaataatatatggtattatattatagtattatctggtattatgcattattgattagatgtatggcccgaagatgggatttcaaaaatatatattgaaggtaaatgaggatatttgtatggctatgggcataaaggtaggaacatgaatatttatatggttataaatataacggttgatagattaattgatttataattgagtgtattatacttataaattgagaaaaataattaaaaatgataaatttcaatatcaattaatatgttttactaattaattaataaaaatataattgttttatcatattgattaatcattattattattttttttaattttttgagctactaaattaacttatttgtgtattgtttgatatcaatccgagttattgacaccgatgtgctttggtacctttttggtcaatgactgatactacgacttttgaatcatgcaacaagatgcttattctatgactaactttgatcaagtactaatttttagtgaatcacatcagtttttttctccttaaatcattgcccttttcttctttgttttttttttcaatctgcattttcaggtgaag

SEQ ID NO: 10565 - DNA, 18408 bp, Vitis vinifera
  Intron number 10 from transcript GSVIVT01016269001 (locus GSVIVG01016269001) derived from phytozome v7.0 (chr-ID chr 13; pos 5680255 to 5698662)
gttggcgtatctcctctcttattttcacctttcaggtttctatttattgcaattgcatatttggttgctcatggtatttgcattcttgttgatgacaatggatctatcactagcttgtaggactctcaattggctgatttcaggctcaaatttagcattatctgatctggaccttgttattagctttgggttcaattctgagaaggaactgttggttgctaatgcatgaaatggagcaaatctagataaattggggtgtgatcatccttgtccccagtttccattttggatacagtcaaccagactgtttggatcctaatagcatgagcagatatgttccatgacaaaacatgggatatgtgctctaagatctttatggaacctgatgttttggtcctttttggtcttttgactgtttgaaatggtcatttgggtattaagatgttataataaacttacaggaacacaactaccatagatagtataagagaatcatttttcctaaaagcttaaacttgtaggatttgggactagattatatatcatgctctccaacatcctttctcacttgcagcctcatacctacacatggagagagatatagacacacatgcttgtaggtaaacaaaccatagacaaccttctttagggttatatgtgagctcaataaattgggtaaatagatatgttgtaaggtttgaacacattacctcctgccaaacgaaccttttataccatgtttgatgaccatttttcttaaaagctttagcttgtaggatttggactcacaacgtgtatcatgctcaccaacacctttgaaaacagagaatgatttttgaataataactgtgtattcactagatatatttacaacctatttataatgtttacaatgggaaaaagaaaaggaaatcattccattttaggcctagaattccttagtaaattagctagtaattacaagaaataaataccaagtcaactataacgaaaaagaaacaaccctaaattaaatcccagcctatacaagctgtataatccaataattactgtatggattcttcaacactcaccctgaagtagttgatgagtaaatgtttatcatcctgaacttgtttgtgatagattggaatggttgggttgtaagtcagtatgtcagctaactgtctttctaaggatatatagggggtgcataccaacccactatcgagtttctccttgttgaaataacgatcaacttcaacgtgttcacttcggtcatgttgaattggattgttggctttatcatagtatagcttcattggattttcctaacttatcctaagatcatttagaataatttttatctagagaagcttacatagcctatgtactatggctccaaaattctacttcaacacttgacctagcaatcattgatcatttcttactcttcttacgttaccaaatgcccttccaagaatgtacaatagttaaattttgacttcctattagtgacaatcctacctaatcaacatctgtataaattgcaagtgtcatctttctagttttctaaagaaaaataccattgccaagagttaactttaagtatatgattactaagtaaccacctccacgtgtgtcaatattattcgacaagacctgatttggcaccatctaattcagtcgttgatgaatatcatattcctagttttctaaagaaaaataccattgccaggagttaacttcaagtatctgagtatcgagtaatcacctccatgtacctccttaagattgtgcataaattggctcatcacacatataacatatactatattaggtctagcatgtgataggtaaattaacttgcctaccgagctttaatacctctctctcaattagaggactttctaatccttcatcaagtttgtgattagccttagtgggtgtatatgctagcctacaccccaacaatcctatttctttgaggagatctaaaatatggttatgctgtgaaatcataattccctcctttaaccaagtgacttcgatccattgtaagtatttaagtattcctagttctttaatttgaagctttttctccaacttctcctaatgacatcatcaacatacacaatgagactagttattttctcattcttggaatatttaaaaaacaacccatgatcccttttgctttatatataattcatgttcttcattgccttagcaaaccttttaacccaagctttagggtactatttaattctatgcaaagccttcttcaattgacaaatcttgtttcttttgaaattttcttctagattagatggtatctacaaacttgcttgatgggtgaaagccttttaaagtatatttaagaaaggaaagacataaataaactttaattaggattagtattagttaaaattaaattaagattagtatttattgtagtcaaattaggaacaattaattaagttataggaatattagaattatagtcataataggttattagaatcctaatagactttgaatttcttaaaaaagcttataaataaggttaattgatgtaaatcaaattaattgattggtgattaaataatattagttcttttgtaagtgttgcaattcttaatggtgagactctattgattttcttctaggtgtgactttattgattttcttctaggtaagactcctaggaggctttagtgagactctaaggtttttatcttttcttcttcatatcttctttctctacattttttttattttatttttctctatcataaaatttatcccttgttattctcctcaaatcctaaaaaataaaaaccctagcccaattacttggttgtaggcaaccatcctgttctacatcagttttagtattagagcaaacgttcttggcttgaaggtgtatgcaatcgaggagtgaaacaacttatgcaagcatgagttcaaaaaatacttctaataatcaagatgtcattacaacacactcaaaggaaatttttgccatacaacaatctcatcatgatgctataatacaactaaatagcaaatttgatgagattatgaagttattagaaaagagtaaaaaaaaaaggcctgattgaagatgatattacaagccatcaattcgaacaatcatctcataaaccacgtgatgaacaaggcaattttttgagaggaaatcaaagatgggacaaaatctttgagcaagatgatgatgcaacaaaaagggtttgccttgaagttgttgaattgtatggaaaataaatccaacaacttttcttgattgaattatgccaatggaatattattataatggtatgatgaaaggccatagtcttgcagtgcgacctttggtaactatatcaaaggtgaagggaagaagattggtgacgtactagcattttccatacacatatctcttgtcaagggaggttatgtatcataattattgatagaggtagcagtttgaacatagctttacaagggcttgtcgataagctaaaccttaaaagagagaaacatctaaatccattttaagtagcatgggttaatgacaccttcattttggtaagttttcgttgcttggtcacattcttttttggtaggaactttgaagagtctgtgtgatgtgaggtcttaccattaaaagtaagtcatattttgcttggaagaccttgacttttgatagaagggttcaatatgacaactatgcaaatacatataccctcgtgcataatgggcgtaagaagatccttagtccaatgaaagaagtctcgccaattaagaagtcagatgaggcacaaccaaaaaaaggtgtttactatgcgtcaatttgaaaaggagagcatgaaaaataaaggttttttttttgctctagtggtctgggaagtggatgaatttaaagagtaagataaggaatatctagaaaaagtgcgtaatatccttgatgacttttccaacttgttgcctgtagaattatctaatcaacttcctcttacgtgtgactaacaacatgccattgatttgattcctgctgcatcattactaaatttaccagcctacaaaatggactaaacagaacatgctgaattgaagaggcaagttgatgaattacttactaaaggctttatttgagaaagctctagtccttgtggaattcttgctctactaacactaaagaaggatggatcatggcggatgtgtgtggatagttgtgcaatcaataagatttgatgacattctagatatgatggttggattagtaatcttctcaaagattgatctaagaagtggatttcatcaaatacgtattagattgagggatgaatggaagacatccttcaagactaaggattgattgtatgagtggttagtcatgttgtttggattaaccaatgccccaagacattcatgtaggtcatgacataggtattgaagcctttcataggacagtttgttgttgtttattttgatgatgttcttatctataactgatattgtgaagatgatgttaagacaagtaatggacactcttagggctgaaaaggtttacattaatttgaaaaaaatctactttcatgagttctagtgttatattcttgggctttgtcatatcttctaagggtattgaaacaaatctggagaagatcaaagctatagttgatgggctagtaccaacaaaaatccatgaggtgtgaagcttccatggaatggatacattctatctacgatttgtttgaaatttcagctctgttatggcctcaattattgaatgcatgaaatatggtccatttatttggaccaaggcaacgaacaacgcagtgaacaaggcatttgaagaaatcaagtctaaaataatgaaacctcctatcctacatctactagactttgagaaagtatttgaggtggcttgtgatgcttcccatgtgggaattggaattgttctttgctaggaagaacatcctatgacttcctttagtgagaagctcaatggggcaatgaaaaactacttcacatatgatcttaaattctatgtagtagtgcaagtaattaggcattgacagcattatcttggttacagggaatttgttttgtatttagattgtaaagccttgcgatatcttaattctcaaaagaagcttaactctcgacatgcaaaatggagcaattttcttccgttattcaccttcaattcaaagcattatgtaggagttgaaaataaagaacctaatgcccttagtaggaagaccctcctcttagtaaacatgtcagccactaccattggatttggggaattaaagcattgctatggtagtgatgctgattttggagatttttattcctctcttttgagtggttcaaaagtaacacaagttgatttccaaattttagaagggtacttgttctataaaaatcgtttatgcttactaacggctttgctacatgatcatgtcatatgggaaattcatggaggcggaatgggtggatattttagatgagataagaccattgctttggtggaagattgcttcttttggcctagtttgaagaaggatgtttggaaggttatcaagtaatgttgagcatgttaattaggaaaaggttcaaagcaaaatgtagggttatacatgccattaccaattccaaccaaaccttgggaagacttgagcatggatcttgtatttgaattgccaaggacacgacggggctttgattctatatttgttgtggttgacatattttccaaaagggcaccttttttatcaagtgagaaggctttagatgctttttatgttgatgccttgttctttaaagaagtagtttgcttgcatggattaccagagtccattgtttctgatcatgatgtcaagtttatgagttatttttgcaaaaccttgtgagccaagctaggtacctaattgaaattttcaagttcttttcctccttaaactgatgggcaaacggaagttatcaatcgaaaccttggtaatcttttgaaatgcattgtgagatatttgttgagaaattgggacaatgtcttgcaacaagctaaatttgatttcaatagctccattaatcacactactcggtgctaaccttttgaagtggcacatgggctgaaactttagcaacctgttgatcttataccattacctacttctgtatgcaccaatcaagatggtgaggcacttgcatgtaatatacatgaaagggtatgagaaaaaatcaaaatcagcaatgagaactatgaggaggcagcaaatgcacattgaagatatattcaatttcaagaaggtgatctagtaatggcttgtctacatctaaaaagatttcatcggggcacatatcaaaagcttcaagctaagaaaacatgtctatttcgggtgctaaaaagattgggcaagaatgcttatttgctagagctttctttagaatgacattttagtataatatttaatgtggaagatctatttgtctaccatggtcatcaaagtgaggtaggtgaagaattgtatcttcaattgcccacctaatcctagcccatgtcctgaaattaagtatgttcttgaagatcaacttgtgtttatttgacaaagtggataccaaaagctttttgtgaaatggcgaggcaaagtagactctgaaaatacatggattacaacaatagattttcagaaacttaaccctgatttctatgaattggatcaagcatctaactcgttggagttgagttctttcaagttagggggggaaaatcttttaaagtatattcaagaaaggaaaggaaagacataaataaactttaattgagattagtattagttggaattaaattataattagtatttattggagttagattaggaataactaattaaattataggagaattataattcataatagattattaaaatcctaataaattttggatttcttaaagaaacttataaataaggctaattgatgtaaaccaaagtaattgattgacaattaaataatattagttcttttgtaagtgttacaattctcaatggtgagactcctagaaagccttagtgagactctaaggtttctatctcttcttctttgtatcttctttctatacattttattttattttctaccataaactttattctttgttcctctctttaaaccctaaaaaaataaaaacgctagcccacttgtttgattgtaggcaaccatcctagggttgtcctacatcactcctttaaattctcatggaggaatgtattctttacattagtctgtataaagatcaatcaatgttagtagcaagggataacaatatatgaatagtattttctttgccatcaaagcaaaggtttcttagtaatccatttcataagttggagtatatctcttagctaccaattcaaccttatacgcctctagtgttctatttgtttgacattttattgtaaacaccacttacacccaatttatttctttccaacaagaagattcgcaacctccaaagtgtcaatttttttgaagacactcactcctcttgcattgctttcctccaatgctcatcacctaatgccttttgaacacttttggatatccaatggagttaaatttgatagcaaatgctttatgagatgtagaaaggttattaaataaaacaaagttggtaaaagggtgttgagtataatgtctcttacctttatcaaacaacaataggtaaatgaagatcgttaaacacattagaactagactcaaattgagtttcaatgcccttctgagttgataattagagccatgctcaaaggtctagtaatagattatattatcctaggtaaaacttatgcggtagtatatctttctccttgtcttcttggacaacagaattaggaataatggattgaggaaccacaggttcaaagtcggttagcttggggtgagcttggagggtgacttggggaaagacttggagagcttgggacaagagcaatcactggtttagagttatgacttaggagcaattttagtgtatgaggacagaaaaattccaacaaactcctaatattctacaaatggctccccttgaagatcttgagaaaatagaggattttcatgaaaggtaacattcatatgcatgaaaaatttcttgaaagttggatgatagcatttatatctcttttttgatagataatagccaacaaacaaatacacacctaagggctctatgatcaatttttgttctttagttagcatgaatgtgcacaaaggttacataactaaaatttttaatagatatatgactatagctatcaaatttgggatatgatttacaaagttaactcataggtgattgaaagtcaataacttgagaggttaatctattaataagatgagcaatagcaaagacaacttccttctaataggttttggggagattctagtaatttcaagcaaacgtttgttttttccctagccatccattctattgtggggtatcaatgcaagaagattggtgaaaaatgcccttttttgttaggtatgatgaaagacaatggttaaaatattccctcccattatcaaatccgaaggtttgtatttttgagttaaattgggtgctcacattttatggaaaacaagaaatatagtaccaaaatctgacttttgtttcataaggtagacccaagtaacttttgtacaattatcaataaaagatgcaaatcattttgccttagaaatactttgaacctttatgggtctccaagtttttgtgtgaattaattttattgctcaaagaaaaagacattcgatggtgcttggcaagttcatcgacatcacaatgcaaagtctgaatatctaatttttccaaagggaacgtttctttaataatgttaatcatagactaccaagacgaagattgagtcactaaacttcggttttgttgaaccctgaactttcaaatgagtaggagagaggacttgagcctattgtaccactttcaactttaaggaagtgtaatccacctttttctttgaacatgtccaattatctttcttgtactaagttcttgaaaagtacactccaaaggtgataaatttacagatcagtttagaattttagtgattttagaaatggaaaataggttacttgaaagctttggaacatgaaaaatattttcaaggatgatatttttagccaaagaaatatatccttgactagttatggtgagaaaaggttcatctactatttaaattttccaatttccatggcatgagttgtaggttaggaaacaccttgaagaattggtcatatggtaccaaactcctaaattgatgacctaaaggcttaaaaaatgttcttttaagacatttaggccaagagattaactatctgagcaaaacattgtgtctcccctggcttttcaagttgtgacaagaattacttcaattttccatgtcttctgtcttcaattctccctctcaacagacattattgtctggagggtttttcatcaaggttggtgagattaacttgaagtttgtactcttggtttcctccttggccatcatttcctgttccaaaaacatttggaggctttccaaggagttgccaatatgactctttggtatgtctaggtctccagcagtaagtgtatcaccatgagtccttgtcactcgaccttctgccttcattccttcctgggtttatggctgaagtagcaggagcagtatcagtggtccaaccagcaataacaacaatagtgtttttcggctaggtagtgactcatgccaagccatttgtagggttctgatataatataacttgtcttagaccttcttcctctctaacaattgcaaaagcttcccttaaggaagaaagagtttctttaccaagaagttgaactctattatgatccaatcattatgtaaaccagtcaagaaataaaaaactctcccttttaaaaaaactcttgattcattgttgtatctttgccacattccatttttaaatccgttactaatttaatttgagctacacccttgaatttcaagcactgaaaaattacatattttgatattatgaatttagtctttagttaataaatctgagcagcatccttaaattttgaataagtatgatagacaacagcctaaatcgcttttttgtagagaggtacatataagttctgctgatctccagctgcattgggtaaatgaataaatttcccttcccttttaggcacatttttatagactacgactactctaattaattttttttgatagataaacaacaatatatataagaaagggccaaaaagccacaagtatacaggggggtatacacagaagcccaaaacaagaaactgaaagaagaaaggggagtaacctcgccaaccctcaagtggtcgcgagccactccaaaaagcctaagagagaataggtttcctctccaatgtacaccctagcccaactccacaagttacatacaaaagaatttttgattttctgaatagctaatgacccccccctgaaagttaacctattcatttccttccaaaccgtccaaaatatgcacaacgggatgaaattccagatctttttcctttttctccccacaaaagagcccctccaactaagtatcacctctttaatagactctgggaacacccactgaactccaaaaatggcgaggacaatctcccaaagagtcttaaccactatacaatgtaaaagaatgtgaaatgtgaaatgtggctcatacactttgaaattcctctgaaattgggattgagctttgggtgtttatgtttgtttgggtagcagtggaagagacattagattttttaatcatcttggactgattggagattgaatgggattattgtgatgaggaggataaaattagggttttttttttccaatactaggttctacaaccaaatacgtaccagggaaggaaacacataccagaagaaaataggcaacaaaaaatgggtttccaaccaaaccttttaaccaacactgacaatgaagcccgaaagaatacatgaacaatccaacaacttaggctagaaaaaattgggactgactttgcaaattggggccgatcaaagaaagaaaaaaaggctattgagcccaacactaataccatgaaaatagagagtgatttctgaataattcttctgcattcattagatatttttgtagcctatttataatgtttgcaatgggaaaaagaaatggaaattattctattctaggcttataattactccaataaatcaaccactgatcacatggaataaacatccaatcaactgtgtagagaaagaaacaattcaaaattaaatcccagcctatataggttgtatattctgacaattattgcaccagttctctaacaggaaggatctatttggatcttctagtatggttttgtatatgcactggcttttacgatttcaattgagaaggcacaatttatctaattcttttactagacttcaaattttagacatatgaattgacacagttaagtaagaattttgattaaatccacttcattttatgctcaaatagctagttacctaaccctactctacttcatggctttgtagtcacttgtcccactagatatcaggttcgaggtggctgatgtctcattgattttgttaaatgtatgacaaggaaaagaaaatcatataagaaaatagcagtatcttataatactagccaaaccatttaattacttaaaaatgataaactaaaaaaatcctccagctagggggtggatgggttgggtaattggtatacacgtatccatccacagtgtctagttgatgggttgttgtttggttcttatcctatcagcccaaggaacaattatgaacatatgtgtaattagcttcttcaataattttccaaggttgttaaagtcatcaagatctagcaactaacaaattctatagaatcatttggtatatgcctttttggccagcggtccattaagtggcacctggtgccttatttaagctgcctagatagataaagtggcagacaggtgatgaaactcgaacatgagtgaaagagcgagtgagagaacgagggcggccgagagcgaggaagtgagcgaacccgccggcggcgagaatgtttctcgcgcggagaataggaggaaaaggaagtcgaggagtttcggggtggagtccaagtccttcgagctggaaatggaggagaggagaggaaaaaccctaataaccatcacggaaagcaagaaaggggtatcgtcttgggtgcgcatggggatgttcagcgtcggactgttcatggaaggccttcatcagtgcattgaagatgtgaatgaaggcagatgggaaaagggttggaaggagaaggggaggaacatttctctggtgcgcattacgaacagggggggttgttttttgcggttgggggttattgatttggagttgaaaagctatagtatttgtattccaaagggcaaaggaggcaaggggggatggtcggcgatggtggaggctctctatcagttggataacaacattattaataaggaaaaacaagaagaaatgagggtaaggagaaggcagtgcacggagatgacgaaagggaggtcgtttgcagatgcggtgaagggtgggtggaacaaggagtccaagatcatacgagtggaggtggctcgggaggaactaaatagaaatctcagtaggctagaacattgcttgatcggaagctggagccccaacaatacaacaggggaaaccttggaaaccttgggtggggaaatggccaaagcttggggtttgaaaggcaagatggggatggcgagtatgggaaaaggacgtgtgttgctggaatttgaatttgtggaagaagcgagacgggttaatctatcaggcactagggctgtgagaggtgttcaaatgggcttggagtgctgggacccaaactcaggctgtttggaggaaggggagacaagaaaggaagtgtgggtgagaatattagggttaccaatgtcgttatgggttccgtcggtgctaagaagggtgggagatgcgtgtggagggtttctcgacgtcgatcctcagacggagagcttggaggagttgcagtgggccagggtcttggtcagatcggacggcgagactttccctgacactctagagttagggattgaagagacgacatactctgtaaccctatggtgggagaggatgccgtcgataaggacggaagaggggagaaagcaaagcctgtggaatccaacaacgagggaggttgaaggtgacgaagcttcacgcgctgctacgcgagtggagcagttggtgggcgcgggaaccgaggcgcagagtcagtcagatgatgggactgactgtctgtcgcaggacatgggcccctctgtaaagagagcccagacgcgagtgggctcgccgcaggggcctggcttgaaatctgggcctacagcttctgggctgctttgggcctatgggcccaagttacctccagcttctgaagccccaaagggggatcagtctgggccgaggcattctaataggttggggcggggtgcaggctatggtatgggccaggctcataaggggaaatccaatttaggccagacccacctttcagataatgggcttcttttaaaaaccccttcttcttgctccaacggtcattttaaagctgatgacttagagaaagagttcaccagatgcaaagaggaagaaatggggagaagacaacagctggacccacacaacccgagcgctgaaagaatgctagaagaagaagctgcgaggtatgtctcagagataaatatggggggtaccagggcacaagggtcttcctcttctaatcttctttgtttcggtcgaactccggagagggagtattgcgaccattctggggggagaagagagggaattctggttggaagtgggtcgcgaagaccaaatacagaagatcattcaggaagaagggatggctgttgggacctggttgaaatcagcagcgatgtccctacgggtaggaatttggggtggactacagaccagtgggctagtcaagagggcagaaaggaagaccagctcaattgggaggaaagtagcctgattaaattcagccactttttgggtttctcaacggaaggtctagagaaggaaattctgaactttttaggaaaaatcaggaaaagaagggagaaaataatagacaaagggctactggagactacaagatttgaaagggagcttaagagattggagtgttctgttaattatgaaagggacactaggaagaaaggccctcaacagggcagagggatccaaagttcagttgtccaatgaatgtaagacttctgagttggaatgtgaggggcgtgaatgataggtccaagaggaaagtaatcaagtcagttatcagaagccaaaaggtggacctgttctgtattcaagaaacaaagatgcaagttatgtctgaagaggtggtgaggagtctagggccggggagatatcttgattggaaggctttaaatgctatggggacagcagggggtgtcttgatttgctgggacaaaagatctctggatttgctcggggtggaagagggccaattctccatttcctgtagattcaggaatgtgggagatggagtaatctgggtgttcacaggggtttatggtccttgttccagaaaggatagggagtgtttatgggaggagttcggggcaattagaggactgtgggaggacccatggtgtctaggaggtgactttaattcaactctataccaagctgaaaggagtagaaatgggaggatcacttcagctatgaggagatttgcccaggtcatagatgagttagggctaattgatattcccttgcaaggaggatccttcacttggagtggggggctcaataaccaattgtgggccaggttggatagattcctggtgtcccccaattggatagatcaatacagtagggctattcaaagaagattgcctcgcccaatctcggatcattttccgattttgcttgagggaggtggcctaaggagaggtccttaccccttcaaatttgaaaacatgtggctcaaagctgaggggttcaaagagctgatagaggggtggtggcaagggatcgtggttagaggaaggccgagctacaggttagcagctaagatgaggggtctgaaacacaatttaaagatctggaataaggaggtttttggaaggttggagaaaaacaaagctgaagcccttcagcaagtggagcgatgggatgtagtggaagaagagagggctctatcagaggaagagttaggtcacaaaaaaacagctaaggagaattattcaaaatgggtgtcgatggaagaagtgcattggagacagttatcaagggaaatatggcttagggaaggggataggaacacgagattctttcaccgtatggctaatgcccacaggagagtcaataatctgatcaaagttaagattaatggggtgaggcttacagaagatcaagaagtgagggatggaatagtaaatgcttatcagcatcttctttcggaaaactcggattggaaggcggatatagggggtcttgtgctgaagcagatcagcctatcagaagcggatgctcttgagctccctttctctgaggctgagatctatgctgcattaatggggatgaatggggacaaggccccgggtccggatggtttcactgtagcattttggcaaaattgttgggagattgtcaaggaggatgtcttggatatgttcaaagaattctatgatcagaattctttcatcaagagcctaaatcatacatttctggtcttgattccgaagaaagggggggcagaggacttaggggactacaggccaatcagtttgcttgggggtctttataaattattggctaaggtgctggccaataggctaaaaaaaatcatagataaggtgatttctcctgatcagaacgccttcatcaaagggagacagattcttgacggttccctaatcgcaaatgaggtaatagactcttggcaaaaaaggggagagaaaggcctaatctataagttggacattgagaaggcgtttgataatatcaattggcagtttttattaaaggttatgcataagatgggcttcggatcaaaatggataggatggatgtggagctgtatttctaccatcaaatattcaatgctggtgaatggggttccagctggtttcttttcaagttctaaagggcttaggcaaggggatcccctatccccctacctatttatcatgggaatggaagtccttagtgcgttaatatcaagggccgttgaaggggggttcatttatggctgtaggatttggaaaggaagagggcagcccgtaaacataactcatctcctgtttgcggatgatacaattgtcttttgtgaggcaaagaaagagtccctgttgtacttgagctggatcctattatggttcgaggccgcctcaggtttaaaaattaacttggagaaaagcatggtcattccggtaggggaggtggaaggggcgcttgatatggctgcgaaaattgggtgtaaggtgggacagctgcccactgtttatttggggctgccccttggggcgcctaatagggcctcctccgtttgggatggggtggaggagaaaatgaggaggaagcttgctctttggaagcgtcaatttctgtccaaaggagggagaattactctcattaagagcacgatggccagcattcctttgtatcaaatgtcacttttccgcatgcctaaatcagtggcaagaagattagaaaagcttcaaaggaattttttgtggggaggagccaatggagggaataaggctcatctaatcaagtgggaggttgtgtgtacggataaaaagaagggagggttggggttaagaaagctaatttggttaaacaaagctctccttggaaaatggatttggaggtttgcgcgggctaaggaggagctgtggaaaaaagtgcttgaggctaagtatgggaaagaggagtttgggtggagaacaaggaaggcaaatggggtgtttggggttggtgtgtggaaggaaattctgaaggagtccacttggtgttaggataacatggtattcaaggtgggaaaaggcaataaagtaaggttttggattgatccttggtgtggaaacaacgtgctgtccgaagctttcccggacctcttctccatggctgcccaaagaaatgccactgtggaggattattgggatcagaatctgagtcaaggagggtggagcttaagactgttgagagacttcaatgattgggaattggggttggtggacaatatgttagttgagttgaggaactatagagtatctatggaggaagattcggttttttggaggggaggagcggaagggctgtttaaagttaaggaagcatatagggtgttgattaatgctgatgaagcggacttcccccatagcaatgtttgggtggccaaagttccaacaaaaattattttctttgcttgggaagctacttgggggaaggctcttacactggataggttgcagagaagaggatgacaccttcctaatcggtgcttcttgtgtggatgtgaagaggaaactatcaatcatatactaattcattgtacggtggcaaaaggtttatgggatattattcttgcattgtgtggtgtacagtgggtctttcctaattctgtaaaggaggttcttagtagttggaaaggctcttttgtggggagaaaaagaaagaaagtgtggaagtccatcccgcttttcattttttggacaatttggaaggagaggaataggctcgcctttaaagggggtgtgttagcctttcagaaattaaagacttcgtttgtgtataatttttggggttgggctaaagtgtacattgatatggagtcgaattcccttataggtttcttggagtggatagcttccaagaaggggttgggttattttgttttttggttaagggtttgtagccttgtatactccctgtatgctctttggctttttgccttcgttaatataatcgtttacttatcaaaaaaaaaaagaaaaaaaaagtggcagacaggtgataggcgttaggtcttaccttggtctgaaaaatacactaccgatccctcaattgtgtccacaattttattacaagaataactgtgttgtttcctccttgctactgctaataactgtgcacttttccccttgactttcttaggtgcattgtcataaataccaaggctttcttgatattatacattactcagtggttataactgcaactcattttatttgtataattggggtttaggtgcaaaaaaatcaattgtcctttcaacttgc

SEQ ID NO: 10566 - DNA, 6462 bp, Vitis vinifera
  Intron number 4 from transcript GSVIVT01033201001 (locus G SVIVG01033201001) derived from phytozome v7.0 (chr-ID chr4 ; pos 9532138 to 9538599 reverse strand)
gaatcattctcttcaagataaaatttcatcaataggtgagcaatttccttagaaatatgctatttaactcaacatgtttccaaaagttcttattactttgttaagagggctatgacttgtaattttgtgtgtgattgacacctttcttgcttttctttgtgcttcttgttatatggtcttggcattttttaagtattagaagaaaagggtcagaaaaggtatttttcatcccatttatttttccatttaagcagtgattgaaacacgtagtaagacaacttgatctccaatgccctttggttaatttccatcaccattcactatgtcagataacaaatgcttgtagttgtcgttgatatgatgtatcattgagaaccaagtttctaaataaataacgagacttccaatttttctctgctaaattttatttgtgaactctttggccttcctctcaaggctttaacctcgaatggtgatttgacttcaataattataggggttgaataattttattgatgcttatggaaggtgaaaatctaatgggtaactaatacaagcattttaaaagtttctgctttggtggcttagcaaatggaatcaataagtggatttttacagaggttcaagacaataattccgtcctaattccttcatgtgttcaatgatgaaattatcttttgtagttttttgtccttttccaaacatcccacatgaaattccatatcaactgctcttttttcttgaaaataatgaattatttaaaaatgtcatttgttgggcattcaatgttttgccattcgaaagctacttggtttgtatgtttagctctttatgctagcatgacatcctttcgatctcttcctttcttggataggctttatctaaagaggattgcttgattcttgaggctgggaaaagggcttttatatagtggcagagctagggtttagagagatgattaaattgctggattttagagagaattagttagagtttggataggctttatctaaagaggattgcttgattcttgaggcttggaaaagggcttttatatagtggtggagctagggtttagagagttaattaaaaaatggttaattggacagggtcaatacatattccttgcccctaaattgtacttgatgctctggttacgggggaaagatggttaaaattcaaatgcagaagggcaattgaaacagaattggttagggtcattccttaggggtggaactggtacaagaatgttagatggaaacattggagaaacatgctctttcccctcaatgaaaatgtgctattggtagattaacctagagaaaggtgaatatatattttttgcaaaatttttaatattccttacccctaaattgtacttgatgctctggttatgggggaaaaatggataaaatttaaatgcagaagggaaattgaaacagaatcggttagggtcattccttaggggtggaactggtacagcaatgttagattggaagccttggagaaacatgctctttctcctcaataaaaatgtgctattggtagattaacctagagaatggtgaataaatattttttgcaaaattttcaggttttaaatctattcaaatgtcaatctagttatgcaggaaataaataaataaaataaaataaaataaagggcataacatgatgatttatgttgaaacctcaaacataaattgtttgagataagagtcaaaagggcttcttacaaatctaagttaaattcattagaaaaatacaaaataagttttttaatttttaattttttttacagttttacaattttactgaacagatttactccaatctaatccaagcaacaacttcttagggaatcctgcctttatgctgtgatctgcattgagccacattttctcatatattatcttctagtagatcttcaaacatgatcataatcctttgaatcgcttactctttttgtctcacctcatccaaggtagtgtaatatttatagacaaagcaatgttagggctgtgatggggttaaagaaagttttaattgtaatagaaagactaaaaagaagttgggcttcactttaattggacctgaagccgttttttcagcttcttttgattgtcccacttgcttgaccctacgacaattttttttttttgttgatatttttggtctatggtttgataaaaaccttttctaaatattttttttttttttgcttttaggaaaagttcattttagtcaaacaatgttaattttggcttcttgaaaaacaagttctaagtacctcatcctaggggatgctcaaaagagggtagctgatccactgtcattatttttatttttatttgttcatgcgtggttagaagcttgttggacatgaaacaaaaaattacaactcaagtaaattttcatagaatttccaattaacattttgtttagactaaaaaaagttctaattagattgcatatcatgctcaatttgtgggagaagatgataaaaatgcactagggtaattgaggcaatattgtttagtgtaaatgagggtgtgcatgatcgctatgatgaacacttatttttagtttatgggggaaagatggtaaaattgcactaggacaattaaggcaaaattggttagtctaagtgaaggtgtttaatgtgttatcttgcttgtttgcacttaaccccatctgttccagatgcaagagcctggtctttgtcttttttagggttatttacaatcaagtctttcttgctagtcttgtcccgcctttctaattcttctcctgctttccctactaattttgtttggaaatcgctagtgtctcttaaggtcaagtcttttgtttggttagtggtacataagaaggtaaatactaatgatatgctatagttgagaaggccctacaaagctcttagtcctaatacctatgagttgtgtatggagcatggagaagcaacaaatcatttcttcttatattgtcctttgacaatggggctatgacacaaattatttgaatagccaagatggattgttcccccaagaagcatttgtgacaggatgaccattaattataagggattgggaggattcaagagaggcctagtattgtggcaaaccgcttgtattgctttaatttgggtgctgtggcgggaaaaaaatgttaggatttttgtggacaaggcaaggaatttagaggttctatgggatactattcacttccttgcttctttttgtgcattttataccacaacttttaagtgcattccctttaatgtggtttaactagattggttagtggtgtgtagctccaagggtgtggattagtaaggagaggttgccttttgtaattaccatgtgcctttttgcttttgatattcagttttcttagctttcgtttatgggaggattcctcatccttgtattgtacttcttaattcctatttcaatataatacatttttgtttcttatcccaaaaaaaaaaaaaaaaaatgtgaagatgtttaatagttgtatgctcttattttttagctttctttaatgggaacacctcactgtgtcttacctagtttgatgatcaaattgctaagatttgagttccatatacaagaggttagacttgcacaagagccttgcttaagtatttagactttttaatttctttttatgattcttttaatgaaaagaaaatttgttatctgttagtccttttgttgtctttgcaaagtgtagttctttcttccatgagatggtttattttcctctaaatctctcttcctagcccatttttaaagttgattctcttttttcttctctgtaaggaaaactcatttgaaaatcccaaagatccttaaaatttcttgcctttgcttggttattgctagcagaaaggtaaatatttacgatatgtgtcgtcttaggggattccatatagttattttgcttggataacttgtttaatgcttggggagtggggaatttgcaaaccatcttttcccatattgctcttttactttgaaattgtgactcagacttttcaggagcagggatggcctagttagttcctagaggtttttttatgtgatgattataactttttgggattttagaatgagcttgtaggtaggcattttattgcctggggggaaggggttggtggtgtttgtactattctagcaacttggttggtatcttgatggaaaggaatgtcaggatcttagagcaaacagcccattgaatggactgtgggagaacatcctcctagatgtcaattgccaaagagttgttggaatttcccataactatcattatgcaggataggagttttgtttccattccattcatgatagtggtggaaatacgattgactggactcattggtctgttggtttcttaaaactgaactttgatgaatgtttcttgggaatgcaaatcaaatgagcattattcttccgagatcataggagtgggatcatttgtgccttttcaaaaagttgggtctgggctagctactgaagtagaattactcgctttattcaaggcctcaatgttgtaacgaagtacctaaccaatttactagcataggaggctttgacaaacagttttgtagtcattgttgtagagggtcttgaagatatgaccattggatactacatattgtggacttgggtaggaagttggttgcttcttcttgtggaagcttaggtccttgtggtaagatttttgaaaacaattctcaaaaaatcatttttgaagacaatttaaaaaaaacaattcatagttgtttttagaaaaaaaattctgtttgggaacttaaatatgaaaaaccgttttcttgacttattctccttgaatatattgcccacttatgtacaatttaaaagtttccaaagtatcttcatagtttcaattatttctctgaatactctacaaaacaaatctgaaaacacctgaaatttattctaaaaaataatttatttttagaacaaattctcaaaaaactgttttcagccaaaattttgtcaaatatgttttttaagttaagaaaattgttttttttatcctaaagaacagaaaattgtttttaagaacagtttccaaatgacccttagattagttagttagttgaaaggctggccaagcgaggagcctcattgattttgttggaatctaattctcccttgtgctttttgatattctacctctttagggatgggaacccaaagagcttctactacggagattttttatgtttacttactactgaatttggaagagaaactgaatgatactctattgaaacaatttagtttacatcgagaacttaaatagacaaagcaatctcatcttgcagaatatcatctgatattctttctaattcaaactagagataaaaacaaatttaaacacactaggacttatctaaactaaacaatccagaataataggattcagtcaagccttatcttctggttttattttaaattcaaactcctaaaaatctaggacttatctaaactaaacagtccaaaataataggactcaatcaagccttatcttctggttttatttttaaattcaaactcctaaaaatcaaacctacggtttcaacacttactcttgtgtttctttttcttattgaaggatttctcatccttttctgttttgtatgaattcttgatcttatctaatataatgaaaatatagtttctcttgctcctaacaccatctctttcaaaaataaaataaaagaaatgaattgcacacactcaatgtgcgctatgcccccttgatattgcaattattatgctccctcaattattatgcgcatactcacagattagtgcctccctcaattttgcaattattatattctttgttgtccttaaatcaagttctgagcattcttagtatgtatgcatacaaattttgctagtcacacttggagccaatgcttcctgaagttttagttagtttgcccacttaaaatttttctgattcttcaatagatcttgtgtggtgtgctaattatgcgaagtccatttcacctcctatgaaaaatgatgtgtctatagaatcaagatagttcactatctaaatatcttatacctccattttctatttgatccgatatttattctcttaactgtctctgtgaaactgttagaaacaacttatcataaatcaaaattcaatgtttgaacttatgtaattaacatatttttgttatacaatacaacttaatgatgacagtaactagggaatacgggggaatccctttgtcattattgtgtccttcaaaaattttcaccagtgtattcaaatattatttgggttttattactcttactcattgagtgattctatgtattgcttacaaagtcatctattcttgagatgagattatgcaactgatgaataaagtgttttcaatataggcgcttctgttactcgtgc

SEQ ID NO: 10567 - DNA, 21296 bp, Vitis vinifera
  Intron number 7 from transcript GSVIVT01026774001 (locus G SVIVG01026774001) derived from phytozome v7.0 (chr-ID chr1 5; pos 6875367 to 6896662)
tgctgaccataacagtggggttgaagaaattccatgtaactcttcatgctccatatactcaaactaacttttgacttatttaacaaatcaacatgttatgtacgttttaaggccaaatttgagcttaaaattttcctttatatacaggccattttgattctgttaattgtgattcttgaagaaccatcttgctagtttgacattgtcttttatggtagagttctgttagataataatcttgtaccaaaattgcatctcctttgggtgttaaattgtttttcctctgtgtgctcattagaagaaaatattttgaaaggtaaatctcaataattgactacacctagaggagaggtggggggtgaataggtgttgaacaatttaaaaaaatctctcaacaaaaattacctaaccttagaatttctcaatgtctataaacttctcttccaacaacttttcaataaagtataaaattcacaagcaagtatgaatgcaacaacactcccaataatttataagtgcaattcacatgcaaatgcttcaacactccttaaaattaattcataagaacaattctctccttaactcatttccaattattacaagatatcattaatcaaaatgaatagaaaaattattcaagatatccaatgtttaatcacacctatttcaactcattttttttttccattcaacatatatgcccaagtaaccaatgatattaaaaattgaaaataaatcaaaaagtagaatgagagaaagagacaatgacaccaattttaacgtggaaaaccttcaaagagataaaaaatcatgggcctacaaccgatcgaaaacgtccacaatgaagaacaaaaactgaattcaaggttttacttagttcaagccaatcaatccttcttagaccacttgactagtacctttcactttcagcttctcaccttctttcggagcacacttggagtccacaccaagctcgatcttgacctcttcttgaatccacacaagaagaaaatgagtttttacccaaacccaaattgactagaaattgagagatgaatgaatgaaaaatcaacccatctttttctcaagaaaatccattgaaaacggtttggaaaacaataggaaagttggattttcttggcaaccaaacaccctaaaatagaaaaggagaagagaaccaaaggggatggctgctgctatgtctctctctacaacataggaagcaagttttgggtttttaaatgaagaaagcccttgatccagtgggtgagatttcatcaaaaaagtgtaagctggatcgatccgacctaaagctggattgatattggaacagagcattttgaacacttagtaaaaaaatgcttcctaaaccttcctaactccttaaaaaaatttcaagaaaaaacaacatataaatacaatggttgattcaaatccatccagctccaacctcaactacaaaccttggtctcttgacaaattcaacaaattgatctccattagccaagttgtccgtacaaggattagaaaaatggagttaagagacacttaggaattttgtctggaattgccaacgtagctaaacactcacaatattctattagataatggtggctggtgtatttggaaggagtagtttgatgctaaatcctattggcaaagtaaatgatgagattgaaatgtgtgatgaagaattgtagtttgcaatgttaactagacatgtgtcatggacacaatacgtcctcaattattttgacatttatatccttccaaatgttgtcttgggaacacagccacacacaagcacatagtatcactgctagcaggacatagtttttataagtgagatactacttgtactgactttgacttgtgtggtcctttttattctgtttcctttatgcctttttaaaaatgtttctctctgtagggttgaagttcaggagaagaaagtccatgattattcaattcctaaaatttgctggattgaacagatttaatttaacccattatgttttaactgctagggttaggtagatgagtttgtaacattatgagtgagcaaaagatttattttaaatcattgaacatatacatttgtcagttgttgatttcttgtttcacactgttgtgatgagttaatttactgaaaatgctatatgaaaatatatagattatatttatttattttttatttataattttaatattagaaaccaacaattcatttcaaagaaaatgatttcaaaactaagaaacaaataaaaaactcagagaagtagaaaaacaagagggtttaacactgtggacactgattttgtaaccccctgctgtcaaaaaatccattatctcataaccaaggtatccaagtgaaagaacatttcatgttgatgattttacacaaccaagggtctaatttccatgaacatcatttccctgtggcacccataaacctctgaaaagtaaaagggtaaagattacatttttcatctgaaaagaagggttagtggatatgcatgaagcaatgaacaaggggtacaggaaagatcgttaattttccagtgagataaggtggggcagaatttagagttccaaaattaagtggaagaagaaactttgggataaatgcgatagaagaatctctagacctttagaccaattagaggttaggataaagagtacaaaatggttgcactctaggttgcatgggttcaggtatgagtagatgggggtatatgtctaggtgtctaatctttcacgactcaaatttgaggatacgaggactcggctagaaaggatccaagaaagggacacaggtattatgatatggcataatagaagaaaaatcaataaaaagtgaacatattgctttgaaatccccagtttttccctctaattctttttttttttccctttgatccctacatattcttgctgaaatttccttttcagctaactcttctttttccctaataagaaaattaaaagaataaaaggatatcaataaaaaaattccgacagccacacctagcatacaagtaaaattctgtttcaaaccgatattgtatatccaatacttctagctgcttgttaatgttatcttttgtagaatgccaaattagagacacaatgttggcagcatcatcattataacaagacattggcggttatcaagaatgtcatggtatgtcagaaactttgacagtggtgcctttttgcttctttaaacctaagacatgatgtttttcaggtagttttatctttatcttgtttgtttatttattttttttgttcaaggttagtatagtgaattacaagtaaaaagtttaccttcttataccagtccaagaatgagcattacactttgtcctccccacctatattaatctggaaaccaaagttcctcccaataactaagcgtgtcttgttggttgcaatgctttggtcaatactagtgacatgctttttggggaagagtggtgttggtaatagaaaatgtttgctgtcgaaattgtatactgatgatctgaccaagtgagaaactgagttcttggggtcttgagggagtgatggaaagatttgatgtggaaagaaaggcttttcaggtaaagtttgaaggcattaatgggggaatgtggatttcaataacagagagaagtcgaggttatgttgtttcgttaggctttggagaggaggagttggattggttgttggaacatttgaagaaagctgtggagttggaggcttccaggggttttactcggaagatgaggggcaaaacaaggacgcatttgatggagatttgcttcaatagtagagggagatttatgaaaattacagaaattgttgcaaagagaaaatctctagtgctagttgttcctgagggtgttaaaggcaatgggtgggaaacccttaggaaggcgatttctatagtccaagatgtgtctgattaggctgtaagagcctcaaagcagaaggataaagaatctcatgtgagcaaaggaatgtacagagaagggcggtcctatgcagatgtggttgtagaggaaggacatagaaacggagcttcgatgccagttggaagatgggcaagagctgtaatttgtgaaagtaaaggaaaaatactggattggtttgatgtggggaaagttattgcgaggatgatgggtacgaaagggatggtgtctataaccctcatttccgaatacaaggggtgcttttttgtggattctgcaaggagagctatgtggtttcaagatcaagggagtttaacagtgagaggaggggttgttgcgttgaggagatggtcgccaaaagaaaactctgttgttggtggaaagtttagaaggggttggttagagctgagaggccttcctttccatctatgggatgagtttcagttaaggtacattttgcagaaatgggggagggtaacgaaggtggcaaaggaaactctgaagctcgtagacttgtcgaaggtaaagatgtgggtggagatgcatccaaatgtcgtgttaccagcgttgctagaggtggaagatggagcttggtcatttacggttgcagtttccgtcatcggagaagctgaagaagacgttcttctcaggccagagtcaaatcgcagcaaggacgaagtaacgtcagcggaaggttgcgtctatcagaggccaaagaacgttgaagggctacgagctactgctagggataatgagtaccacagatggaggcctcgtcatcgctcccgtgctcggtcttcaatttcaaattcagctaccgaagtggagaaaggaagggggaagagttgtttgggcccaacggcgggaagtgctgatgggccaacaaaaccagaagccttttttaaaggccgttttgctagggcccattttgaggagaagaacattgggccttttgtgggtccagtccacgaaactgaagcagggtcttctaatggtggcccagcaacgccttcgtcttcaaagcttcagcaatcaggaacctctgcaaaggaggtgatgccgatagcacattctcaagagtcagcaaagctaaaaggcaactcagttactgcaagacgcaaggcgaggagttggccgccgtgcctaaaggtgacgtctcttgccccaaagcgcaacctagctggggatggcgcaccggaagcaaatcgaggctttatttggggcagatcagtcttcaaaaagggcgccctttctcctgtttcagaaaaatcccgacgcgtcactgaggggacagagggagacgaagggatctcgccttgcaactgggtaaaaaaggtacgtcctccttccttagctctctctgagaaggatcttcctttggttggggcttttaatccaaatattctttccgactcctctgtttcttcggttattccttctcgatgtcaggctttttctccgattccgttggagtcaagccttgtctctcagcgtagtcctgttccgaaaattgctgttgttgagcccagttgtcttgttggcgtgtcccattctgaaggagtggcgtttcccctagaaacctctaaccgaaattctgaagactggcctttatttaaggactctctaagtagcccagagaagctttgtgtctcagggaaggctccgtccccaaacccagaacctcccatcctcccgttggaaggttttcaggttgagggactcacgcctggaaaaatggtcaaggttcagtcggttttggagagtttgaggatcagaattgtcagagaaaatggaaaaggtgcggaagaaggaaaccagagtaattcttttgcggacaaggtttatttcagaaggaagaggaaaaatgcttctggaaaccgaggagaggattaggtttgggtgctggttgtgctgggttgtttttggtttatatgaagattttaagctggaatacgagaggattaggatccaagaagaaaaggaggattgtcagaaggtttttaagtactcaaaatccagatattgtgatgcttcaggaaacaaagagggaaacttgggaccagaggtttgtgagcagtgtttggaaaggcaagagagtggagtgggctgctcttccagcctgtggggcgtcaggggggattgtgattttgtgggattctagtaagttcgagtgtacagagaaggtgttaggatccttttctgtaactgtgaagtttaactctggtgaggaaggatctttttggttaacttcagtgtatggcccgattaatccgttgtggaggaaggacttttggttggagcttcaagacctatatggtctaaccttcccaaggtggtgtgtaggaggggattttaatgttattaggaggatatctgagaaattgggggagaccagattaactttcaacatgaggtgttttgatgagtttataagggtgagtggcttgcttgacccccctctaaggaatgcggcttttacatggtcaaacatgcaagctgatcctatttgtaagagattcgatagattcttgttttcttctgagtgggatacctttttctctcaaagttttcaagaggcgcttcctagatggacctctgaccatagccctattggtttggaaactaatcctttaaagtggggtccgactccttttaggtttgagaatatgtggttgctccatcctgagtttaaggagaagtttagagtttggtggcaagagtgtacgggtgaagggtgggaaggtcataagtttatgaggaaattaaagtttgttaagtcaaagttgaaagagtggaatataatgacctttggtgatttaaaagagagaaaaaagctcattcttacggacttaagtagaattgatctaattgaacaagaagggaatttgaatcctgatttggtgttagaaaggaccttaagaaaaagggagttagaggatgtgttattaaaggaagaggttcaatggagacaaaaatctagggttaagtggattaaagaaggggattgtaactctaaattctttcatagagtggccacaggtaggagaagtaggaagttcattaagtctctgatttttgagaggggggagactttaaacaacattgaggttatttctgaggagattgttaatttctttgggaatctttattccaaacctgtgggtgagtcttggagggttgaaggaattgactgggtccctatttctggagagagtggagtttggctggataggccttttactgaagaggaggttcgcatggcagttttccaattgaataaggaaaaggcccctggtcctgatggttttactattgcagtttatcaagagtgttgggatgtgataaaagaggatcttatgagggtgtttctcgagttccacaccaatggggtaataaaccaaagtacaaatgcgaccttcattgctttggtgcctaagaaaagtcaatcttttaaaatctcagattatagacctattagcttggttacaagtttgtataagataattgctaaggtcttatcagggcgtttacgcaaagttcttcatgaaacaatctctggttctcaaggagcctttgttgaagggaaacacattctagatgctgtgttgatagccaatgaagtggtggatgagaaaagaaggtcaggggaggaaggaattgttttcaaaatcgattttgtgaaggcctatgatcatgtggattggggcttcttagatcatgtgcttcaaaggaaggggttcacccagaaatggagatcgtggataaggggttgtttgtcttcttctagttttgcaatcctagttaatgggaatgcaaagggttgggttaaggcttctagaggtttgagacaaggagatcctctctctcctttcctttttactttagtggcagatgttctaagtaagatgttgttcagagcagaggaaactgggcttactgagggtttttctgtggggagggataggacaagagtgtctttgttacagtttgcagatgacactatctttttctctaaagcctctctggaacatcttcaaaacctcaagattatccttttggttttcgggcaagtttttggtttaaaaatcaacttagagaaaagcaccatttcaggtattaacactaggcaggagctattgtctagtctggcctcggtttttgattgtagagtgtctgagtggcctttatcttatttaggtcttcctttgggagggaacccaaagacaataggcttttgggacccggtgattgagagaatttcgagaagattggatggttggaaaaagacctatttgtctttgggagggaggattacgttaattcagtcttgtttgtctcacatccttagttacttcctctccctctttaaaatcccagcttcaattgcttcaaagattgagaagatgcacaagaattttctatggtctggggcaggggaagggaagaaagatcatcttgtcagatgggaggttgttagcagaccaaaggagttgggaggtttgggttttgggaagatttctttgagaaatattgctctcttagggaaatggctttggaggttccctagagaaaggagtggtctttggcataaggttatagtgagtatatatgggacacatcctaatggatgggacgccaacatggtggttagatggtcacacagatgtccttggaaggctattgctcaagttttccaggaatttttcccttttgttcacctagtggtgggcaatggggagagaattcatttctgggaagatctttggtggggtaaccaatctttgtgctcgcaatttgctgatctttatagagttatttttgtgaaaaacctcactgtttcaaatgtccttggcaattcctttccattggcttggaatttaaattttcatcgcaatcttaccgattcagaaattgatctccttcagagattaatgtcctccctcagtttagtgcgtttctctccttctctggcagattctagagcgtggtctttgtcttcatcaggcttgttttcagtgaaatcttttttcttggccttgtcaaaagtctctaatcctattttgttccttccggccaagtttttgtggagttcaaaagtcccttcaaaggttaaggccctcgcttggatagtagctcatgggaaggtgaacaccaatgataagttgcaattgagaagaccctacaagtccctctgtcctcaatggtgcattctttgcaaaggaaatggagagtcgattgatcacctttttcttcattgtcctgttaccattggactctggaacaagttgttcaagctagctgggttggattgggtccctccaaggagttttgaggacatgttggttattgcttttaaaggcttggggaactctttaagaggcaagactctttggcaagttgcttgccttactttggtttggatagtgtggcaagagcgaaacaataggatttttgaggataaggggagatcggaagagacattatgggatttgattttgttctactccactctttgggctccttgttctgtagcttttagaggagttcctctacatgtgttacaactcaactggagtgaggtttgcgcttcaagagtttgagtttgtgggggtttctctttgtttttagctattgttgggtgttttttctgttgtttagattgtgtaggaaggacctctcatccttctagtgggttcttttgtttcttttttcttttctttctcctgtatctttccttctattaatatatttctcttcgtttctgatcaaaaaaaaaaaatactagtgacatgcttcagacagattacacaaccttacaaagccagaagcctttactgatccatgaagtagaagactagcagagaaatagttgatcacgtggcaaagatttgtttgatttattcctgcattgcccttggctaggagtcgattactttgactatgatctatgttaagtttgttgtatttgctaggatttcagtggttattcttgggcatatggaagccatgtgaattattctcctttggggctttaggaggagggatcactgtagggtgttgaggggatgtgggacaaatttactttctcacctctagtcaattaccaaatggttcagtggagtttctatgagcttaatcatgagagattggtggcaatttgttcaaaggggaagcaaatagtggacatctcgaacttatcttttatgagtgtttttctaggcaattcaggttagctagatattgaagggataattagagaccataaaggaagcaagatccacaccttttggaatctagttcatcatggtattgaaatggagatagagacattcgtattaccgggaaggattagagaggttcatgcattgaaggctcatgcattggggtctagaaatgccattgcagcagctcatgcattgtggggccaggaataaaggtaaatgaggaagttgatggttgaccatgatgcaacccatttccttgactgaatttattgggacttcgttcttggttgatggtgtcccaaagatttgtaaggtatggggttgtattgtactttcttttttaaagttttgctttcttggtcgaggttcatggggacaaaaattaattattccttggttttgtggatagtttgtctaggaagtagtagttggtgggtttttggttttttttttttcctcaccttggtgcaccgtatatacacctccttggtactaaggatgtactccttttttttaagcgccttttgaatgcataatatcttctttgaccataaaataagtaaataaataaaaatatattttttttgttttaattttttctttaagcaagcgcctttttcggttaggtgtctataatataattatttcctttacctagcacccaaatcttcttttccttgttgttattattttttatttttatttttttgataagaaacaagactatattagaaatggacaaagtgagtacatgagaaggatgatgaatcctccttagaattacaaaagctatctaaagaaaggaagattgacctactctagaatagtaataaaacctatacatctatgtagaaccatatgagaattattagtataaaacctctcatttgaatgaggttttatacatctttgcatccatgaggaataacatctcatcctgataggatcaaaacaaatcttctctcattattcaaacctttatgacctacacaccaaatgtcagttgagctgaacaatattgagagggatgtccttaaatgtcgtggtacaagggcccaaaaagattaatagaaatgaattaaatcttaaattacctctaaagttatccacttgccctaaaaaatccttgcatttcttttttcgtaaaaaccaaatcaatgtaaggcaagcgatttgccattgggttttgcatgtaatagagctccccaaacccctatatgaaatggtcatcatatcgcatatgttcctaggaggaacttgacccaaattggctaatctagatagactgtgccataaagtcatcgagcaatgtaaaaaaaggtggtctattgattatgtggaagaaggaaattaggaaagtcgtgattttgtaaagagaattaggtaaacttgtgatcaaagagatttattgtaattaagttaggaaagttttttatttaggtgttggattttttgtatatatatgagtctttgtataggaaaaagattaagaaaaataatttttgccttgtattcttagttttgtcccatggaaatactctcattatttcatcctaatataagaaccacaaaccatctcattcctaagatatttgagtgtgtgtcctttgtgcatgttcatagtccaaacatgggaaaattggacccaatagcagtcaaatatatttttgtgggatattcgtcaactcaaaagggatataagtattaccatccaccatcgttttttttttttttttttttgtctcagctaatgttactttcaatgaaagtgagtcttattttcccactccttatcttcacggggagaattccattgaggaagataaggatcgggatatttttttcattgatccctttcttattaaccctcctaaagtgtctaatctagtatctgtacctctttgtgatcctattgaccctcctaaagtgtgatccagtatttgtaccctcctttgaatctaagccatccattgggcctgctcttgagaatcgaatgactgacaaagtgtactcaaggaagaaagttgtagttcctcaacttatacaagtccaagaatctgaaccgacttctaaaaatgaggtaatagtcttttgtcttcccttacaaactgagtcaaaacttcagtttgaaaaacctatagaccaaaacctacccattgccattaggaagggaacgagggaatgcaccaaatgtcctttgtatccactttcccatgtgtcatttgaaaagttctccatttcataaaagttttgttacaagtttgaataatattcatatttctaccactctatttgagactttatctaatgagaattggagacaagccatgagtgcaaaaatgaaggccttggagaaagataaaacttgatagttggtagatttgtttgcaggaaaaagaccaatgggatgtaagtgggtctatgctgttaaatatagagcggatgggacattagagtggtactaggcaagattggtggttaaaggatttactcagacatatgatgtggattatctaaagacatttgctctagttgccaagatgaacacaataaaaattttgttcattgccagcaaattataatagggatatagtttgatgtcaaaaatgcatttttgaattgagatcttgaagaagagatttatatggaagtccctcctagatttggaagtgaactagccactaaaaaagtgtataaactgaagaaagctctatacttgttgaaattgtttccaaggacatggtttagaaggtttgctaaaacgattaaaaacatgggatactgacaaagtttagaaggtttgctacaacaattaaaaacatgggatacaaacaaagtcagggagatcattagttgttcatcaaacatttagatttagggggagtttcaactcttctggtatatgttgacgacatcattgtaacgggaaatgatgaaaaggaaaaacaagactttgaggcaatgcttgaccaaggagtttgaaattatagagttaggaaggttgaaatgcttcgtaggaatcaaagttgcacattttaagcagaaaatttttattcctcatcagaatatgtaatggaccttctcaaggaaacaaggaagttagcgtgtaaactagtaagcacaccaatagatcctaatcataagcttggagagaccaaggaagatgttgcggtagatagagagatgtatcaacgtctggtaggaagactcatttatctctctcatacaagactagatgtagcatatgttgtgagtgtcattagctagttcatgcacagtctaaaagaggttcatttgcaagctgctaacggaatgttacagtacctcaaggggtatctaggagagggcatcctatttaaacaaaacttaaaattagtacttgaagcatacacagatgtagattatgatggatctatggttgatagaagatgaaccactggatattgcacctttcttggtgggaatctggtaacatggagaagtaagaaatagaatttgatagtgaggtctagtactgaagcagaatttcatgcaatggcttaatgagcttgtgaactaccatggttgaagattattttggaagatttgaagataaaataggatggtccaatgagactttattgcgatattaaatttgcaatcagtattacacataatctagttcaacatgatcgaacgaaacacataaagatagacaaatattttattaaggagaaactagatagtgggttgatttgtacttcttatgtatctattaaccctcaacttgtagatatactcacaaaaggtttaaacagtacaaattttcaagcaagtgtatccaagttggaaattgaaaacatctattcaccagcttgagggagagtgtgaaagaatgaaattaggaaagtcatgattttgtagagagaattaggtaatctcgtgatcaaagagatttgttgtaattaatttaggaaagttttatatttaggtgttgggattttttgtatatatatgagtctctgtacaagcaaaagattaagaaaaagaatttttacctcgtattctttccatatttcttctacagattctccactccttgagcacaaaatgaaccattcagggctaagggttttgtaaggtcttctcaattttagcatgtcattagtgttcacctacttatgtgttagtagccaaacaaagactttgaccttaaaggagactttagattttcatataaatttagttgtacaaaaaggaattgtgtttgtaggattggacaaggctaataaaaaaaatcttcatcgaaaataagcctaacgaagatgatgattgagctcttgcgtctagaatggatggtgacaagtgtacatgggtgagagagaatatgagtctttcaagattctctatctctaagtcattgaggttatgacgaaaattaaggtttcaagaaaacagggaagagaagctaaggatagttgagataggaagattttctaactattacaactctgaaaagagttgaaaactgaaagcatgatggttgatcctctcatggaaaatcttcccaaaaaggaattcttgtcccatcatttgtcacaaaacaagtaaatttggaaaaatcctaaaaacatagtgtaatagccttccaggaagaatggtgtgaccacctgataaaaatattggtgccccatccattgggttgtgttctgtagagcctcaaagtatcctggtgtcaaagagtagaagtttcctttggaaacctctaaacccacttccttgaaaggtcttgattcctaaaagaaatcctccctaagctcaaacccccttccatctttagtttgcatattaggtcctggttgataaggtgatctctcttactctctcccaccatgaccaaagaaaatccttttgcaatttcttaatcttaatgctattgaagatagaaactagaaaatagagaggatattattaggaatgtgagacaaacatgattgaattagagttattcttccacctaatgacaaaaaagtcttttttccatccattcaatctccgtgggattctatcaatcactagatcctaaaaaagtgcttgccttcggattcttgcctaatagaagaactaagtaggataaagtctagttgaagactttgcattgaagcattgatgccaaactagagatctgatcctcattcgcgttgacacttgagagaatgctcttgttttaattgatcttaagactagaaatatgcctaaaaaccaatgagattaacttgtgattttacaactcttccatgtaggatctagaaaaagaagatggtgtcatgtgcaaattgcaaatgagacgctctaaccctacttctacacactagaaagccttctaattaaccactctcttttgctcacaacatactacttgaaacttttgctgctatagtgaaaaggagcaaggagaaatgatccctttgtctcaaatcttctagttgctttattccatcctttgacacttccattcactaaaatcgcaaaaattgtcgaagacaagtaactactcatctaagacttccattttgtactaaaccccttcattaatacatgattaaaaaaatcccaatccataggatcataagccttttgaaaatcaatcttaatgactatccctccctctcctgagcattttttctcatctaccatttcattggttgtctatgttgaagcatttttcctttgttgtttgcatttttttttttcattttttaaaggatctttaatccttgatatattatcaaattttccttctgaatgatttttgttcttatagaaaacctgaattgtgaaaccttttatttatttattcaattattattattattttaataagaaacaataattttattgcattgcaatattaaatacaaagaaggatgagatatctttccaagaagtacaaaattacaaaatctaataaaaaatggagatcaatgcatattagttcaaaaagtcaaatctagctataatctataaaggtataaaatttcctttaaaagaaatcatatgtctagctccacgttttgctagcacatctatagcatgattgcccaagtgagaagcctaagagaaggaacatcctgactatgaagaaagataaataatttggtgcaatcacccataaaactttcattgtcctctttctttcttagccacccatgatataacaatagcaaaatgatctcttataaatttggatagaccacaagcctgcacctatagcaacccttccaagaaggctagaatttttgcctcaatgattaaatcttgatttgtaggtttagagagtgctcttaacattgtgccaaagtgatcactaagcaaccctctaatccttaattgtcttaggttgtacaaagaacatccatcaaaatttagtttgtcaaaattgattggaggtggtgggtattcacatagtgtctccttagtcaacctcatggttttgcaaactaggtgccagtctttcaaaacgaggtttaaaggtatacttgtaaatgcttcattagaagaagcacacaaggtagaagagaagtaaaatgagtcccaaattgctttgaaagacctccacttgtcctaaattcctactccttttttgccaaatagtctaaatcaaagtgaggctagtaatgtgcaaaagaatcttgactcgaagaggtcccctataatctctaaagaatataactaacatctcctacaccctctcgtgtagaacccgatcaatccctacaagtcaacacagtctacattataatgtcaatgttctaaggtaatgtaaaaaaacataatctatagattcctcactcccttgacaaataatacaccattctaggttaagcactttgtatgatctttttctttggagcaagtcattaggattgacctttttctttgctacaagtcatgcaaagaccctcattttttataggtatttggattttcaaatgaaatttatagaaatgaaaggaactaaattggttgaagcaaagatagcattaaaggagccaactacgaacaattctaaggatatcaaggaccaaaatctcacatcagtaaaagtgggtaacaaatagacctaggctacaacaaatagacttaggctaaagcaaatattagataagctcattcctcaatttcttgctctaagggcttactaccaaaattgaagttccgagatatagttggagaagaggaaatcaacattgaggtaatagtagagtttctcaacttcattactctatagatatttggaaattggtcacttaaggatctattacccaatcgaagatcttccttgaagcaaaatttttgtactattacccaaagaataatgagtgaaacgaaaaaagtttaagtttatgcaatagtcttccaagtgcatatatgtgaccacctaataacttagtctacactagtacatgctatgtaggggtagtggagaggtgagtgaccatttatttctacattgtccgttcacttcggggttgcgacacaagctattcatactggcgggaatggtgtgagttcagcctagaagttattgtaacatgataactatctcttatatgagttttggaaattctactagagacaaaatcctttggaatattgcttgtcacatttttatttggatcgtgtggtaagaaaggaatgctaggatctttgaggacaaatgaaggacatcagagatgttatgtgatttagttcatttcttcacttccttttaggcctcttgtattaacgattttaaaggcattcctttgaatgtcattcaacttagttgtcatttggtctgtacaccacttgggttgggccaacaatgagatgagcgtagtcttttttttttttttttcacgagatgaattccttgtacattttttgtgatacatcttttttgtacaaatctccttatatagtggaggtttttagtggttagatcaggtttgtgtatttatggggaggattcctcatccctctcatgaattctttatatgtaagtaatataatatatatatatatatatatatatatatatatataattttttttttgatttaaaaaaaaaaaaaacattgttggcttcccatttattagaatgacccatagatactcaagatgaccttgtgccaagaaagcatcactcttcctatggaaccttcacaaccacttccctaaagggctctattttccaaggatatcctctcaatgcataaccttggttccctgtttggtttacacgcttggttccaacctacaagttaatctctcttcccttcccccttctttattgatataatggattgctaatgttcaattcaccatattattcaaaattctagtcaaggagactggaacctagtctttttgagagacttcaatgattgggagttggatatggttgggtagttgctccacaccttgaggggtcataggccttctttggaggaagattcagttatgtggaggtgaggaagaaatggtctattcagggtcaaggaagcttataggctgctggacaaccctaatgccacaacttttccttcaaggagcatatgggtggatagggtgccaactaaagttgctttttttgcttgggaggcgacgtgggggaaggtgctcactctggacaggctccagataagaggggtgcaactccctaattgttgctttttgtgtggttgggaagaagagaatgtaaatcatattcttttacactgtatagtgactagagctttgtgagatattattcttgggttagtagatgttaaatgggtcttcccagaaactgtaaaggaggtcttaacttcctagaggggcccatttgtagggaagaaaaggaaaaaggtttggaaatccataccgttgtgtattttttggacggtttggaaggagaggaataggttagcttttagggggggtgtgttgaacatccagaaattaaagaattcttttgtttgtaacctatggagctggaccaaagtgtatttaggcgaggagtctctctcccttataggctttttggagtgggtagcatccacttaagggaaggtagtctttatatggtcctgtagtttttttgaggctttagccgccttgtatactccctgtatgctatgtggcttttaacatttttctaatgcatatcttgtttacttatcaaaaaaaaattcaccatattattaaatatttggatctagtatcatcatcctcctagatgcattttgtttgaagtatgttaaaatggatggataattgataggggaaaaccttttaaagtcttttcaaggaggaagacctaagtagactttaagtaggattagtattaattagaattgaattaagattagtatttgttggagtctaattaggattagctagttaagttgtaatataattagaatttgagtcatgataggttattagagtcctagtagctttttgatgttataattagaatttgagtcataataggttattagagttctagtagactttggatttcttagagaaacctataaataggctaatcaatgtaaatcaaagggatgaattgattgttattaatactattatatttttttcattgcaattgttgcaaccctcaacggggagactccattgattttcttctaggtgagattcctagaaggccttagtgagaacctctaaggttttcatcttttcttcattgtttcttctttctctctattttttatcttatttttctttacaataaactttattccttgttcctctccttacaccttaaaaaaaaaaccctagcccaccaacccttgagtgtagacaaccatcctagggttgtcctacatcaataatattcttatgtataaagttataatattttataactttaggaatgttttacttatggcaagtgatgttgagaaggatgacaaaatggatgctaattgttggttcaattatgaaactaaaatagtaagactttgtgtgttcatgtttgttgattgcaatgtgcaaatggatttcctagttctctttttactatggaagaaaaagatgcataatatttaggcataaataccatatcctgcctttgcttttatgtgtggctttgtgcgagttaatgtttagctaggttcatatgtaaattacttctatggtatccatacttgttaactcgtaaaacgtattgtgtattatttttttatttttcaatgtcgtgtatcttattgtattgtgtatcgtaagttttttataaagtgcaaaataaatagaaaaatatgtatatgtgtgtatatctatttaaagtttgaagtatagagtaatatataatcaattttatggaagatagtaggatctaaaaagttaaactatatcatatcatatgaaaacattgaatgttgaagttttgacaagtttaaattagcaaaatatgaccttaatatatggattcatcataaaatccacaaaaataaacttcttcaattttgagccataatattttgttttaaattctaactaggtatatacacttattgtgttgttaatctctctctctttctctctctctatattatatatttatatatacacctttataaaaagatctaatattttaagtacaaatttttattcactaatcgtcatcattttcatcgtcaacattcaaaccattcaaataattttttttttaatattcattgtaaaattaaacttgacttctaatatagcatttgataacaagaagttaacttttcatataagattattttacccatttctcctttttacaatcattttttaatcttttagtatattttaaacaattaatttaaaaattcttctaacaaaatatatatatacaaattgattttttttttaaatatagaaaatagttgaagatgtatgtattgttgaatcgtaatatcatgtatcgtaagatacacattaaaataagatatggattgtgatatgtatcgatttccataaaaaatgtattgtatcgttgtatcatgttgtgtatcataagtttttaacaactatgatggtatctccttattagaaattgtttgatttgcagcaatcaccagtacagtagataagttga

SEQ ID NO: 10568 - DNA, 2817 bp, Vitis vinifera
  Intron number 4 from transcript GSVIVT01034679001 (locus G SVIVG01034679001) derived from phytozome v7.0 (chr-ID chr1 3; pos 7543648 to 7546464 reverse strand)
tttgggaggttaaaaacttgaaaaaaatttcaattgtaacaaattacctataacactatgaagttaggtgatgattgaaggtttggtgtcatggaaggtgttgggttaggttaaggtttgctccaagttgggtggaggtcctaaggacaaaaggttctagcaatcataaagaatgaaaaatatcttccctagctcaactactaattggtgaatatttagtggacgactagtttgtggttggatgtttggtaccgggttgggtggaggtcctacagacaaaaggctctagaaatcataaagaatgaaaaatatcttccccgactcaactactaattggtgaatatttagtggacgactagtttgtggttggatgtttggtacgaggagtacgtgctcaaggactaatttctaggtcttttctccttgctagttgatgggaatgctttgtgtaatgctctgctctctctcatgtagatagtgtccactctataccaatggattctcaagactttaaaatgaatttacatggttaaaagaatttcctacatatatagtaccagaaactttttctcttatatgtgggatatcacaattaccccccaatgcagacacgatgtccacatgattggtgggcctcttgtactaacgaatttaaaggatgtcctttaaatgtcatttagcttagttggcttgcggtacgtacaccactagggttgggccaccattaagagtagccaagctgtcttttcaattgtatagcggagttttttagtggtttagatcaggtttgtatatttgtggaaggattcctcctccctctcatgaaatctctatatgatattaatacaattcttgtttctagtaaaaaaaaaaatgttaagaccaattcgcctcgtaacttgttgagtcgacaattgatattgcaacttttaaccatgctttttggtgaattgacatgacacctttgtttcctaaaggaaaaggaaggaatggaagaatgcaaaaccctatgcatatctagcatacttagatgaagtgaaattgagacaatttttgaaccaatggagagttttaagttaagattaaatgacttttgcatgaagtctgttcctattgtcagggaattccttaggaaaaagaagcctgtcctttatgggttgcattaatgggttgttgttagcttaggatcttgttttaggtttttttccatttttaatttgttttttacatgtgtttcttgtatggttaacttgtatcaggggccctttttgacacttaataatatatttttttgcacctgttaaaaaatataactaaaaagctacctgattcatacctaatctgagcaatccgataagttggttcatcaggagttcatcttatccaacataggtcttggaaaaactttcaacctaaggtgaggttgggttgtgatttggttgatctccaacctgatagccctgcattgtggccttactattattgagataatatcccgaaaaaatattcaaagaatctaaagttataaattaaacaatttttggagttcaatttcttttagttgttaaatagtttaattgaatttactacttagtcttgaagtgatgccaaagcttttcagtttaaaatactttaaaccttcaatggttatgtttcaacactaaagtttaagtacttaatctttaattctactaaacatcattgagaaaagaatgatggaaagtgaatcaagagtcattgtccctggattttaaattcttcctatatatttatatagacaagagttactgttttatggagactataattaaatggtgtatttgtgagagttatggataaataccaattgagggctagatggggaaattaaggagagatggttccatcatatactgcatggacctacctgcaccaaaagaaatgatatggttctggtttaaggtgctaaaaagagaaaaggagggtaaaaataatatggttgagtctgtgcatgtgattcaacagttgatatcaatcttgatgtagtttaaggtgcagttggatttgtatagctcacttcatttattggggataaggttttgttgaattgattttagaatacattttttttcttgtttaaaaacaaaaatgaagttcatgttgtttatcctttatctgcaatttttttcccctggaacctttgtctttattgttaattataatttattttattatttatttatttatttatttatttattttgttgttgttgtgcaaaacaaaaatcttaggaaagaatcaagaaagatttgttttgatgggtggaggtttgcctcactcctgtcctatccaattgaagttactgatattgaacaatggcattataatgggtttcaattgtaccctgctaataaatataatgtgagagaggcttaactttcttcattgagttattggtttttagggatatttctttatgcattcatactttaccttgttgaactttcaagaaaatgcaatatattgtagattggatgatttctcttctactcaaagtgagaagattattctgcaaaatatcatcttcttgggctttgttgtcctatttctcatgttgtttctgttgatcttgattacctccctttatgttttactttgtctttaaaattaaccttccagccttccagtgttggtgctccaagtttagggatgcaaaagctctaaatctagagttaatattcatcaaaattgacctcaaaacatgaaagaaggaaacttttgattttgctgggctctaaggaagctactgttaagtaagatctctctgttagactatac

SEQ ID NO: 10569 - DNA, 6873 bp, Vitis vinifera
  Intron number 11 from transcript GSVIVT01024325001 (locus GSVIVG01024325001) derived from phytozome v7.0 (chr-ID chr 16; pos 912003 to 918875 reverse strand)
tgcagttttatctgtcaagcaatacgcaaggtgaggtaggtaaaaacaaattgttatgggttatgaactgaatattcttaatgaatacaactaaattgcagaatttatctggaaatcatgccatttttatgaatatttaatgtaagttccaattagcgattatatttatgtcagaattgaactcctatgcatgctatggttaatactaggaatattctatgcatgcaattatatttatggttaatactaggaatgtacatactctctcgccctatttatttgtgattagaatggagactgttagtagtctcataaagagtgttgtgatcgggggctttttgtcaagttgtacgatgaaggggtacaaatctcacatttgctgtttgctgatggcacacttgttttttgtgaggcttcataagaccagatggcttacttgagttggctgctaatgtggtttgaagccatttcagggttcagaatcaatttggacaaaagtgagattttactggtggggagggtggagaacttagacattttggctcttaagcttgtttgcaaggtgggactacttccttcctcttacttggggcttcctttgggcactctatttaaacccgtggctgtttgggaatgggtggaagagtggttttgtaagaggttagccatgtggtaaaggcaatttatctctaaaggtaggagaaccactctcattcgaagcactttgtttagtattcctatttagtccttattgtgcatgtcaagggcggttagattgagattagagtagatttagagggattttcttttgggatagggggacccttgagtggaagcctcacttattaaagtgggtggttatttgttcagatgggatgaaaggtggtttgggtgttatatgtcttctttactcaatagggcccttttatgtaaatggagtttggtgctttgtagacaaaaggggcgctctttggaagcaagtcatcaatgggaagtatggggtaaacaatgggggatggagcatccgtgcagtgagagaggggtatggagtgggcttatggaaagtgatcaagaaggaagggaatctcgagtaataggattgtgtactcaatggataatggtagaagggtgaggttctgaaagggtgaggttctgaaaggataagtggtgtggagatgttcttttgtgtgtttccttcccctttttgtatgccttagcggttgcaaaagaggcgtgggtggtggacgcttgggattctttagttgaggatggaatccttgtttctcaaggcccttcaatgattaggaggtgaatttggtggagtggttgcttatgacaatctaagagaagaaggtgtttatatacttggaagatagcgtgttgtggacagagactaagaatgagaagttttttgtcaagtccctttatgttgcattggagctaggaggtgtagtcccatttccaaggaacatcatttgaaacccttgtgaaccttccaaggtgggtttttttttttttttgtttgggaagcttcatgggtaaagaccttaactttggatcaagtgaaaaggagggggtggtctttagcaaccagatgtttcctttgcctcgtcgaagaagaatctatagaccacattctaattcattgcactaaggctagagttttgtgggagttactttttgctctctttggtgtgacttgggtcctacccttgacggttagagagactctccttagatgacatggttcctttgtgggcaaaaagcacaaaaaggcttgaaaaacaactcccttatatctcttttggacggtttagaaggaaagaaacaaaattgcttttaataaggaggagctattgattcaaagattgaaaaattcttttgtttgtagtttttggtcttggactaagttgtttatagatgaaaggtctttacctttaatcaactttgttgattgattgggttctaaatgagggtgggtgaggttttttgtaacacgtcttctcttttgtttctaccttcaggcacctattgtatacttcttgtaaccaacatcatgaaccgtccaacttccttgcaccttgatttttgtttctggagaagttgcttgtaactggtagagatgcaatgcgggtaaagattgtcagtcttcctaatcatttaccagctaacatatcattcaaatgtttatattgcacccaattggctgaaataagccttttgttataggtctcatcttcccttgttcaacatttcctagggcaatagagttccaaactttgctcccccatgtcatccacaaggttttggttctttccttatgtttcccctcacccttaacttttcatgatatttctattcacccttaacttttcatgatatttctactcttttggtgttcttggcggcctcaagggtgactacttagttgctaaattaaaattcattcaagtgattattgtttttttccatccattttatgaaatataattgtgatcttctcacctcttttcatattcactattgttccttttttttttttttgtggtgggataggggaggaggattcttatttttgtcaacatcatgttgaactacttattctagttggttattgcagaaaaatgaggaaaaatccccctgatttctcccaccttgattttggaaaacttatatcagatttataggagatgataacaacaaatctgctaaatttagggtgaaagaagcctatagagtgatgaccagaccaaatgatattgggtttccttctagatgtatttgggtggattcagtaccaaccaaggttgcattctatgcttgggaggctacttgggggagggtgctcactcttgatagacttcagaaaagaggatggcagcttcctaattgttgttttctatgtgggtgtgaagaagaaactgtaaatcacattcttattcattgtatagtagtcagagttttgtgggatattgttcttgggttatcaggtgtgcagtgggtttttccagaaactgtaaagggggttttaactagctggaggggcccttttgtgggaaagaaaaggaaaaagatatgaaaatccatcccgttgtgtattttttggatggtttggaaagaaagaaataggttagcttttaggggaggagagttaaatatccaaaagcttaagaattcttttgtgtgtagtttgtggagctgggctagattgtatattggcaaggagcgtatgtcccttataggattcctagaatggttggcgtccaactaagggatggtgaggcttgctgtttttttggctttttgaggggtttgttgctttgtataccccctgtatacttgtaactctttgcccctttatcaatatatcttggtttacttatcaaaaaaaaaaatctgccacctaactcctttatttgagtgataaatatgaaagataaattctaaccaatgtaggaaattcaaaactgacctagagatatttgataacaaattatctttatctctttatttaaactagctaacaaacacggaaacctagcttgagactccctagaatcatgcaatcctccataaaattcggacttatgatctgaatctcatctggatttccacagttattaatgattaatgtagggtgacatgtcaaaattggaagtgtaaaatgaacatttcataatttctgagtaccaataggaagatgatatcttcttctctctttgaaaaagtttttgtttctcgtaggaacatttattctgtcaatgttttccagagtgctgtaacaagtttgcttagtaaacttcaaaaatttagttgctagactttaaaattttaatgatacattcaagagtttagttagtacttcagagttttcaagtaaccttatgttcaaatggccatggaaggacgcccttgataatagatgggaaatcagtggcctattggagattaggctaacctcaccaagcaacaaaagaaccagatgaaaagtgtattgcatcatatctcctaaaaaattgtatcgcttcatataattaacatgtgtcagcccttttcgaggtccctaatttaaatccgtgtgttctcttcattagttgttattaattgtacactattgtcattcagcctcgttatgtaattggtaatgacaaaaaatacttgatcactctaaaaatacttcaatctacatcgtaagctctaccatggtgatgaaccatgtcactatacaaaaatctagctgaagcatctttcatctccttgtgatccagcaatgaggaagtcacctgagcaaaggttttatcccttcgctcaatgaatctgctctagtttcaagccatggttttgattgtgacctactgtgagtctactaagttttcttcatctctcagtagactttgtttctgtcaacactttttggagggtatctactctgtcaagaattatggtgtcacctctcccactataaggtgtatcatgtttttggtgctcttgcatatttgactttccctgattttagtttcagattgaacttttgatctatttttctctgagtggttcatatggtaaacaagcttccccaaagtgcaatcatataagacttatatacgatactcattgtgttaaaagacgaaaggcggtcttgaggcatttttcccaaataaggcaagacacaagcctcaacttaaacaaataaaaaaaatatatatatattttcaaaaaaaccagaaaactactcataaagtcctaaaaaaattgaataatgaaaaaggcataaacttaataatgataaaaatcaattatttgtcattgttaataatttctagtttagtttctttttctcttttctaaaatttagctctctcatggttttatcaaataattttcaactttaccatcattattacttgcaggatcctccaagggatataatcatatccaattgttatattattctccttaatagtgctaataatcacccattctttttccttatccaccaattgtagtggtttttttttatttatctacaaatgataagataatgattgtatatgagatcaaatagtcaacaatgcccatattttttcttctcattctctctttttcctttccatttaaaaggttaattggaagtcaaccaagctcttatttgtgaaaggtttaaccaagttgggacccaatgcaaaactcatgaaatctatatcaaaaggctacaaaaacatagatgatataatccattaaaactcattaaatattgaggcttaagcttcttataaaatatatacgaaaacctcacaaaggcgggtatttgatatttaggcctcagtagccttgatagggtaaggcttaagccttaattaccctaactaaggctatagcctcatgggtaattcgtagagccttgcctcaaggtgtaagccttaatagccttttaaaacattaatgatacttatttcaatcttgtatattaataactgtgaatcaagatagaaaatacaataattactttgaaaacattccaaattatatttgggaaaacacaaatgatggtattgctaattccttataaatcaagtattttttagtgtcctttcctttttcttggaaccttatcttttgtcgtcatctcattgattgtggagatagaagatttggaaggactaatgtcttctctctctcatgtgcacttgatttcatttgtccccaataagagagtgcggtctttatcttcttcaggtatatttttcagtaaaatccttccttttacccctgtctaacctacaagcccttgtgcatttctctccagaaaaagtcttatggcaatctaaagcaccatctgacgtcatgatcttagcttggccactggtcaataagaaggtcaacatcaacaacttgctataggtgaggagacttcacaaagcccttagtcctaattgttgcattatgtgtacggtgagtggtgagacagttgatcatctctatttacactgtccaatgactttggcgttttggcatagattattcagcttggttaggctaaattgggttccttctaggagcataagtgacatgatgactatttcctttagaggcttggtgagtacaggtagagacaaaactctttgcctcattttgatttggataatattgtgggagagaaatgcaaggatttttgaggataagtggagaagtatgaagttgatatgagacttaatttacttctatttcactttttgggtctcaacaattttagattttaaggacactcctcttagtgttattcaactctattggatcttggtgtgtaaatagaggtttaaaacaacaaatcttggagcaaagctttggcccttctttgtaaatgcattgatttctttggagagtaaaacctcacttcttttgtatagttgtaagtggtatacaggagacatcttatacatcagatcttttgatcagcatttgtatattttggaaggatttctcattcttctcatgtccttctaacttggtattaatgaatttttgtttcagataaaataaaataaaatagtggtaaactagttttatattagtacatcttaattatatttcaaatttatgaccatttaaatagttcaggaggcatataactattgttataattttatatatttgtgttattttagcacaattgaaaaatttgcaattaattatagttcttgcatttattgaatcaagttacatgcttaaagaatactcgctcaattctatttccatttctttgtaactatttaattcataaatttatttgtttgcattatgtcactggcattttgatctttgtattcaattcaatcagggatctcccagttgtgctactttatcaattgctta

SEQ ID NO: 10570 - DNA, 3830 bp, Vitis vinifera
  Intron number 4 from transcript GSVIVT01034237001 (locus G SVIVG01034237001) derived from phytozome v7.0 (chr-ID chr9 ; pos 13244127 to 13247956)
aggtttgtattttagcttttaattccattgcttcaatttgaaatttaatagcaattcattgttttcacagaactggttaggagtgtcaagcaatggcataccattagaactaagaagtcctgtacaatctacatggagattggaattctctaaatgtagtatgcttgatatacctcctaccttattgatggcttgattagaatacaatctgttttttcctagaaatttttggccatatgtttatgatattttgcttgaatttgatagaatgaatggtgaagtcatcttcttgttaatctgggccttagaagcttttcatggccttcacaaacatggaatttcttttcagttggtctatttatccttaggatgcttgttagtggtaggatatttaatttaaaaatatggtttgaaaattttgttatgaaattgatttatgatgtcaagattgtctgcataacaatacaccttgactatgccctgagtgcttgttttgcttgttcatttatttatttttttaaaggcaaaaaagtaatattataaacaatgcctaatcaaaatatggcccaccaaattacataggtagtatagaaaggtgtcagaaagatgtattgcatgtttattcttgaagatcatcaagcatgaattcatcagcaaactttaggcattgtgaaggaggcaatctagtttagttcttagtatcacaattaaaccgtgattagattgattagaattgtttttggatgaaaggagttcgagtttgagaaactcttaatttaatgaaggttctgcttgatcgattcaagtaacaaaaaagctagtaaattcttgcaaagttagttcaatcaatctagtgaaaatttgttcgatcaatcaaggagcacacaagtggcagagtttttggctctttgatcttcttggaagttttttcaagcatgaaaaattctaaatttgatttggaagtgtctcaattggtggaatacaaccaagtctcaactaggactagtattgcaattaaccttggaggtctatctctatctgatcataattaatctcaattgaataagctgtggattttgctaatagaaatccaatcacatccacataaaacacaataatatatgtggaaacctctttacaagttaaaaaaactagtagccatctcgactactcaacatctactaatcaaaatcagattacaaaaatatatcttaccaaaactaaatgcacaaaatgaatcctggacctgctcataccccgagatttgcagcttcatgccaattattgaagtccctttaactttagtctttggaatcactttggctttgatctttgaacttgctttgaatttgttcaccaaaagggatataaggatcacaagaatccttatttaattcaaatctaagatgaaattctcatgatctgacataataatcggattgctcaattcaagccctaaaaatgctctcaaatgtgttcttaatgcgatttcgttgagaactgttgagagttgttacaaatgccatgttggctttatttatagcatatgtgtgtagagagagagaaaatgccatgtggagaatcccaattggttcttctatggagagtagttcttaagcttggggataagaattttgggaaatattgctgatatttccttgaaatatcatatttccatggccatctataggatatgttagttgatatatcttttggttgatatttcaggatttttctcaattttttttctgataaatactgattttcccaatttttcgatggccaatgttttggtcaaagctccaaaaatttttggaaaagcatgctaggacttgaaccctccttgttctcctacataaaaaaagagtccatgaccacttgaactaatgtgttcttcattacataattgctaacaaatatatgtagtatttacttaacttttcatctctcattttaataaaaaatgaattttggagatgaatatatttttaatacatttttatcaaacaaaaatattaaaataaaacttcaataaataatttaattttaataatcttttattcaaattcaaatgatcaagtcttaaaaatataaaaaccattatcataattttttaatgggtcttggttaataacttttttatattaatataatataacaaaagtataaatttaaaaataaaattataaacattttaagaagttatttagaagtaacgactttaatatgtgtattatttcttgttttatcttttctcttttttaaatttttcctcaaaatttcttccaacatatttttttgtcaaaatttccatcaatgtttcatgatatatcctaatatatttctaaaatccaactaccggtatattcgtgaaatccaatatttttatccttttttgagtttacaccacaaacctcagaagaagcaaaaccttggggtaattcagaattgttaaagaagaagtgagctatcaaccgtgcctagggagcagttccaaatcacagggcagtttgataggaagttggattgtggttctctgatgcagaattgtgggaagctagagttttcaagtcatagagtgaattgaatagatgaaggatgtatgataagggctaaaacataaatagggaatggttctaaaatgtgagactgttttgagctcctttgttgccaatctacggggcaatttggccactttctaacttgtgctcctttgttgtcaatccgttatgagttaggagtccaaaccatgggcaatttggtcaccttccaaaatgttgattttcatgccctttctaatcactttccctatctagcattacccaagcatttgggcttcctcagtggtctcgatatgccatcacaatgcctcaaatacccctatacgattgcaatctaatcttatgtgatttgaaacaatttcatctctatagcctacattatcttgaccatcaaattggcattatctttagtcgagcattatggcaagcttgaatctgaacatgatggtgtcatcaattaatcatatgtacttggaagtagttatcaatcctaaaccaaagctaacaattgaaacggtcatggaattgccaatacaacttcaattcatttacaatctcctctaatacatctagatggtatattttcttaagtaatttgtgatagaaaacacagaataaaaagacatgcagaggtttaatctgcattttttttttgttataaattgataaagacatgcataataacagttatattccatctttaacttgtagattttgagtgttgtgcttgttgtttatggcttcattttgtagtttgagaaatttgacttatgggttcaaatggtgcggcttgtaagtccccatatgatttgtagatttgtttcttgtgaagtttttgattcaaatataacaactaaggttcacactatttgattttagtgatcattagcattccttataaactcaaatttgcctagtgcattgcttttgcctgggctagataccatggttttttgaaggattttcaataaaaaatttgatcctatctctttctttgtttttcctttattgattgtgattttgttttgataacaaatttgttagaacaggttaattgattttgtatcaaatgaaaaaaattaaaatcaaatctattcactcttctcatggtcttgaggatcaacaatcttcatcatgtaacataaactcgctcctcgtaagaagattatgttattcattattaacttaacatcctgtcaatgcttgtagccatctaacattctctggacacctctctgtgcagttactttggatcatattagtggcctc

SEQ ID NO: 10571 - DNA, 5612 bp, Vitis vinifera
  Intron number 12 from transcript GSVIVT01030942001 (locus GSVIVG01030942001) derived from phytozome v7.0 (chr-ID chr 14; pos 19505369 to 19510980)
ctgaggtattatcttccattatgagatgctattttattctgaggattgagttgatatatttatttacatgaagtttaaaaaatttgtatgaacaaattttgcgtcctacaatcaaatagacaagataagaagtgaacagaataaaatttatattacttaaaaacaaatgattggtgcaaaccctctttggtccatccttcagaagagaatatgagccctttgattcaattacctttcttaattttaatctcagagttggtgagctcacatccttgaattggagtttaatggagggccagggataacttgtacccagataaaattgtatcagttctttgaatagttctaaaagaacaaacggaaattgtctgaatattgtctttgatcttaaattttgaagttggacaggtggcgcatgtgtggtgctttgatgttctttcattgacaagtcaaactatgtatatatgctggttttgatcaaaattctaaggtccctctttctttcttctaaggatccctatgctaaagaaggatatttgtatttatagttgcaactaggttgtttaatttgacttttcctaatttgattttcttgacttgaggaattagacttctttatttaagaaatagctttccttaatttgagaaatttgccttcttaattaaagttaaacttttgttctcttcattttttacaacaatttaattataacacttgatttgtgatctttcaaacaccaaaacattgtgtattaaagctatgcattttttatttttttttaagttgtttaccacataaacaatttttggattcatcatcttcaaattgaactttgctctgtcgtcttgggattttggttagaaaatcaaattttcaaatttttatttttattgttgtcgtcgttattgttattagtattactattatttagtttaaaagaaggctcttacactaatggcaaattttcttattatttgctttcaaaataatgacttaaaatagtacaattaattaccttctagtgtaagatcttcctttgaaaccaaatgataggaaactttctcaactttcgtatttctatcttccaccaaaaacttttctatttataagtcccactttcttcttcttcacgcacatcaccttttgattttcctttcattttttctatctatacattcatgataaatgaatcaaccttgtcaggaaatgtcttccttttggtttcacacattttcttttggtgttgtcttgtcacatggtcatgtacccatgttgatcgcatgtattttctcactctttttcttcatttctttgtacaattttctttttttcttttttctttttttttttggcgtccttaaattgcttttagctgatcaccattcaatacaactgattagacatccatgtttcccatgtgttcttgttaaacattatgactgcttggagtattgacattttgtttttcaaatatgttttacctaaaacatgtgagtataatttgatcaaactttcatactttgaaagcttgaatgttcattacaagaggtagccctaaaccctaaaccctaaataccattttttgtttgtttgtttgtttatttatttattattattttatttttttattttaattttttgcaccgacttcttatgaaatgaagagaaatcagtttgtgggtatgatcttcaagtagtgaatgatggtgaatgaccaacaatgaaccagagatgatagaggtggcaatataaccatagctgtagtcaagcaatggaaatggtgtataagttgctaactatgggtctgatggtggagatctcataggtgtcaagtgttgaatacaacattgtgactgctttgaatgtcaatgttaatttcatagtattatgagattacgtaaagaaaatggttggagatgtggcgattcttggaacttgcctttaactggaatgatagttaaagctggaaattgtggaacaaaggtggtctgattgttggactcgagtgtggatacttatctaggagtcggattcttttaacttcaaaataaagaaatggggaaactagctaaaaaagatccaaaatttagatatagatacgaggatgcaacataataaaagggaaaaaaaacaatcagaaattaattaaaggtaaaactatttttaataagaactttctttttttaatcttttatctttctcttttctttcttatccctaactattcttaatttctctctttttttgatgtaataatcagctaaggaaatcaaaaattaaaaaataagtcaatcaaaatcaaagatccatgtttgaagtaaggtaagagtaactaataagattccctacccacactcatgttgtattgtgttgacatgagtatgctaggtgaagttggagactttgagcataataggtggtggcatggttgttgtcttgataaagtaagcagaagaaagggaaaaggaaaggaaaaggacagaaggaagaaagaaggaaaggaagagaaataagaaaggaagagaggggaaagaggaaagagatgagagggaaaaagaggaggaagaaaataaaaacaagatccacctaccatgttctctctcacattaccctttttcttttagtatcattttttagttactttcacatttttttagtatcatgtttacatgtaacttgtatttgtttgatgcatggaataagaaattgttaatctttttagcaaacatgaagcccttgtcatgcttgtgttcgcttatcaggtaacaataacactatgttatgccttttgaccctatagaagatggatgttgaaatcttagcaccccatgcaaactaacttgaagactagtgttgaacttttcacagtcaattaagttgagtgttaaaatttgacatccatgaagaatggtatgacacctaatgacgactagtttcaaaattttggcactcaaggaagacaaacttgaaatccagtgaagttggcttgacatcctatgaatacttgtggatagtgttttcctatatttgatttggtttatgtagtggggaaaaggtttataatccttctttatacttattccattgcaatgaaatgtttgtttcttgttttatatatacaagaaagaaaaagatcttatgaggactagcatcaaaatttagaaagcttaatcaaattggttgttaaaaagttcattggtaggatactaaaccaagatgtttgttaaaaagttcacattggtatgataccagaccaatacatgccaaaactttggtactctataaagattaagttgacatccaatgaaagttgccactcaatgtaattaggtgttaacacctaaatcaagaacaatgtcaaaatttttgcactaaaaattgttgtaaagttggagttctctaattctagagatagagtttctatttgtttttttttattattattattttcttttttttttttattattattttaggaaagaaataagaatcttaacaagctagtttaaatcttagattttttttcatggttttatttagtttttaatgtttcctaaagcttatcaataagattaattattgtaaaatagattgattataaataatagtaagtcttttgcattatttgcaattttaaatggtcaaacttcattacttttcttctaagtgagactctttctaaagacctttttttgttcttttattttatttttacttttctcttctttttttttttttcttctgttacctctctcccctttttcctttctttttctttcttttcttctttcttcctcctttcatttcccttctttctatttgtaccaaaactacaaccactttgtcgttaactagaaggaagtgccaaacctctgccaatccaagctcgttgacatcacccacaacttatttgcctcatggaacctctagcactccccacgtctctagtcatcatctccatgtcaaaactaagccaccatgaaattagttttagagttcatgatatacattatgggcccaaatcctacaagcttaagattttaggaaaattggttgttcaatatagtatcagagcctcatttggcaggaggtcatgtgtttagacctcaccatatgtttattttctcaatttattaagcctagaagagactactttattccccaatttcttaagtccatgtataaaccaaagggggccacatgtgagggagggtgttaaaatggatgatatacattgtgagcttaaatcctacaagtttaaacttttagaaaaatcggttgttcaataattagtaccattatttgctgctactaataatgttttagtcaacacttcacacctatcaaaatgcacctcaatcaatgtggggccaatcaacaaggcaatggaaagagaaggaaaaagaaaaaaagaagagccttgatgaataaggagaataatctttgcaatagggttaattatccatcatcaattgccatcctttagggagtcaaatttcaaaaagggatgtatttcaaggaaaagatggtgggacttggaataggaaagttctctattagcgtgaaacccttctttaatggcctaaaagggtgtcttgaagaaaagaaaccatagggcacaaaataaggtagtttcctattagtgtgaaatcatttcttgatataaacagaaaaggagaaattcaaggaagaaaatagaagagtaaaaaggaaaacttcaagaccccactatattgatcacaagcacctattgctttatgcctcaaaggtgtagtatttgtagacactaaaagatttgttgtgaccaaatcacaggcaaattggttattagttaaaagatttgaaaattttattttctaactagaacaagctaacacaacaaagttgagtaatgattctatatatatatatatatatatatatatatatatatatatagatagatagatagatagatagatagatagatagacatagatattggatacatggtagacaactcaaaaaaaaaaaaatcttaggtttaacaagcaatatttgtgcattttgaaaataacaaatcaagccttacgaaataacaaaaaaaaaaaaaacggaagaagaaaaaaaccaattagtcaaataaaatttaggttgaaaagggaggaaaaaaaaaatctcacacttggaaattttcttaaattaaggtagatatttcttaaatctaggagtcaaagtcatttataagaaaatcaaatgaatctaggagtcaaattcatttaattaagaaaatcaaacctagggatgtcaaaataaacactccatctgtgcttataacatgaggagaccttagaagcctgatcttggatcaaacattcttcaactaggtggtggaaaaatgtctaagcacaacacatgtgccattggataaagactaatattcagacaacttccttttgttctccaaattattcaagtttatttaagaacaaaccatttttatcatttgatcaaactttggtataaaaacgcgcttgcagtggtcttcagttggaattttctgaaaattctgttatcctttcttaaatttgtaattctttgtggtttcaggtagttgcaattgatagaaaga

SEQ ID NO: 10572 - DNA, 5658 bp, Vitis vinifera
  Intron number 10 from transcript GSVIVT01030858001 (locus GSVIVG01030858001) derived from phytozome v7.0 (chr-ID chr 14; pos 17812369 to 17818026)
gggaagtaagttatgacttaaataacacagaattccattgatgagttgcagtgagatattgcttagtgattttaagtctgccttttatttagtgagctgctttctatggctagaatttccattcttgtagatgaaattgttaaattagaaaacccatttcctacctttctgtacatgctcctcctgtttttggctgcacttattggttctgggattgctttttctgtctgttttttgtgtctggttccatatttggaatcagacattacctttggaaagtctgatttgatatcatttgaatgtgttcttaacttctccattgtatgatatcatatagggttgtagctaagactactttgctgctttctttgctgaacattctgcattgccccttctctttagagttatggataagttgttctcttgggttagattgcattggttgcttgaagagtggccttgtggccatctcttttcttggatttggaatagtggccttgtgtaatggggctatccttgctttattatgggttatctgcctagatagaattgctagaatttgtttgtacaattaaaagtaaagaagatgctcaggagagattgtgtttcctctcaacactgtcacctaggaggtcctttcaacattctgtctctggactacacattgtgcttttagccaatttttgttatacttcttgtacttagctctcttccttcattttttagattctacctttctctgtctttaaccatctatatatattatcacttgatggactttacttaggttgagaatggacaagtattagatggaggatgggaatttcttttacatatttctctaggtaacctattgaaaactcctccttgactccttttattaaaaaacaatacaatatttataacttgtctcaagcaagagaaagaaacaaacattaaattctttactagctatacacaaaatgttcccaaccctgaaagtgccatgaagagcaaccatagtccatattgactttgagaagtaaagtccttttgcttcaaagctcccatagttacaataaagaatgtgttcaactattagttagagtagaatggtgttggttaagaaattgcaactttccaggtaggaactagatgagtataccatgaagttacaaggttgtacctgcagaccaatcctgtaaatcaaaataggtacaaaagtaatacatttctattgtttacttggatttgtgagtggaaacatggtgtgatggtcctgtatcaagtggttgtacaacaaaggtaatagatcatgaaaagagtggtttattatgtatataattttgagtcaatatggataaaagatctttggatattatactactcaattctctttgaacaaattatttttaagtaatataagaaaaagaaaaagatgatgttaagaagtattctcgcatttattgctattgattgtttattctaatttatattgcctatgtttgtatcatttatgtaaaaaaatttagtcaaaatatgaaattgaatgatgtaggattataaaaattatttttttttttttttttgataggaaacgacaacgggatatattgataaaaagaagttacaactagaaggatgagaaatcctcccaccaaagaaaaacaagactacaagatcaaataaaagaaatacaactagagaataagcaaacggtctatttacacaccgctaaccaatcaagttgtaacatgttaagaggaatccctttaaaaaccttagaacaaaaagcccatagagaagccaaaaaacgaatagaatcccaaagacaccctgaattccttgctttatcctcaaaaatccttgcatttctttcccgccacaccacccacattaacgcgatgcacgcgtcttgccataacacaacccctctcttagaagaaccgaaaccattaaaattagtaaagaacatgtcagagatgctccttggggaaacccaatccatctttgctaactgaaataatctgtgccacaaccccttggtcaacgagcaatggaggaaaaggtgatctactgtttctccatgcttcatgcacaacttacatatgttgggactaagtgctttgtggggtcttctcaattgtaggattataaaaattatagcattatagaagtacttctttgttgtataatgagatgagagagacacaaaatgataagagaaaaggaaagaaaagaacatggaatccttggtgatcactcgtaggctcctggacaatcgcacatcgagttcaccttgagtttcttagaaatctcacttaagaggatataatcacacctcaagaagctatgtagctactgaactttcaataatttttattataaaattgaaagactacatagatttatgtggtactcatagaactccttatagactaggactttatttcatatttagaatatgacttagtttcctaaataaattataatttaaaataaatagaaagttgattaaaaactttattactcaaactgattctaataaaaaaaaaatcaattaaaagtatgagatgctaaaattagtaaactatactagacaagtaattttgatttttcttgataggtaaataaaaaacatgtattaaagagcgcctaacaaaaatgatggtccaatccctgtacactgagagtctaaaaagcacacaactatacaacctatacattatccaagccctctaagaaatccataagggaaaggtttgctttcccaagggtcttagctcgttctaaaaatgttttcaagaaaaagtccttcaataattgatcaaaatgctcttcttccctgaaaattttactgttatgttccttccaaatatagcaaaataaaccaagggctccatggtctcttatgcctttattgcagagcattgtgattgacttcaggaaaacccactgcaagccaattaaagatagaacaaggtcctaaagcttaagttgtttgatggaatgaattagaatgtgactagctgtcttctcctttaccctgcgcaaacagcacctgttgacccatgtccattctcttgtatcatttgttaaaatcttctcccgagcagcttcccaccctaagaaaagacccttaatgggttgcaagaattccaaatcttattagctggaaatttcttagaagtctcagaaattaaagaaagaaaacaagacttaatagagaactttccactcctcacccccttccaaaccaacctgtctttagatccctgtacaacggtgatataaatgtgcataaaacagttttccatttccctcatctcctaatcatgacaatccattttaaaacaagggttccaatgtcttctcccatcctccaccaccctaagctttcccactctagcactcctattggaagcaaaattaaacaaggatggaagtcaatcttgcaacatatagtcaccacaccatcagtcaaaccagaacttatttttaaactcttaaaaactttcaaccgcatttttccttcttttgtgaatctccaaaggctgcttctaaagttgttcccccatcactacacttcttattctatcaatgattgattaaataaaatgaaagggttccaatttagtgtcttgaatgaaatgagcagactaaaatcagtagtattctaatagttagaatggtaaaaagatttatatatgatactattcgtttttcattttttcttacaacagaggtcataactaagattgttgaaaagttgcctacatttttcgtataggggtttttaactttgtgtttaggttcagctttggtgattttaaagtgggataatttctttgaagtcaataagttttaaatttaaataatttaaattgtgaaacttgaaggtttaaacgtcttattaaccttagactttgatacttctgaatttgcacttctaatttatctaaaacttttgcttttggagtttaaatttcgtaatattaataaacaccaatcacatacgagaccgcaaatatatatatatatatatatatttgcaatatatcatgtatcaggacctatggaaacgatatcaagtggagaaatatcgtttgggtgaaattttgagaaaaattgccgatatttcctgatatttttggtcaatcaacactggttaaagggcagtcaacacgggcttggggcggtcaatgtgggcgtgcaatagtaaagctcaaaaatgcctttgatttttgtagtgaaggggacttgaaccccaaacaaaaggcttagcctaccactagggcaagtttggcccttgttaaatatattgcaccaaacatatatatattaaaagtcatcatataaacaatattaaaagaatattttagagaacaaattaattataactattttataattaaatgaaaaaatttcgtttaattgattaccaaaaatataaaaattatcatgataattttcttcatagtgtttttaatatcattaatagattaattaaaaattaaaaattgtacatatatcatcatttattttatatcatttaatataattgaattaaatagatcataattttaatattaaatatattttaaaattagacatattataatattattatgaaataatatttgatgtaattcaataataaatgtacacttataaaattcaagttttttaacatggcatacgatattattatcaaatatgataaatcatatcctatatatgttacattcttcaacaaaacaactttaaaatgtctgttatacttctaattacatttctatggggtttttcttatatttccataaattttgatcaattttaggtctatcgatattttttttccaaaatatccgttgatatatccgtaaaatcaaagtaccgatatactcataattaccgatattttcatccttggttacacctctttcacccaacaagaaagcacccaagagacaccaaacaatgagcacaagaaatgccacagcctcttagttaaaacaccgtggatgaagatgtggtttgactatttgtcaatgaatagacccaagcaccaccacttaactgaaggcaacactcttctccttagatggttcacatttaaaatctttccccaagtagcctccgaagctgaaatccacttgtgggtaccagtgaagggctacacttactctgttggaaaatggtctctaatttctgattctaacaagcaatagaaggatttaatggaaacttcccatggttagtaagcctttccactaacccatcttcacaatccttgagcaacatgttcccttgaacttctaacttgtgtcaagcttcagtacttcggaagtgaaattaatctgtaggattatatgaatagaaattcaaattataaccatgtaaaattgcttaacattttctgccctgttttagatgaaaaacaaatggcatagaaaaaatgccaaagggggggtgaaacattaccttctccgccttaatttgtctataaaagaaagttggttaggactggatcgaagagcctctgttttaagtaattttgatcagtttcttacttatgactgaatatgattggtatttataatgctgaatgttaaactttcatgagttgggattaatacgattgaaatctgagtgcaggtaattactcagtttttaaaa

SEQ ID NO: 10573 - DNA, 3583 bp, Vitis vinifera
  Intron number 4 from transcript GSVIVT01009510001 (locus G SVIVG01009510001) derived from phytozome v7.0 (chr-ID chr1 8; pos 8963662 to 8967244 reverse strand)
tgtacaagaactctgaactatataggtaggagtgtaggaccacatcaatgtttgagaaacaggctaaggtggatgccatacttctaaatttctgtattattccttgaacttgcttccagaaataatctggatttgaatagcttataatgggcatttggttttttgttcatcatcatcaagccttttattggcaatttacttgctttggagctctttattgttattgggttgttcattgcctttgtagtgggtgcattcataacatggaggacattggtgttaacgggtatcttcaaatgctctacaattgtttttgttaaagaaagatattttacaactatttggtttcatcaataaccccagcccagcccagcctcgtctcatcccgccccgccccgccaacacatacctgggtcgggacaggccggggatgggattttaattttaactctatagcggggatgggaatgccccgtcctgggtttggaacgggatgggaaataactaaatattttgggacgggaataggataggggtgacccgtcccaaacccgcccgttgccattcctaaggtggagttggcaaccagtgaaatattgatcttgtttagtttttaattctctaatgattcatcactttaacgtccattatctgctatgctaaaacaagaagtgcggtgggctttagtttaatagatacaagaggtttcatctggatacctacgtttgcctggaatgatatcttgcttttggagcttaaaaaattgggataaacacaggagaaagtccaagtgaatccacaaaagcagtcgagcataaagctgcatatttctaatcaactcactgttaacaaattttcagtagacccaagtatcaaagttctttgtctcccttttcttgcttgaaattttgctgtgaggtgatttttttatttaggaaagtcctaaaaagcgggaaaaaattattaaaatttatttttcatgtatgattcatgaaatgaaatgaaatataattaaaattaattgaatatatttataaataaaatattatttattttttatataaaaaaaagtaaaataaattttaagaaacatgtaaaaataatttatcaactttaaatttattttttaactcttttttattttattttgaaatctattttctttcccttattttaattttttttttcaagaacaagaaaaatatgatcaatgaaaacaataaaattttgaattcttattaattgagatttatgtagttttcataaaactaaaaagaaggtattttaataaggttgttgaaaacgtaacaatatttttattgattgtattctaaagtttttaaaatttgtttatttgaggaggaggagtgggatatttcctttatttgtttattgaaagaaaatgaaggaaaataacaataaaaaactcatgactatgttttaattactttttgtgactttttatacatatctataaactttcatgcgaaggaaaatttatagttagtttgacaatgactttaagtgtttttcttttaatattttttttatataataaagatgttataaatacttcttataataattatcaaatacaatcttaataagttaattctagacagttttctccacttctctgtgaaccaaatatttattgtgttcttgatgttgtgtgagcatttttttttctctgtaaattgtcattcttttttctcttaaaacaaatagggtaataggttgaagtttgttagattgtgaagtcttcattagttttatggtgttttcctcaagatgtcgggggttgaaggaagcagcgtcctctagaatttttttttatgtgatgattgacgggtttgttcttattatatatttaacaattttatgtttaaagttttatttttagagagtatgactacaattaagagggtttttttagaacttcacagttataatttttctcattagttttttattagtagattgttgagtattgatgcattctgtggatgtagggattacattcatcatcgaaccacattaaaaatcttgtttttttttttgtaatatttttatttttattttctactcatgtgtgcatatggtttgattaacaaagttgataaagactgaaagtactaagaaactggaaatatgacaccatggaagaaaaacttagaaggttagatgaatgtcttttttcttttgtaaaaggttgggccaaagtacttgaaacacgagctccatcgtcctgagttgagccagaaggttcaaccaaattccactagtacccccgtttggacccaccattctacagatcatatctatgttcaagcccacatcgagcaagtccactccgccatgccaatgaataaaactgtaatcgaatcttgcagtggccgtctatttctttacttagttttgtaaatcttgaatagagaaaatgactaaagaaaaaacaatccaaattaatgcgtgggtcttgatgatcttgctgacatcatttggtggctgtctttggggaatgttaaaaataaactctccatttactttccactaactcggtacaagactgtatagaaccaaattctatgaatattcggcccctaatatggacgcatcaaagtacatgtccagccctttctgcgaaaagaggccacgtctgatggaaataccccacgatgaggacaaaattcaactgcaacgaaccataccaatctctattctttattccttgcctatgatcttacatagaaagagaaacaaaatggaaaaatggagtactagattattcaaactaacttctctttttgccgtttttttaacgggcacaagtgtatcacttttgaatttttcaaaaaaaaagaaaaaaagatgatttctctaattgaagaatcattttcaaaagaaacattgatgttattggaacaattaatactaagataaattgacacaatgattgaagtggacaccaaaaataagtatatcgaaccattaattaatcgtcttgagacattaacacaagttaactttatggaggccgtgttattaggaacatggtcatataattatattcttgagaacacaaccacacatagccgtgttttcgataacacggttacataacctcgaaaattattcttctgttacaaacaattatcatcccaaacaattaagaggtgacacatggatcaacaatgaaagataaaaacaaaagaatattctaaaagaagttcaagtgaaagtttagtgtgacaataatgttaggtactaatattttgggaatgttgtaaataaaaccttctttcctttacacaagtttaggacaaggatatataaaggtagaaatgaagatttaatttggtgccaaaacacataagcaagatgatatttcttcttgttataattgttgtcacactgaattttctcttagattgtttgaaaacatttcttagtttttatctttaaccatatgtctatgtgtcatatgttaattagttaaagatgtaattattcctaatagaaaaacattatctagaactatattgttgtatttataagagtacaaccttagatccgtgttttt

SEQ ID NO: 10574 - DNA, 4841 bp, Vitis vinifera
  Intron number 5 from transcript GSVIVT01036084001 (locus G SVIVG01036084001) derived from phytozome v7.0 (chr-ID chr6 ; pos 20870792 to 20875632)
tgcattgattatgtatggcatcttctttatgtgaatattcatttgaatgatttattttgtttgtgcttatatttttgtagtgtactgctatgcagacaattatgagcaaatttttagctgctaaataaccttgtgacttgttcaaatgaaaacaaaaggcatgtgatttgtgtagatgggtgcagtatattggacatggaaattttgcaaactctagatttggaatcctagaatgtgttcttattctgttttctctttttctctgtgtgtgcgtgtgttgttttgtttgcttgtcggatgcttttgttttctaccctctcccccatgtaaccaaatgaaaagcaaagttttcacattcttcaccataatggaattgttagttctttttttggatagtgaaaacatgcttttgatatcttccaagtttctttttgtatttacaagcacacagctcgttcgttgcactgttacaggcaatcaaataccattatgaatttttaaaaatcaaacttaatatgcttcaaaaggaaaacaatcaatgtttaagggcagatgatgacttcagtgaggctgctgcaaaaatatgttcttgaaatggtggtacattgtattcagacccgtctatatagtttgcaatgcaacaattatacatttctaaatattttgctattaaaaaatttttatagtaagaaaactacttaaaattctctcactaagaaaccctcttgagtttttttagtgatttttcatatgtattaggaaaaaaagagaggaagattttgagtcaagtcatcctatgctatattaaaattcttgggcatatttagctatttttcaatgtatgggtaaaaaaaaacagaagattttgacttgatgtgcaacagagggtaagtttaggtgtagtgcaaggtcttgatgtgcttttgcataccgaaaagggtagcgatctcactaattgggacaagcaaaggaagaaagaaaaagctagaagttaattcaaaatcacatcatccacaagagccttttctgttttccatctttggtgttgtttgaggaaaggattctgtactcagttggcatgttagttagaaataaggtagcacaactgctccttagggtttgctttttttttttttttgataggcaaacacacaaaaagcatatattagaaaagggcaccttgaggctaacccaaaagcatacagggagtataaaaagaggcgccaaagggcacaaaaagaagaggaaatataaaaccagcccacaactagcacacctagccaataaaaaaaaactgagtaaagggagaggaccatcatttacaatcaacttagtccacaaccaaaggttacatacgaaagaatttttcaacctatgaatcaaaagctccttattatcaaaagcaatcctatttctctccttccaaaccgtccacaaaatacacaaaggggctgccttccacacctttctgcgcttcttgcccaagttaaagccacaccaaccactaagggtatctctaaccgaaaaaggaaggacccaagtaacaccaaaaagagcaaacaataactcccattacactcttgccctggagcattgaataagaatatgatcaattgactcttcttcctcacagcaaaggaagcatctgttagctagaaatcggcccctctttttgagttgatctaaagttagcaccttaccccaagaagcttcccaagcaaagaaacacactttagtaggcacacaaggattccaaataatgctaatagggaactgaataactcttcttgaaactagagtactataaagagatttaactgagaaaatcccatccttagtctctttccacatcattctatcttccataagaggattaagcctcctaccccgtattttcaaaagtaatctctccacctcctccacctcccaagtcattaaagggcctagagaagctaggactccaaaccccttcttctcccgaatgatcccacaactcctctaaccaagcctctatgatgcagaggcatacaaagaggggaaggaattacacagagtgaaatttccacaccaattatctttccaaaatttcacccttctaccattccccacagaaaagactactttgttttgcaaaagagcgccttccttccttagggacttcttatgtctggtttgcttatctaaggattctcttgggaaaggttcttatccatattggtttgttgaaggtggattctcttagggattgttgttttgtcctggatttttcctgtctttctgcagtggggtaatgtgtgtatattttgtgtacattagggttttccctcttttcacacacttttgtatactatgtttgcttagaagaaaaggagtgttgatgcccaatgataggatctggcaagaagtagcaaggcattaaagtttaagatttgatcttgattcgttcttgcaaatgataacaatgatgttttgctgtgattactccatgtgtctcctaatgtacttgagccgtgccccttcattgtatttttataatacctgcttttcctataacattaacagaactaggatcttgccatgggtgacactgttccattttgcatttgatggaaatccatcatttgtgtttaaatcgagtcaattaagaaccactcctagtttcacaagtctagattcaatgatctggggcaggcctacatcacctagggtttgtcttgctagtagttggaataaatgcctcattgttaggaggtgggtttgttttggggagagggggtcaatctcgggttcttgttatccagaaaaaagataacagtcaacaagcatacatgtgtatatgcatgtgtgtgtaggtatgtatgtatatatatgtatatatgtatatatgtatgtttatatatatgtatatatattatacttcttgggatgtccataagtcttctgtttgttgtttggtgctaatgataaatatcaaatttaaaagtaagtaggttaaagttgcaagaaaacagggtatgggttcactgtcttatatttccatctttgtagatagattcattactctggcaattgtttgatcctcataaataaaggatatcccctcctctttttttggcctttgtgccttgtatgcaatgtgtataattttgggcgcttttaatacaattgcttttatctaaaaaaaaaaaatgaagaaggaatatataattgagaaagtatttttttttataaataagagaatatattaaaattgccaaaagaactagcacttggaacatgtgaacatctttcaactatgcagttcagtttggttttttaataagatcttcttgaagtcacacaagagaacctcacacatttattcatgaagaattggttgattgtgtctaatgatcatccacttttgtgcagtgtattttagtccttcaatgtattattaacctatggaatttaggcttgaacttttggtaggcaggagcaggaccaagaaaatttctttgggggcctcaattaatgtgagccattgactttattttagaagttattcagcaaaattttttgtttaaattggtgactttactgttgataaggataatacatttatattgttctaactactaggccaaaatttatcaaaaattctggttgtccactaaattgacatgaacattactgaaacagggaaaaaagaaagaaagaaaaagaaatgacttaattgcactcaatttgggcttttacctgttttttttatgtagataggatataaagccaaaggggttgcaacaaggaatttaggaagtgtacaaagaacaccaaatgccagggaagctcaggaaaagcaccacatgcccagaagacattactgaaacagggaaagaaagtaagaaagaaaaagaagaagaaatgacttaattgcactcaatttgggatttacccatattttatgcaaataagatataaagccaaaggggttacaacaaggtatttaggaagtgtacaaagaacaccaaaagccaaggaagtgcaggaaaagcaccacatgcccataaaacattaattactttccatactgtctgcatgatgtaagaatctcaagcgcccaatgcacattgggtcccttgatcaagaaaataaatatttaaggaaaaagtcttttaaaaccaactctaagctctccaaagcatgataaaaatccttgatttgctgttaataggaactttttaatttgtcttggatggtgagatgtttcatgtttattttcactgggctgtatatgtaattttgtatgattttttttttttacattatttaatttcttttactgccattaaatttaggcttcatcatttgttggatgttttttaaattttgttttggtcttttgtttttgttgatctaaaggttttttattttattttggtagaaatagaggagttatctgctcacagagtagaggttgttcttatatgtgtgctcgtatatgatattcaaatacagcactggactccagatattgacctaatactgactttgcctgaataataaatggaccactacttcctgtgctctgcttctgatattttgcattcctatgattgatttctttcaaatatgtttcaaaaaattcctatatttgtaggctgtgaataattccaggattgcttcatcatattttgtggatgtcccacttttttagtttttgtaattttatatgcacgaataacatttctttgagacgtggtgcttctgttggtaatttttcctcagtgaaagcatcagataaaagttatcccttttcttattcaggagcgggagagagatcacttttctcaattcataac

SEQ ID NO: 10575 - DNA, 12805 bp, Vitis vinifera
  Intron number 1 from transcript GSVIVT01008143001 (locus G SVIVG01008143001) derived from phytozome v7.0 (chr-ID chr1 7; pos 5401474 to 5414278 reverse strand)
attatcacgaggatcgggtcgaacagccgacactggtaagactgtagcgacccagattctgttttgatttcctttgatcatattggacgttttttttctcttttgaaattgattacaatttgataaatctgattattttttgttgaagcccatttaatcggtggaatgtctgaaaccctatcttgattttgtttggatagattttgtacgttggtgctatgcttttcattagttttggaataaaaaggtgttttcttttcttttgttttgttttttttgttttgatttgatttaggaattggaagctttggatttgatgtttgaatctgcgttttgtgcttgtattttgtaatgtacagaaaagtgttctgatatgaattatcactttgttgggttcttttgtgactattgcgtatgctttataggcttgacatttagaaaatgtttctgctgcttgggtcattaagctattgcattaggacatgtatgtgtaatggtttcttgttaggttatatcaactcaacaactcacgaagcctcatcattctaagtgggtttggctatcttatatccatatatttatcttttccagttctaaaatttgtcaggtcttgatgtattttgtcaagtaaccaattttaggagagggaggcttcaaatgatgatttggtgatctttcaacaactatgctcattttcttaacgccaataaatccttttactttatgcattttgtatgtatgattcaaatgtgaccttaaattcaattttattagtttgtcacctttttggttccaaatgataacaaatctgcatctgtgcgtctgagaactggtcggaggtcctcttttcccatattcatactcaatggagatgcagagccagaatttcatgaatgctaaaaattatgtactatcttctctactggatatttacccatggtagatttcaaagatacccaggcacatggattaatatagttcacccacatttttttgaagcttactcctatatggttgtatggacttttacttgctagtctggttctgtaacaatatccaaaattttgttgaatttccttatttaaaattggggccctgtccctagttaatcaaacttcagctgcatttgactgactgagtctactttgagataacctgcagttgtgattattaatcatccattaacttattttttaagttataatcttatctttcttttatgctatcaacatgttttataaactcttctctggttccatatagttgttttctttaaatctcagtacttatctttgactggttagactttttgaagtatcatttcaaaaaaaatttatattttctccgttgctcctttgtcttctttttccacccctcacaatataaaatttttgcctatagatctttcaaaggaagggaatctatttttattagagcctttttgaatgaatctagtttatatttgcagaaagaaagtcaaagaaccaaactcataagttttatttcactaatctagactggcatcccttgatatccagagttcaagtggaaaatgttttgttgaaggttgttctatggtctaatatatgcgacgcccaccatgagtttgttctattgtaacatcaccaaaacttgatgtgttgtatgaagatgcttttgcaatcttgaacttctgtgttgttgagatctttaattactaatgctaatccaactctcttatcgcttttgagttttgaatcaatttctcaaggattaatcttcattgtacatagagccagttggagctaccagtttttatacaattctactaagcgtatgatgataaaatccaaaagttatgattttgataccatctttgctacatatgtgaaaactctgaaaaactcttgctgatatttagtattcaactcttgctaaagccatcagtgctactgcctctgccagcacactgctaccaccaccagccccatccacactgttgctgctgcaccattgtttctattattgcttgctacaacttagttgccatcacaactaccacaactactttttgatgggcacgactaccacaaccattacccctttttttaataggcaaattaagtgttatatgtaaaggtgaatgacaaaaaggatcatacttgagtgctcaggaagcacactagtgcaccacaaacaaaagaatgaatcaaagaaatccaaatggcaacacatagcctaacccctgtctgagctattaatgatgtctaaatgggaaaaccaatgttctctattgctctccttgaccaagagaatagagaattggttcttagcaattatgggatctcttcctagttatcatcatttttgtactgagattgtatcaagagcataatttgttgtaaagattctttcttttttccaataaggtcaggtgtgtagcctgtttctctctttaggtgaggggtcccttctatctgtccattgataaaaatgctcccatttctttttttaatctaaaattttcttggtctgtaaatttggaattctatgacaaagtgtaccagatgttgaattattattgtgataccaagcaatgaattaatgaagaattgggaagtaagagattataaattcagtcatgtttcatagttgaattattgtcaatctcgtcaaatatctagttcaacttattggagtggaacaaaatgatgtagggtatacttatcttattaatacaattgcttttacctatccaaaaaaatcaaaatgatattggtgtcatgcctcaacagtttctctaaaatgtttattttattgactccttcatgattgcaatctacattctacatttgggaaattccttctttgtctagatgtctaattgcaactcaaactgcgagtttcctaccaagttaaatttataagaagccatagaagaatgtgaagtggaagcatgaggttgaatgcaaattttagggtgggcccgagataggtatcactttccttcagaaaatttaaaaatgaacttgtaattatagattaagaatattagccaatatttcatgaaaagcatgtcttattttgcttcatcgattgcagtgagattagaaatcaagaccttattctagctatgttttcatgccaaaagctagtattaagggaagtttctccatggatctatatatggcggctacattccttcaggcttttgctaagaagggattaaggttggaatcagagaggttccaggttcatttccatgtatcctcaagaaaaaaaggaagaaaagaaaaaaaagaaaaaggtaaagaaatctaggaaagacctgacatttatcaattttcaaaattgataagaaatatttgtaccactggaggacagttccttaagctcagtgaggtggatagaagtggagatatatattattagcaataacaaagaaaaaaaaaagaaaaaaagggccagaggagctgccatcttagcattctttgagtagggatgagttgctattgtttgagaaggaagtggcaaattggttggcagaacttggagattgcttgttagatgtgtagaatagaaatgtttctaaagaaaatttgaggtaaacccatgaactattaagaaactttaaatgaccacctttgttaaacctttcttttggtgggaatgtcacctcaattttgaaccatggatttagaggatttctcataaacttgatggttggaagaaagcctatttgagcttaggaggaattgaggaagaatttctcttatctaatattgttatctcaaatgtcatttattttctctcggtttcaaagttcaagtttacttttaggattggaatagtataaacaatttttcttcggttgggttttagaggagggaaaaaagatcattttattggatggaagtcggcatgtagacctaagattgaagggaattgatgcttgaaaagattaaataggacattcagttttggaggtttcctagggagtgatgctttgttgcatgaggtaaagaagcttttattgtttgcactctagtagttaagatgtgtttggtggtcttgttaatggctactgaatgcaaatgcctaaggctgcagtggtttttctgagtatacttgctcttaattgaaggtggttctaacatttgtttttggaaagacttatagaagggttccaactttaaatcctttatcctaacctctatttggtcccaagatttaaaggtttcctcatcttgttctattctagatctttgcttttctatttatttgtcttttgttttagactaacctaccattctatatcttctgtcatatttatttgttgctctcctttctcaatgagataatatgactctaaactgttcaaggtcattctctttagttccttcttattagctcttttttatgccaaattcccaattcttcagcctaggtaaattttatttgaaagtctaaaggttcatctagagtcaacacttatgtatggctggtggaaaacaaaatggtcagtactaaccacatagtgcaattgatgagactttctaaagatccttgccccaaactatgcatcgtgtgtttgggttggggaggaacgaataaccatttgtctcttcatttcttagtgactttaggttatttcagctgattgagactagttaggttcctcctaaaagtgtggctgatatgaagatcattcccttgatggggtttggagctaatgccatgagtagggttctttggtaggagccaaactcactttcctttgggggatctgtttattgataagtatcataatttttgaggataaatatggatccatggagccatggttggacttgacatctttagcgtcctgcctttgagctttaatctctttagtgattcgtgtgattattgtggaagtttgttagaatggaatcttctctaacaaggcacatcaagcttaattttgattacaaaaagctgtgtaaaccagtacatcttggaaggagtgtctttaaattaaggaggggttagccatctaatatgaggtccttactttattggaggcttgactcttgcaagcacaccaggcagcttctgtttcagagagacttgggactagttattgcttaggtatcttataggaagcaaggtctacattagaatcttggctgtagaaatacattgatatgtctagagctttgaggctctgctcttggatgcttggatggatagccacatagtggatagcttgactaagtgagagacctcttctacagtgttctttgtgggagattttttgccaccttgagttgtactttttgtttgatgtttctagcttcttttgctttgcttgttgtttgccattcttctctctaaacgatagcttattcttcttggactgtttcatcttatatctagaaaagagacaaataaaatcgagttctaacatgttgtaactattgagcaattgaagaccttgatttctgagaaataaagaaatctccaataaggaaatagtttgatctttatcattccagtgggcatgaggagttgggcgtgggtgaatctagggtttgttctcaaatcttctttttccaatcagcctgcagaggagaagcctatcttcattgaatctggtgtgaatgtagagaaggttgaaggtttaatgctcaatttgaaagaatttccaaagtttttcaactccttattcaatgggttggtttttttggtccttggtcaagagctgtgatgtttgtgaagtgttaccagttaatggtgacgtgcccatagtctcacttattttattattattattgcaaattaaagtcttgaacaagcaagttatccctaaattttaaattttattgggattttaataatttcagttaatctcaatgatttcaacaataagtaagagataatcaatcacacataggaagactagatttaacttggaaaaaccatctatagaatttcctagaaattttgtagattagtaaacctgaccttccactgattatgaaaggaattgtacacaaaattacctaattcaaatgcttctactatataccaagtaagactatacaatcatatacatcctcaatgcagcaccttgttcttcttagcaaatacctcaactccatgctgaggctattggatcgaacaccctttttttcactaaaggatctttcaagaatgctcttgaaagcttgagagatggagaactaagggtaaaagggatgactattttcttgcctgtatcgttgaactcaataatcatttttttataccaaaaccctagaagatgattttggagatctttcatatgaagcattaccaaaatacccttttaaaacccaaaaaaacaaatgaaactatgctaaaaaaagggtcagcgtttgaacgcctcaaggggaatgtttgaacgctggagcagcggttgaacccttcttaggggaatgtttgaaagtcctcccccttttttgtgtgttcaacttcactctttgtgctttctccaaatattcacctactaaacatgccatagccattccttttgcactaattactctaaatacatacatacctagaaaattaaccaaatttgagttagcacaaagttgactggcaccattggaggtaaaatggattggacttagtgctataatggaacaaaattgccaacctaagctagtacatcaacaattgttgattacttgaactaggagaacagtttcactcctattattattattattattattattattagaaacaaacattttgactcagtgctataatggaacaagattgtcaacctgatctagtgcatcaacagttcaaaattgtcaacctaatctagtacatcaacagatattgataacttgatctgggaggacagtttcacttctattattattattattattattattagaaacaaacattttattgcaacgaaataatttggtacatggaagggtgagaaatccttcccccctaacatgattacaacaccttgataaaaaataagaaaaatattacgactataaaatcaatttctcatggaggtagaaatcccctgcaaagaaggtcaaatctgctttttgctaacaaatctgccacttgattagttaagcgaggaatccaacaaaaagagtgctctagcactaaggcggtatcaaagatttggcggaaccactgtctaacttttgtaaacctctttctttcgtattcacccaaggtataattgtcgccgaatctccctctactaaaagattcataccattcagcaaagctaaagtctctgcctcaatggctagtcccactctagtacgttttaagaatgctcatactaatgttcgaagatgatttgtcagaatagtttcactttgatcagtctattctgtctttgttctcaattcattatttattttaagttctttgtttgatgaaataagaatgtactgaaatcattttttgaacagatgaagtcgtaataaaaatcgtcttttaaatagacaaatttgtaatgaaattgtactaaaattgtcttttagacagatgaagtcacaatgaaattgtcttctgaataggtaaagttgcatatcatgagacaatgtctaaagttttgtgggtattgtaaactcccatttgaacaccaaactgcggccttttgtgcatgatttaaactccggaataggtgtaataagatcaggatacctgttcctgaaccagccatagactaagcacaaatcaaagtcaaaaaatcattatcctcttgagttatgggttcaacatacccattagcaaaaatccattcccaattacaccaggagtgaaattcttgtagttcataaataaaaagaaatgatcatatcagccatacatgagtgctacaaaatagaatgtgtattttgacagatttttgtatgttatttcacccaaaaatctcaatcagacaattgtttgactagtaaaacaaaaattagaaataggtataatgctcagagctattaaagggggttttgtcttatctatgtgtggtctactaagtgatggatgtttattattgacagatttttgtatattatttcactcaaaaatctcaatcagacaattgtttgacaggtaaaacaaaaattagaaatagacataatgctcagacctattgaaggggttttgtcttatctatgtgtggtctactaagtgatggatgtttattattttcttttgggaccatggttgattaaggcttcaaatatttttgtgtttgtgctttagttagctagctagaatcttatgttcttgacatacaacaaagttaaaaatgccataatttatttcttttattatttatttatttatttatttttgttctcctcctttcttgtgctgcattaattcctagcagctggaaaattgaatctggggaccatgcttgaagaaaaagcaacctgcagtaaaaaatcttaagagacatgggttgaggataaagattgtaactttaagttgtttattaggatggtaaacgggaggtggataacgaagttgattagaactcttcattcattttgaagcaggaggtttggagtgcttgaaattggtttctagtgagattttgatattgctctccttcatgtagtatatgaggtactaggacttcaaagttgtagagttcttgactggtccttatctttgaggagggtgctttttggttggagagaccttttttggtggaggagatggaaggagttatcttttagatggagaaaggagctagtctgaatggtgttacatggcttttgttgggattgctggaagatccttaagtgggatatcattagaggcttaggggaatttcagactaatgaagagagaaattgttgctctagctgcatccttgcttctttagttttgttgaaaagatggatctaactcaaggaagactttttttttttttttttctgataggtctaactcaaggaagactttagacctatcaaccttattatgagcttttgcaagataattgctgtaagaaatatgaggtgttcttcaaaagttgacatctttattccaattggcctttgttgagggatggatatcccctgtgacatgcttcatccatgttgataactaatgttcttaccaagatggttagtatgtcagatttggatgaaggtttaggcttactggaaggtttcaaagttagtgaagattaattcaggttactcacctccaggttcttcactgaccccattcttgttgcttctgggcaacatgttgagtgactcatgcccaattggtgtctcagctgattcgtgtccagctggtgctccttgattgaggaagtgatcaacaaaatttatacctataacaccatacactagggtagcaaatacaaagctactatagtatagtggctctaggatcgttcactgggaatgatgaacaagcactcaaggataccaattccaagtgaattggtcttgtttcatttcacggttagcttaagaagtaaaacacaaagtttgattggtaaaggtttagacttaaactaactaacttaacagaagtttggaataatttaggaagaaaaacattccttggagatttaggttcactggggtggttcctcatgcaaaagacatagctccggtcagatggttcatttcctcgcattagagattcaacttagagtcaagtctctaaccggtgatgtacagagactccttcaattagatttcactttaattctctcactgatgcaacttgcaatggttcatgcctctcacgagcacttaccattcaaggtgatctttaaccttggacttcccttcacaaactcgcaagagataactaatggatgtctcctaggagtccaaaagcttaccaagtgttggtaattccggaaaatcctaccttgaagtcacctaccagaggctcgcaaggggtaaactagtgcatttccacggttggaaatcacttgccttaccaagtgttggcctaggtgactccaaggtgttttaagttaactaaaaacattgaaatcactaaaggatttcacttcctcttcattactagctaaaaccacagagctttgcattcttgcacttggaaccttccccggcaaccttagctccaaggaattggaggtttagttactcattctctggggaaaactcctcagagaattcataacttagaaataaaatgaaaatacaaagtgagaaggtaaggcagtagaaagaaaagacctttacttccttaccaaatgtttacagaaggaactcctctctgagaacaggctcccgagaggtatttatatcaaactaatataaaactaattcttacaaagatatttggtctttttactgacttaaaaactaaggaatcatataattggtggtttacaaggagtattttgggatttagacaacaaaaatctaatggaaaatatctcccaatgtcggtagcaagcttcgggaggcttcaggagccatttcgcaggagaaaagtggtgtctgcgaaatttcgcagacacccaagagggctgcgaaattatcttgcaagaccgagctatcttcactaggctgcaaagttggcttccatcttgaagtttccagctcccttctcgcggcatggttcgtgcatcgttagaaggagaaacaccttactgtacaaaagtgctgcgaaattctcgcaacaaaaggctgattccgcaacactttatagtgtctggcttgtaatggctgcaacttcttcgtttcaattccgaatcgcgcaccgtttgaagcattggattgttgacttcctgagctttgaaatggtatatagcttgcatcatttagacttcagaaagtgctccaaaagtggctgctacgactgtcatcaagaatatgctccatgactgattctctttgctttttctccttgcaatccggattcactcttggcaattgaattctaagctttgcccaagattcctcatagctctcctcattcttgacttgctttggtgatcaaaatactaacaaaaacaccaaaacttacacaaagtgatcaaaattgctttaaaggatccttaacatgtcaattgagttaaaaggcctaaactactactcaaaagtgttaaaaaggattaattaaaggctatcaaatagcactttttgagtagtaatcattgaggtttgcaactcaagcttctcttgtagcctttgaaatggtttcaggcctgaagattaattcattagagttctttagccttcttctttgagttaattcagagctcttgggttttggtctttggaaggtccaagttaggtggttgcaagaaagcctatcttccttatcaagtgttgcttttctcatattctgacctaattccttctcatcttagaatattggtcagagtagtatccaggaagaaactttgaaggaaacatttttgtgtcagcatgtgagtatattacagatcatttaattaggtgggaatgtgtaagtattggcaattaggtttgaaatggtgggagtgcatggcttggttagatttgtacggtgggatttggtttgtgcaaacttaccagggagaaaagttcattgtgatactttcctggctgtaagacaatgtaatggcagtaacgttgttaaaaactcccatcattattcttggaaagccatttctttgtgatatcatgatcccttccatcatgtgagatccagatagcagcagaagtaggacctgcataaagcttgaccatcaacaccgataccaagagcctttcacttgcaccataggccatattaacctccatttgttcattttcaacattctgttgctcccactgttatcatgattattgcaactgatgccactaccactaccactagcacctggtcaccgtcttcagcaacccctatcctactattgcctgctgcaacccctatcaacagccacctgccacctgccaccagccttgggtatttgtctctatcaaaatccaactatcactgctgctaataacaaccactacttcatgcacctagtaatcaccaacaaacaatgtagacatgcatattacctaccaatttcgattgtgaattcaattccaatcccaagaagaatttaaattatgaagactcatccaagtggcaggatttaatttcatatgttccagatcaaaggtttccttatgttttcagttggaacgctcctttgtttttcctttttaaatgatttgagaatcgatatgtgagttccaggtgcctgaatcaaaaacagcttttgttgaattctcttggcatgggttttttctagatatttttgtgtgtttcagaggaaaggagccagttctataacgaacattaaggcattgaatcataataaaattctggggtgctgaccaatataaataattagttcattggaacttgagagcatgaattgatctgttttaattactctaggacaaaaaaatgaggaaattcagggtgaccaagactggctaccatggtcatcctgataattttcaaactgagatctggacagtttttttctgatctccatatgagaagtacttatttgctagcagttagggatacaatcaaatttattttactgaaaatcattatgttatcagatttatttgcttttgaacttactgaacctctttgtgcttcttatgtctctgtaccctttgaatagacctgcaggatcttaaaattaccttgaatttgtgataatattcttttctttagagactgaatatgacagttgatgtatgatacggtccacttactttgatttttcctcttcttcaggagaaaa

SEQ ID NO: 10576 - DNA, 1930 bp, Vitis vinifera
  Intron number 1 from transcript GSVIVT01027743001 (locus G SVIVG01027743001) derived from phytozome v7.0 (chr-ID chr5 ; pos 7358741 to 7360670 reverse strand)
aatatatattaaaaaaaattgaatttatattaaaagtatatttttaagacacaccttctataattctataaaattaaatttatgttaaaggtatttttttaaaagaaattttttcataatttttttattagtcatacacattaaaaaaaattgaatttatattaaagaaatatcattttcacaataccctaaaatcaaatttatactaaaagtatttcttaaaaagatatctcccacaattttcatatcagttatacagtaaaaaaaaaatgaatttacattaaaggtgtttgtacaattccataaaattgaatttatactaaatgtgtcttttaaagaaacactttccacgatttttatattaatcatctatcacaaaaattaaatttatactaaaagtgtctcttaaaggaaaatattttaatataaatttaattttataaaattgtaaaatgtgtcttttaaaaagatatttctagtataaattcaatcatttcaatagatgactgatacaagaattgttgacacctttaatataaattttattttatgaaatcgtagaaaatgtctcttaaggagacatctttagcataaattcaatttttttactatgcaattgatatgaaatttgtgaaaaatgtctctttaatatatatttttaaaataaatttgattttatagaattataaaaggtgtctcttgaagagatacttttaatataaattcaaattttttaatgtgtattattaatataaaattatgaaaggtatttcttgaaaaaatatatttaatataaatttaattttttttaatatgtataattaatataaaaataatgaaagatgtgtgaaataatttttaaagtgataaaaaaaggtcatagatttagaaatatttttcaacgtatcctatttttaaaaattaattttaaattcaccgtacaattataaaaaatccggtcattcctctcgagttcccgaccccacgagtcggttgttgcattcggtggattgtgaattgccaagtgtcttcataaaggccacaaaggcaacatcttggaggcctctatcttctgtacaagtcaattctaagattttgctagattttttaccaattacagtccgtagttttttcgaaataggagaagaacgttatttcctttttaaaatgttctcttttctcaaaaaagtaataattggttgggagaaattattttcaccaaaaaatatatatatacatttttaacaacaataatatttataaagatataaattatatttaatatttagatattaatttaaaaaatattttcttcttaattttcaattttttctttaaattaatttaattgattataactaataaaattaatttaatgtgatattgttttgaataaaaaaaaattattatcaattttatatgaaaagtgagtttattaaaaataaattgttattaatttattaaataattatttataaaataaataattttgttttattttaattttaaagagaagaaaatttttatggagaaaatagtctcttaaagatacaatttttctcaatttttaagaaatcatctttttaagaggaaaaaaagattgagatattaaattattttagttaatttacagaggttttagcgtgatggaaagaagataaatatttatatttttggaaatagtaaaagatagtgacggttaaagataattcacattccctccctaaatgttaccgttaccgccacaaactgtaaaaaaaccttaaaatcctcaaaattaagagagcgcgtgagttgtgtgattctaggttcgcgtgggcaaggctacagagaatagctagaaaagcaaatgggcccacgaaggtcattgaaaatgagagtgagctaaagcgaagtccactcgcagctgcctcgcctcttcacttccact

SEQ ID NO: 10577 - DNA, 3869 bp, Vitis vinifera
  Intron number 4 from transcript GSVIVT01023683001 (locus G SVIVG01023683001) derived from phytozome v7.0 (chr-ID chr1 1; pos 9161482 to 9165350)
caggtttgtgatgatgcatttaattttttttatagtttctttcgttctgttttcttttgtttggctgatactaccatggagctaaacatggaaccttcccttgatgtagaacagaaggagaaaataagggaaagaagggaattagatgaaaatagaaaagggaaattaggtgagaaaattatagagattagatgagaaatatgggaaaggagggagagaaagaaaagcagcagattctttgaataattttaaataacaatagtagtttcaaagtacatccccatttataagcaattcaagaagcctaaaggaaatgaaatattaactgatagaatacttgctgaaacaggaaagcttaacttgtaagaataaaactcctatgtttgacaaagattggaaacctaagatgatgtgaataggagtctctcttatcccttataactaagcctagaataaacttgaaatgggtggtcttaatccttgccaattatccttggtagaaaaggacttgattttcatgagctgtgggtgtggtattgctcaagaaggttaggttcaggccgctgaaactcatcatttctaatcaatattgtaaaactaattggaggatccatccagtttgacaggataaccttgatacccaccttgagtggatctaataaccttatcatcaagcacatccgttttatgctccatgtgtgtacattgaaaaggtggaggtttgggaccctttaaatttgtagctatacttgtagaagcaatatctaataaaacaagaggctcaagatgcctcggtaagttcatgtatccttcacattgaaaattggactgatattcatatcatgtgataagtcatgtaagtatgcattaagttcaaatttgcaaatgatatggaaaaccccattggctttagtaaacagcttcttggaggaatgtttgagatatctcctaggacaaatgtggatcatgacataattttccaattcttaatttctacaatacacatcaacaataggattataatttcattacttaatgaaatttgatgttgtagatcaacatgaagaccattcacctatcaaaaaaaaaaaaaaaagctcaacatgaagatcatggatatgctgagcaaaggattttatatgttaggattcttaaggtgtgatttagaaggtaacatgatgaggttaatatgttggtgaggagaaagatcacaaacaatctcaagtggtaatatatctatagagcagtgacagaattctcatagacaaactatgtcattagcaatattaaattccaattagcttgtttgtcttacacaagactcgtaagcatgtttgtcctacacatgactcttaagcgagtctcctaaaacttatggttaaaatccttattttgaccatcaatatatggatgaaaggttaaagaaaatctcaaatcggccaaaattcaataagcctaagggaatataatactaattgatacaatactagctaaagcatgaaaactaaagtgaaaaatataaaacttgtaattttgataagaattggaatccttagtgtccatttggatatactttgtgtttcttgtttttaaaatcagaaaatagtagtagcttttatttaagatataagaatactttgaagcttacattgaaaaagtcatagttttaaaaactgttttaaaaaattaatgtgttaaaagattttattacctcaaattttaaaatttctggaagtgatttttaaagacatgaggtaaaactatactttttatagaagatgttctacttttatattgaaattttttattttaaaaacaaaaaatagaaagtgtatccaaataggctctcacttggcacctacatctatgcctattataaacttgaaatgggtggtcttgaaccccatcatccctatttccccccgatctcttgccacttaagccaggtctcaagggcctttgggatgatgcatttatttgttaatcacttaatatagtgtatcagagaaactatttcttctagactgatccatatacatgtgcaatagtgaaatagatgtagttatggagttttttagcttgatcatatctactcatccagataattctagccccaatatatatcatcctgctttatgaagtaaaaattatcattaaggcagataaattcatttttttttgtttttcttttgaatcatttttcagcaggaccaaattagatactttgtttaataattaatgttaaattgatgataatttttatgctcttatagtgaatcatattaatgtcatgcataaatctgtgataattgtcttacaaaagaaaaagaaaaaaagaaaaggtctagttattatctccaatttgactgaatattctagaagttgtttctccccactcccctgaagacatgaccctcattaaaaaagtagagaaaaagagaagtcattgcaagagttgccttcaaatcacaagttatcaacatgcatttgtgaaggtcattgtcttctcggaagagctaagggtcttcatctatcgagtcttaaccaccaatctggaaaggcctattaggatactattaatcttcttgcaaaaggtggtgcatacagaatatatgaagagaatcttcttaattagtttcttttgagttagtattttatcttgttacgaccgagatgagtagagaagaaaaaccatatgataggagagaaaagcaaagtgaggagaagcaaactttttatattttcttttggttggctgcaaatgagggttgaagaagagtatgaacacagaagaaaacccaaatgcagtttttattcctttactgtccattctttctgaatcatcctactaaaaaggtttttaagttgaaacaagaattctgttattatatcttttccctcctctccacatataaacaactgagagatattgaaaagctaattgaataaccttttcttgtccttgcttctcaaatgtaattctgtgctagtccttacaaaagatatttgtttttcccgagaagggaagggttgtgttgtatcattttagtgttttttttttttaaattttttttttttgggattttctatatttccccttgcatttgtaactatctctttatgtatccattgctcttaaatgcactaaattatgtctactgaagaactagatgaccatagcgacctttgtggttccctatttgcatgaaaagcattctgctttttttaagttatatgatgtaaatctggaactaccccacttggtttcaatatgaatacttaaaaaaattgaatttcaagcaaatcaaaatctcatttctaagcctagttcacaaacaacttattcatggttggtcaaatcaactttcaaattgcatattttttttaattctgtaattaccatatgatatacaagcaccaaatcaaggttcaatgaaagaaaatttcaagttcaaagacttctggtctaaattcaaatctttcagaaaagagcctagcggccctagcccttttaatgtcaatgaaatgaataggatgatattcatagcgaaactctaacatcaatgacaaaaatattgtccccacaaccttttcattcaatctttccctcaaaaagagaaaaacagaaccacttacatctgaaaggatagttcagatttatggtaactaattttggttttgcctgcacaaaaggtatgggctgaataaaaataggaggcatggtaaaaattaaggggaatggttaattaagcatggactaaccttcaaggctaatgaaaattgtattcctttcttttcttatattgagtttgggggttaaatatgtcctttcttatgatttttgattgaattccgtgtctcagggcatt

SEQ ID NO: 10578 - DNA, 6930 bp, Vitis vinifera
  Intron number 1 from transcript GSVIVT01001830001 (locus G SVIVG01001830001) derived from phytozome v7.0 (chr-ID chr1 4; pos 26153524 to 26160453)
aaacttcgatcacaatccactgtaagaatatgtttaccttttgcattgtctatatactttcctggaactgatatacatctcttttacctatcaaaaaaaaaaaaaaactttcctggaactgtctaaaccaattcagtttgaatttttctttgcaaaaaaaaaattcttacgaaatttaacagcaatggtattcaaattgcgtaaaagcccccaaagtatacaaggtgaaaaaagggagggatacacaaaaatcaacaccttcgcttcatttacaacccaaccaatctttaaatcggttcttttgtgggcaaaaagtgtaggaagggctgctcatcttcatattttttggacagtttggaaggcgaggaatagattgactttcaaggataatgagctgtcaattcagagattaaaatattcctttatcctctctctatggtctgaggctaagctgattataattttttttttatagacaaagaggaacattagattaaaacacgccaaaaaaagggggcgctccctatgtacataggctgtatacaaagaaggtccaaatcatggcaaccaaagaaagataaagcctaagaaggaatagttaaacaacaacccgatcacccaacaaattccgaaaagagagatagtccaagtccaagtccaaaaattgttgagaccactcaagcagggaccgaagaaagagtttcctcaagctcgtatctgacatctcttcctcttggaagattcttcgatttcgctctccccaaatacactaaaacagacaaataggcgccattttccaaacgacactctttttcttccccaggcctttcattttccattcaagaagcagatttctcactgattccgggagcacccacaccaccccaaaagaagaaaacaacaaattccaaagatcccttgtcttaccacaatgaattaggatgttgttcactgtttcctcattttctttgcacagattgtatctattaaccatagaccaacccctcctcattagcatatctacagtagaaattttaccccaaactgcttcccaagcaaaaaaacgagttcttaaaggggcatacgaaccccaaacctcctttgctggaaataaagggctgttgtcttccttcaaagacctataataagattttaccttaaatattcctttcctctcaattttccaaaccagaaaatcctcccctttttgcacctttactgcagaaatgtaacccaaaaagcggttcacctcctccaactcccaatcttgaaaggatcttctaaactgcacctcctagcccccgccaccaccttcttgtcttccccaaagatcaaccactactgcagaattatgagctgcaattctaaatagcaaagggaagagatcctttagcttagagtctcctacccaaatgtcccaccaaaatctagttcgtctcccatttccaatacaaatcctagttctaagaaagaactcctcccaaccctttctaatgtctttccaaaggcccgtcccataagactccctcacctctctagtggtccaaccaccttgcacctccccaaatttaccaacaatgactcttctccaaaaactctcccgctttgtaggaaatctccagagccattttccgagcaaagcatgattgaattccttcaagtaccttaaccccaaccctccatgcctcttatctttgcaaataactgcccatcttaccaagtggatcttccttctctcctccatatctccccacaagaactccctttgaatttttttcaatctgagtctcactttccttgggataacaaaaagcgacataaagtagatagggagatttgagagtgtgctcttgatgagggtaagacgacctcccttagaaagatattgttttttccatgtagccaattttctcttgaatctttcttctaccccatcccaaactctacacgacttgtgggaggctccaagaggtaaacctagataattcgtagggagattccctactttacacccgaaaactgcagcagctctatacacctcttccactcccccaactagaataatttcgtttttctgcaaattaatttttaggcttgaaactacttcaaagcagattacaacccacttccaaaaaattagtcggtccctattatcctcacaaaaaagaaaagtgtgatcaacaaacaacagatgggaaaccaaaaccccttttccacttcttcccgttgccttgaagcccctaataaaaccattctcctcagctcttgatattaaactactgaaagcttccatgatcagcacaaacaaataaggtgagagtgggtcacgttgccttaggcctctaaacgttgaaaagaaatctgtgggagtaccattcactaaaactgccattctcacagtcgatatgcagaaaaaaatccagtttcgccattttagaccaaaacccatcttctccaagactgaaagaaggaatctccagtttacgtggtcataagccttttcaatgtccaatttgcacactcaggctatcccgacacttctcttccttgagtctatcgcctcattagctaccaaaacagcgtccaaaatctgcctcccttccacaaaagcattctgactattcgaaaccaatttttccatcactcttttcaacctatttgctagaactttggcaataattttataaagctgattatagtcgaatgccttcaatctttggttaattttattgattggttgggatccttttaaggctgtatttttgggccagttggtctttgggtatctttttttttctatggcctttttggtggtgggtgtataggtttgtatatcgtgcataggtttgtataccttgagtcgcttttttggcgtctctttttaaatgaattttacttatcaaaaaaaaaaaaaatttacaacccaaccaatctttaaagtcaaataaaaacgacgaactagaccttgaatgtaccccgacccactctataggagcgtaaaatagtatggtccattagattagaatcttcaaagactcttcggtttctcaccttccataaggtccaaaataagtataaaggggttgttttccagaccttctttcttttctttccaacaaaggcactctaccagctaaagggggtatcattgattgagaaagagtcaaagacattacccattgtacataaaaaagagtaaagataagatgtcacaacatgattgccttaggatagtgaaggaggatatggtttgttgactcctccttttcacctttacacaaataccatatgcttggaagacatcaaccccttctttttagctgacctagagttcgaattttttctcaaaccgtttcttaagcaaaaaaggtgactctcattgggacctaaggattccacacaatgcttatagagactcctttcgaaaagtgaccggctaaggaggagtaaaaggatttaattataaaagtgcctcctttagataaccgccaaaccatgacatccttagcacctcctcggatcacttgctcttgcaaccttctaagaaactcttccacctctcccaattcacattcaattatttgcttgtgaacattggactccaacaacgacttccctacatgttttcacattagatctacccaggcttctttaacaatgactattgaaaacaactctgggaaagccacaactaggggattctccttacaccacctatccttccaaaacctcaccctcctaccatttcctaagctaaaaccaaccctgttgttaaacttcttccacccactacttatccccttctaaaggcccaccaccctatatccttcccttgaaactctagatcaccatcctctctcttcctcgttgtacttccctacaatcgcttgattccaaggagactcattctcataagcaaatctccaacaccatttcccaagaaaggccatattcaaagcagacaactttctaacacccagacctccatcctttttatccaagccaactattaaccgattttcactaggcaaggtcttctttggaactctcctcccctctgaaggaagtctctttgaagcttcttgaatctaagactcaccttatgggggattaaaaataaagacatgtagtagatgggttaggctagataaagtgctctttattaaagtcaatctccctccttttgagaagtattgcctcttccacaaagtaagtttcttttgaaatctttcctccactacatcccacgtttgtgcatacttgaaggaagctcccaaagggagacccaaataagtagaagggagagagtccactttgcaccccgccaccctagccaaatcctttgtattatcaaccttctccattgaaattaactcacttttgtccaaattgatttttaagccagaaatcacttcaaaccacatgaacatccaactcaaagcctccaaatgctccttatttgagtcacaagaaattagagtatcatcaacaaaaaggagatgagacactaccgtacccacatctcctctcctactagccaagaaaccttgattgaagcccctctccataaccttcttcaaaatactagaaagtgcctccattgtcataatgaaaagaaagggggaaagaggatttccttatcttaggcctctagaactttgaaagaaaactgtaagggtccccattaatcaaaactgaaaaagtgagctaaggaaatgcaccacctcatccaccttccacatccatcaagttagttatggggtttatataatctttcttgtgtacttgggtttgtcctttgcttggctctattgaatatttgcttatcaaagatcaatctttcttggttcaagtgaggtcattgattgtttaggtttatgattatagacgttatgacactaatgaaatcgattttggaggattaaaaaaaaagggccttcatactaatggcttcataactagaaacttcaagaaattaacaactttcaaaccgaaacttcataacaagacacaaattaatattggactaacaattgtaaaattactgaggaactaaataatcttaatgaatgctatagacattagataaagtattttgattttcaagatagttaagtagcatgccaatgcttgttcttttatggattggattaacatcgcaactttggatgattgactgtctgttgctagttgtggtctagtgcatatccttacctatttgtggcttgtcattaagctcataaaggctttcatgctatgtaatttttatctagactaacttcaatgaaaatcacttaaactggtgagaactcatctttgtgaaaccatctagcctgtgtggcgcttggctcaagtggcaaggcattagggtggagatgtgggaggttccctataaaaaaatcttaataaaatcaccaagtttggtgtgattttgttgacatgaaaagtttgatgagaaaaaaggaatttttgaagtagacttcaccaggcatagggttttgatttgtatgtgaatgtgtatgcacagatgtgcgcatgtatatgtcttcacttagttttgagtacactatgagcaatttcaggatgaaggcaatttatattgaactaaaggatctgataatatatatatatatatatatatattgaaccaaaggaggttttaactacatttgagaaacatcaaggctaatgtgggcgtgcatgcatgtatatgcgttcatgtgtgtgtgtgtggaccatgtaattttgaaacactgcaagtaatttcaagggtgaagacaatttgtagtgaactaaaggttttttagttacatttggcatatgttagggctaccgtgtgtgagtgcgcatgctacatttagcatacaatacggttagtgtttgtgtgtggttggtttttggaacactatgtgcaatttcaagtatgaagacagtttgtattgcagcaagacatctagcatacaccaaggcttacataagtgggctttcttttattttggttgttcataagtcaattaccctcctagaagctttgtttttgtttatattttatagtgttttgtaaaaccctttttaatttgtaaaaccatatttatttgtttttgtgctgcctcaatttttggttttaatataagtcaaactagaattaagaaaggctatgttcttctcatgtatattttccaatgatccaattcagcctgaccaattcaacatttaaaattttgttttcgctgcctttattttcttctcttttgtgcatcctccttgttatgcttgttgagcttcttgttagaggtggtcagattgcttcaaactcatcttaatatgtatctgatttggctttcaattgtattgctgttttttgttcatattaatttctctttttaaagagctgctatctctgtcattgtatcttgttgctatctgattccagtttcctaattttccccctgtcagacaatcttttgtatactgctccttaactctagctctccaaccatccatccttccctccctctacttttctcttcaattttttgttccattaccttcttatcaagaagtaaaaaattatctctccctcttcaatttctttttttatccatctattgtagatactttttattggtcatggaggcgaagaaaggtcttttagcactggattttgaaagtggtttgtttttatttattttttggtgctgtttatctttctccaagagctcagttgggttttagggtgttcacgatccatattcatatgcataaagcaaaaattatgcaaaagactagttgcactatttaggttttaaaattttttcatggtagacatgcaaaatttttccagagctatggcatctatcatggtttgctgatggttggtttactaaaattgcaggcctctccagctttgtcatcccttcttgcaaagaa

SEQ ID NO: 10579 - DNA, 2334 bp, Vitis vinifera
  Intron number 1 from transcript GSVIVT01028956001 (locus G SVIVG01028956001) derived from phytozome v7.0 (chr-ID chr1 6; pos 17108072 to 17110405 reverse strand)
accctcactcgattcgaagtttgacgagagtggatgtaggcggcttatcgagtcactttaaaaaaagtttgcatttctctttttattattcttgttttgttcttcatttctcatccttttagcttttggttgattgttttgaaaaaacttctaacacccaattcaaatccccttttgggtgatttcttcaatttaataagtagtttttttatttaaagacaactatttgggaaaagattttaaccttggatcatttatagaggagagagtgatttttggaaaaatagatgtttcctttatcatttaaaggaagaatccgaagaatccattagttatatcaatattcattatgttaacacaaaggcttcatggcctttattgttttccttatttggcacatcttgggtgcttccctctttgaccaaagaaacactattgcgatgacatgactctttcatgggtaaaatatggaaaaaagagttgtgaattattttcttatgtttattttggacaatttggaaggaaagaaacgatagatcattagaaaatcaagagcattttgcttaagggttgaaacactcttttctttgtaatctatgggattggcctaagtggtttatagtttttggtcctctttgtataatagatttttttgattgattgaactcttagtggggggtcttgtttttttgttgcccctctttccttttggtggtgtttttaggtgtctaccatatactttctatacaattttaggcactccattgacgttttttttttttaataatattctcttgatttaaccatacaaaaataaaataaaatgaggtttcagatcttttcataaatatcatttgcagttattttaacttataaaacaaccacatagaagtttccaaaccataatgatcacttagatttgctggaaatggagcaatgaaagcaaaatggggaaactaagatggtggtgctttagccccattgccattgaaatgtttatataattgggactttggaagatcacaagcttttcaaggcaaaggaaatctctttcagacatcaaactattgaattactaaagagagatcttcacaagtcttgaaagtttgtttccatgcgtttgccccatggtctaagtccgcatatttgaatgctagtcaagactttcagattaattgattaactttattaatctctttgagtggttgttcgaatttggacaaatggaaaagactcttagctttttttttccctcacatttacgtcatggagaatgcaaaaatgcatcaatgtcattaatacgaagacccaaccattgacctagcctcattcaacttggaggaaaacacttgaaaagtcatttctagtatctatctatgactcctatatgatggaatggatgaacaaaatattggagaaaaataattttccatgaaattgcacataccggcaaatgtcaattatatggcattaaattcttgtattttggatcccaatttcttccttgacataagtcatctttatcgaggtcttgggaagtttgtttccatgccttcaccgtggactataagtccttgtatttaataaaggtgaagactttgggttcaatttattaacttagactaagtttggatttttgaaaatttaaaagagaatgggcgggaaagaaaatagtaaggaaaaattgtcattctatgttaggaaaccatagctttcaaggaatcaatcatatgaactcaaaaggttgcctacttgttttaaacattgattgtatgacattaaattcttgaattttggatcctagtttctctcatagcacgtcatttttatggaggttgtggaaattttgtccccatgtgtttacttggactataagtctttgtgtttacttggactattgatcaactttaggctaagtttggtttttgcaaaatttggagaatgagatagagataaaatggagaggaaaatagaagaaaagaaaatgtaaatatatataatattttttaacatttatatcacagagaatgcagaaaatgcatcaaattgataagaaaacccagccattgacccaatgtcttgcaacttggaggcaaaacactttaaaaagtacatattggattaacaaaaaaataaaatcattttcaatgaaatagcacatattggcaaacagaaaaaaactgatttttttttgtgttaccactagaattttgactgcagaaaacatgagcttgtaaccataaaaaggagcccttgagttctattatatatatgccttttcttctttcaagtactcacactctcattctcgctctagtttgtaattaagcaacc

SEQ ID NO: 10580 - DNA, 14543 bp, Vitis vinifera
  Intron number 1 from transcript GSVIVT01001154001 (locus G SVIVG01001154001) derived from phytozome v7.0 (chr-ID chr7 ; pos 1230959 to 1245501)
gtaagtaaattatatcagaaaataatataagtaaagtaccatattttttgtggaaaaaatttcaagaatggaaaattttccaagtgtgaactaggaattgagacgtttcttttccttgtgtgtccacccaccttaatttcgagattacacaatatctaagaataaccttttttttgtatgaattaaaattttcaataaaaaaaaaatcttaaaatctatattattttaagcccttcaatgtatgaataccctttttttgccttttttatttttatttttttattcacatgatgtgtgtcattttcttcacatggtgtgttctagcttttaaggtttaaaataattcattaatcttccttcaaatagaaatgagaattaaggtattttctagtccttatcctctatccatcacattaggattacattccatgtttggaatgcccattcttgattcttaacaaattagttatgatatattaattaggacacagaatgttgtcaaatccctaaaatataacaccataaaatatacttttaaaatggttattgatttatcaataaaaaataatttatggatttattaatgtaaaagagtatcatgtttttactataataaaagctcgacaaattaatatttgataaattaataattttattcaaataatattttttcttattccacttgggtctatatactaaattaataatatcgttaaataaggaagtccataaaaaataccaaataaaacctcataatatgaataactttttataatttttactcatacttgaaacctctttataccttattagctttttgacatcatatctcttccttttagaagttcttttattttctaccatttacaacaatctttttttttttttttttttggagtctctaaatttctatatatgtactaacttaatggtgatatgcattgattttggatttataaaccatatatgtataagtaattaatggtagaaaataatatatatatatatatatatatatatatatatatatatattattctaaattaataaattattcatttatcaataaataaatagttttgctaagataataatttctctaattttttttatgtgctttacttattattaatttatatttcattgaacctttaaagatttttaaaataattattatcttatgcatttaacaaagttattaatttagtacactaacttgagttgagactaaaaaaatttattatttaaatgatgttattaatttattgagattttactatatcttatttatttatttaatgttaacttatagtaatttttttatttatacaatcttgatatataaaactacccaaagagaaataagtaccggtattccctaaattaatcataaattatattttttattactaatttttagtttgtctcttcggattaattctttaattatgagagcaaacaatatcatgaaataaataaaactggttgctcgtaatgaacaaggtataatgacaaaaatctacctaccaacatattaggtgtaatatatgaaaaagatatataattttatttgattagatgtacttattttcctaaaatcttatgacatcaatacttgtactccattttcatgtctttggcatacaacacttcgtaatattcctaatgaatccctcaaagaacttttattgaaatttcatggatttcatattgccaactttgatttctttttccacttccttaatgaaacacttctttatgttccttagtagatttctcaaaactcttactggagttttatagtgagatttctaactagatatatctaatccctaggatcttatatcgtcaatacatatactcacttttcgtgttgtcaaagtaacaattcttgtacttcttagtgaattactcagaactttttataaaagttttatgagttttatatttccaacacatactcattttttaaaccttgacataatacttatacttttttttttttcatgtcctcaatgtaggacttccttttgttttttagagaatttcttgaaatcgaagatttattgtaagattttgaccttatttcttacattggttgacaccaaatgtactttcaagacaaatcctcaaatgttcgaggaatagagaattgagcttttcatcaacaacgacactttcttaggattcatgaaagtttataacttttcaataaaacattgttgtttatatatgtaaaccagtattatttaattatgaaggttttttacattttaaaatcaatcaaacacataaaacataattttaaatctcactaagcacaatatttaattacaaagaatttgttcattttaaaacatttcaaaactattttttaaatcaaacaccaattttggagataactatactttaaaattttaccaaaaacaatattcaatattatagtagagatcaaattaagaaatacaaggtaattttaactctaattttttttttctattaatcattccaaaagctttaacaatcataaatgcatacccaccttgaattttatgactttgaatttacctgaattcaaatacaatgaaatttgaagttaccataaaatagataaaacccaaaaaaataagttgtatcaaattaacaacaaatatagtaaaattatcggttaaacaaaatacactaacatatagtttttcttccaaatttttaaccttattttctcatttttcttacatttttcactttttttttttcactttcctcaacattttcaatatccaaatagagcaaaaaattgacaatgatttttctaatttttaattcgtttcactatttccatttatagtctactatgctacctaaaaagaataatattatttgtgaaaaattatatataaatttgcatgtcatttaaaaatcaaataagattgggatccctaaccacaactgaaaggtaccccttatgccttatgccatgttacaagcaaataacttaggaaaatttgtattagaataattataattataaaacacattattgtataaaagcaatatctctctctatgttcaaaaaagggtctacctgggtgaccagagttgactaagggtccacttgggtgacagaagttgacttaatatctcatatgtcatttttagtagatttgctttcctaaaattagttttattttaatttttgtaataatcgttgagtttctaaataaagtaatattatcaattattagacctaatgttgcaaaaatcagaattagcaaagtacagggcccactaggcatttcattttcccactttttaatgcctcatttttatgatatcaattttggaaggttttattttgtctcttttattcttctaaaaataaaaattcaaataaaaaatagaatcaatgtaattatcaatttttacaaattaatttagaaccttaatagtaattttagaaaatatttttaatacttgaaaatttttatcattcaaatattacaagtaataaaaacactttttggaatcattcctaacacattcttaatatatttttttttgttttctccattgattgtgcttctatcttccattttttcttcccatgttttttattttattttaaatttcttcctatatttaataataataaaaatttcatttctctcattctattgtttttaaataaggaaaagatgtttaatatgttcttaaaaattttaatttcattatattaaattttaaattatgaaatgtttattttaattattaggtttttaatttttatttttgatatagcattatgattcaccctattttcattcatttcaattcccatattcgtacaacaatcacatcataaaattgaaacagcaagaaagagaaagagagcaaagggtgagaccccgtcacaacatactgtatcacagttcacaagttccaaatattattggacatggcaatgtggatggaatgcaccaacagggtcaagtgggtatcaatgttcacagaagaaaatgtggcaaaaagattgatttcaaagaagaaaatgtggaagctttggagccaatgaaacctaatcttaagccataattatgaacatcccttgtaatgtaaacatcaaaccaaccaaccaaaggcaaatattaggtgggattgaacaaaatccaagtggcccttaagctgattttcctcttggagactaattatggtgaaatgattgaattatcagtaggagggtttgttattactctctccatcattgaaatttggatgacgaaatgatacatacagagcttgagttgatggcttctccttccctttctccctccaattattattaatataatctgaatgtgccactggtgatggattgtatggtagatatatttctgaggcctctaatgacgtagactgatagtatggtatatggtgtggctgcaaaggtatagagggatcttaagcaaagatttgggaagccactgggattgtgaggaaacttggcccatgtgaaatggtgaagggttgttttgttttttcaaaaccctctgcagtctgtttgttaatttctactgtcacttgggttcttgaaaattggattggactcatgcctcagcacccaaaaagtctccttgtgacttgtatttgtcttgtttctctagtcatgggcctttaatttccttaaaaaagaaagaaagtgaattatgagtcaagtttttattgtcagtataatcaatatattgttattctctagcccagtatttcaaacatattttaaaacttagaatgatgttttttttttttttggctttaccttttcaaactcattttttaaatcgagacttttgaaaggaaaagttaatggtttgtttggtaactgttttcaaaatttttttaatttgttttttaaaaagggaaaacgggtttaataataaaaaaaacaatttagtggggtttatttggtaacatttttttaaaataattttctattttttagagaaaaaaaactacaacaaaaaaatggaagattattttctatttttaaaaataaaaaatagaatattttttaagagatgttttaaaaaataattatataaatatgaaaaatgattaaaaataaaataatatatataaattatttttaaaatatatttaaaaatataaaaaaaatagactgaaaatattttaaatttttaaataaagatttattttataaaacaataaatataaaaaggtattcttaaaaattgtttttcaaaatatttacccttggtttctcgagaaagaatagagggatttgagaggggttagagggaaatcctacattgtagaaatttgttaaaaaattatcctcacccttttctcataatttttcccatgatcccttttaattctttttgccattattactatgtccattcctcaatttaattactcataaatttcttccatattttcatgggactttcccccactgggaattcccaaaaatcaaactctctctctctctctctctctctctctctctcccaatagcaaatcctttataaaaacctctttaccctcgtaattgttgaccctttgagcagctggaaaggacttctctctgaaatattttgcctcctagaaaactgcaaagttgacacagatttttgtcttcgctcaagcaggcaaaacttatgtctacatggattaattttttcagtctagaatacagaattcatagaaatttttctccctgcttgggattttcacatctgaggatagacacaaacgctctaggcatttctcacagtaagagactctttgtcttttaccttggaccttctcagtcgatcaaaaattcacatcccacttcacacacatatatacatactttatattaccaaaattttactgataattcttgggagtagcggaagagaacgttaaattttccggcacttccgaggaagcgagtcttgtttggatatggctatttattattcattgtaagcagcatcgaagaatgttaagttttgaaagcttgtgggcgtgagtctgatcccttagaatttttgtcttcccacgctcgtgagttctgagaacccaggtattgttgcatggatttttataaagcgagaagacagactcatccccccaagtctccaaccaaagctctctgcatctctgcaacttatccttgctatttatgatcgtcccttactaatctaccatactactttctattcctgatcagtcccactttcctttcctttcctttcgtttctctacttctgtatcttcttcctagggttttaaatacagaagaagaacaaaatgagtgagaagggaagtggggagcctcttttcttcatgtttccatacactttctttaaatatatatatatatatatatatatatatatatattaaatttaaaatttctttataaaattattggtttatattatgttgttaagaattatttttaaaaaccattatatattttgtaaaacttattattatttttatttctaaagatagaaaataacatccaaattaaattaaataatttcatatcaaagaaaaatatataatatatcaaattaatcaatcaaacaatatatatatctaaaaatattttaaaaaatcaaaagaattaaaatcccaatagaaaatttttcatcattttggtaaattctatatcaaaatcttaatattttaaaagtaattttgtaattttcttaataaaatttaaatttgtttaaataaataatataaatgagtgatgaaactttttattcaataattatttatagcataataattaagtgttattattatttcactattatttaattaaatataaaagtttaagaaatttaaatatctcaaaatgaatgtaaatcactattatagttataaaagataaaaagttgtatgtaaattctttttttaaaaaaataatttatttcattgaggaaatagaagatatgttagtaattaaaaccttaaattaaatccttattaaaacaagaataaaaattagaggtaaatgaaaagattaaatttttaattaaatttgtgatggcaatttcaagaataactttcattaggttaaataattaaaattctaattaaatgaaaagattaaattctcatttaaatttattattaatatggaaaagattaaattttaaattatcttttaggtttgtaatgacaattttagaaatggttttcgttatatcaaataattaaaactctaactaaatgaaaatattaaattttcatttaagttgattattagtattgaaaatattaaattttgaattaccttttaaatttgtgataacaatttcatgaatgatttctgttagttaaataattaaaaccctaactaaatataaaaaaattaaattgtcatctaacttgattattaatattgaaaagattaaattttgaattaccttttaagttgaaaagattaaattttcatttaaattgattattagtattgaaaagattaaattttaaattatcttttatgtttgtgatgacaattttaagaatgacttttgttacgtcaaataattaaaaccttaactaaatgaaaagataatcacctatttaagttgattattagtattgataatggtatttttggaaataaaaaagtgataaacacctgtatatatataatctatactacgtataaaagtatgaggtgtttgtcaattttttcatatcaagaatgtccattaatttacttttaaatttcaaaaataccttttaacaatttatttattacaacctattaatatttaacatcacgaaatttattatattaccacactattaaaatccattaacattataaatttcattatattctaaaccaactattaatattaattaatgttataaaaagtttaaaagatttaaatatctcaaaatgaatggaaattataaaaagtaaaaagttttatgtaattttaaaaaaattaatttatttcatttaggaaatgaaagataagttaataattaaaaccttaaattaaatcccaattaaaactttgatggaatggaaattgggggcaaatgaaaatataaaattttcaattactgtttaaatttgtgacgacgattttaagaataactttcattacctcaaataattaaaatctttattaaatgaaaaaattaaattctcatttaagttgattattagtatgaagaatgttaaattttgaattactttttaagtttgtaatgacaatttttagagcgacttttgttacgtcaagtaattaaaaccctaactaaattaaaatattaaatacctatttaagttgtttatcagtattgataatattatttttggaaataaaaaagtgacaaacacctatatatataaaataaaatatgttaatctatactacatataaaattatgttgtgtttgtcaattttttcatatcaagaatgtccattaatttacttttaattttaaaaataccctttaacagtttatttattacaacctattaatatttaaagttatggaatttattttattaccaccctattaatatccattaatattataaatttcattcttttttaaaccagctattaatattaattaatgttataaaaatttatattaaaagtttgaaaactttcaaatttctcatccattaacttataaattttattctctttaaaactctattaatattaattaatgttataaaaaaatattattaaaagtttaaaaactttttaaatttcttatgaccattccatttttcatcttctaagatttgaatttttcatccatcaatattatacattttattctctttaaaactctattaatattaattaatgttataaaaatttatcattaaaaatctgaatttttttttttaaaaaaattaccgttctatttttcatcttttaaggtttgatttctcatccatttacattataaattttattctatttaaaactcaattaatattaactaacaatgctgtcattttgagaattttttttaatccacaaattttttgctcaaattaatttatttttgttcttaatttttttttttttttaaaaaaaaccattttgttaatgctattcaaccctgatattgattaaatatttcttgaaacccaattagaattatattttaagagtttatgtgcattattttgaaataaattatagttgttaagatatagcatatgcatatatcatgtattataaatttatttattttaaatttttttatttatattacttcttttgcaaaataaagactttttgttataaaattaaatttatggttaaaaaaataactaatatatctatatgtgttatttttgtatattgaataatataatataaaaaatttatttataaagtttaaatattttaatcatgaatattgttaaaagtaaaagattttattttttaaaaaaatagaaaatattgaaatataatatcatttttatttaaacattggaaaaataataaatatttcatgtttttttttttattcattttataaactaaatatacatataacataatataatacatttcatttgatatattattttaagatatgatgtctattggatataatatttaaggatttcatatctcattgaaaatcatattttaagatatgcattttctatccaacaaatcatatcttattttaccacgtcaatcaaatgtaacttaaaggattaattataatacattaatgtactttttaatgcttatggaaaaaacactacaatacattagtatgccttttttgtacttatcgaatatgcatcaccaattagataatgtgacgtacacatttataagtcttattatttgtatctagtctcgtttatttctacttttatattttgatatcatttatctatacacttattcaatgatctaaatcttaccattatattttgatcacatctgtctatacccttatttaatgatctaaatcttatcgtacataatatctagttatatttctttatacatttatattttgatctcattcgtttatacttttattcaatgatctaaatcttaatcttatattttgatgtgattcatccacacccttattcaatgatctaaatcttattatatatagtctctagtcatatttctttgttactaatctcatttctttgtacttgtatatttttatcccatgtgtttatacttttatcacatatgtttatacttttattcaatgatattaatcttatcgtacatgttgaaacgtccaggttttggttccaaaaggtatcaatacgtaccttagcattttccgatatttaattgatgcggggggtcaagcatggagtcggtgggggcttgtgaattgagtctgtacatatccagttggtttgtctcggccacacagagtctgcgatggcccttcacttacaagccataattaaatagtcagggctcatcaccctcacaacctttgtcttctctgctctctgtccacctcggtaaagaccattcttcaccaaccttgccgcaattttgttaaaaaaagaatgacaccaaagcccagaagtagtctactgtataaaagtcaaaagtctaattaatacgcaatctaatgataagatttgaatgacataaagtattaatgctaaattcagcatctatcttcattatgcgtcgcttgatgcattttgttgtacatgaaagtcaacaaattaatctatttgaattcggaataagtgaagtgaaaacctcaatttaatttatttgaatctttcactcaaaaaattagcaatctcatatatatatattgagatataccatgtaacttaggtaaacttgtaataatttaggttaaaaaatatcactttctctaagtgaaacgagggaagtccaaaactcaaattaatctatttgaatttttcactcaagaaattagtgatctctctctctctctctctctatatatatatatatatatatattggaatatactatgtaagttaggtaaacttgtaataatttatattagaaaatatctctctctttgaaatgagtgacattgaaagatcaaattaatctatttgaattcatccctcaagtctctctctgaaatgagtgatgtcgaaaactcaaattaatcgatctatttgaattctttactcaagtctctctttgaaatgagtaatgtcaaaagctcaaattaatatatttgaatttttcactcaggaaattaatgatctgtctctctctatatgtatatattgggatatcaatgtaagttaggtaaacttgcaataatttaggttagaaaatctctctctctctctctctctctctctctctctctatatatatatatatatatatatatatatatatatatatagggatatagtatgcaagttaggtaaacttgtaataatttaggttagaaaatatctccctctctttatgaaatgagtgacgttgaaaactctaattaatcgatttgaattcttcattcaagtctctctctgaaataagtgacgtcgaaagctcaaattaatctatttgaattcttcactcaagaaattagtgatctctctctctctctctctctctctctctctctctctctctatatatatatatatatatatataaggatgtactatgtaagtttggtaaacttgtaataatttaggttccaatatatatgtagaaaataatttttagacataagtaatttatgttttggaaagtgtttctaagtgcaaatataaaagaagtctttggttggcatgcatgtccaatcataatgggagttagaaaagtgattttcatgggtttttttaataatttattccaatttcaaaaaaatttagagaacaaggaattatgtaatgacattcctaattaatattataagtttcgtaaatcatacaaacacaaatgttaacttcttttgtttttttctttttttctttttaaacaatttagaataaaatatatttgattcaaatacacatgtacatagtaataattcccttacttcgtacaaagatgagagcttgcatgactcaaaatacttgcttagtctcaccttaacgcgtaatagttaaaagataaagtttcagagattttagctagcttgacttataatagttgagagtttcatagattcattatataataattttttgaggcattgctctcgttgcaagggtttaagaatgtcctactatacctatttagtgagtatcataatataggaattagtactaattattgaattatttcaacgattgtaacatataggatgttccattttgcataccgttaactccatgattagatttatgagcatgactttggaaaagtcacaaggaaaaactcttacacataacccaattttctttgtcaattgaatggtacactaatattgtgatttttttctctctaatgaacatttttttatttgtctttttattgtattaggatgtaattggggcatattgaacccacctagtcaaatgaatcataacattcaaaatgattaactatacatcgtcctattgcctaatttgataagataaatctacctttaaactaaaatgattataatgttattgaaatgtgtacttcctaatccctattgcctaattatataagatagctctacgtctgaattaaaatgattatataatgttattggagtattaggtaagatagatctatcacgtccatacatgctaagagcatgtaataactaatgatgaattaataattttatttgtcacaaccactaaagattgatgacggtggaaaagaaaaaaggaaaaaggaaaaaaaaacactttgcctccaacacccactccaaataaaataatgagaagtatatatctatttaagacactcaataaaacaacaaaaagttatctcaaaaaatacaattcaataatggaaaacaatattatcattgtgtgtttttttctaccatggaattccataattttttttccattatgtaaatatttttatttaaataacttattattatttgttaggttgtcaccatctcttgggtttggcattacaaataaaatatttaatttttatggttttttcacatggtcttttgtattgtctctccatttaagaacaaggattaagcttggatataaaaatttggacatcttgaaaatggaatatattggattttgtctcttaggaaaatgatagagtatctatgcatggggatcttgcggattagataccttctaagttcataggagcttttgtcttcaaagatagattaggtttagtaagaaggatcatcttatatatgattgagttaggtcaaactcgagttctcttgatttgggtttaggatggcttggaccgcccatatcaagtttaggtaaatcagtagggtggtcttgaaatttaactctttatcgaaacttggctttaaatccaagaagttaacaaagatgattatgtttattaaggagaaaaatacacaaagccttggagcccttggaatttgatgattctacaattacacctaatgaacccatatagtcattgggctaaatgggctgcacgccaacctgaatctgtgtatcatatcattgggctacgtgcagccttttgtttggtgggcttgggttgagtgtttcaggcccattttcagtgttattcaatctaagaagaaactcatcacttgaaagaagctttcggaatgtgtgggaagaacaatacaaacagcccaatgtctatgatttttctctttttatttatttaaattcaattatttctatttttcattttggttttgtccatcagactcatggcgtttttttcttggtaaaatatctatagtgccacagtgctcatggtatggtatgaaaagctttgcttataagataggaatgtaaatgggccttgtggctgggctttgactagggtgtatccaacttcttggtccaactcggcccaaagtccaacaatttgataaatataaatacatgggttaagttggtggttacgtatgccttttactcattcaagagttttaaatcctatgcaagttacataattataagaatttgttttgggcttcaattcttgggctgggcttttcattgaacctggtcatcaaagtccaataactaaatcaagaccctcttatcattccatatatccaagagttgggtgagccacaaccataatatcaagtagggtaagacataattatagtatcaaactttaaccatcaaattgccgctttaaagaattagtcgattatctaattgaattaaactaaactgatgtaggctaatccaatcgattataatccatgaattgaaccgagtcgatcaagatgggttgtgatgggtgtcatccatctcgaatttgccccgttgtcatatgtattcacaataaaaaattgccaccaaactccctcctctatgtgggcctatacaaacccaagtcacactcgctcctcagtgtcctcatcaagcccaa

SEQ ID NO: 10581 - DNA, 738 bp, Vitis vinifera
  Intron number 17 from transcript GSVIVT01035014001 (locus GSVIVG01035014001) derived from phytozome v7.0 (chr-ID chr 5; pos 922249 to 922986)
ggaagttttcaccgtaagtggattatagtaaggctaggattagaactttatttggcactgattgtattgccacttctcttcaatttgatttaaccactttctacattaaaattgtagttgtgttttattcatttttatcattaatttttggctctataatattgtgattatctgagttgtcttaaatttactctttcaatgcttttgtttgagctaagattcgtagtttaatttagtgtagtctccacctctttggaaaatgtatgcctgctgccacttccagaatgtactgcctactgactcataaattttcattcttttctaccctggagatcaatattcttttgaattttttgtttcaaagttaaagctttggcactattttacaaagccttgcttttcttctatcaagatgcatgcaaagaaaggatgcttttacagcattcaaccctcaaggaacagagtttcctgacaatctctgtactagcgtgcataaaataacaatggtacatttgcttgatttattaaacttgcttcatgttttgtgatcccattcaaatttggagttaccttttttctttatgctcaattttttccatgttataattcaattcacatggactctcaattctatggtacttcacttaatctataaatttgcatcagaataccaacaaatatgcctttgtctcgtctgcaatatatgaattgttaatttttttggtggtgaatataggg

SEQ ID NO: 10582 - DNA, 1235 bp, Vitis vinifera
  Intron number 3 from transcript GSVIVT01029035001 (locus G SVIVG01029035001) derived from phytozome v7.0 (chr-ID chr5 ; pos 11038833 to 11040067 reverse strand)
tcacattgatatttgtttctgaaattggagataaggtaactaatctaccagtgccaaatgcttattttctgttgtgcttttaaattcaattcaccggaaactatttatagatgtgcatgagtctttgatggttagttcatttttgttttgacctctagttcactttctttatctattgccatttgaaactatcaataaattgcttgcttagcttgactacttcaggatgttttatttcttgcctttttctgtttgtatttggtaggtttgtcattattgttaaactatcattggatcctaaagggggatgggcggtgtcaagctaacacttgccctcattatgacccctttttacatgtggacaggcagacaaactaagagacagtggatggacaaatgaagaaaaaataaatgttgctagggaggtttgaccccaaaagctctaggaaccagagctttgattccatgtgaggtcagcagtaaaagactttagacagaaaaatgagagaagtagaagaatgaaagagataacaacaaacacaccaccctaacacttcctcccccatctctatactgttaataattctaaaagactatgcacccttgttacatatagaagttataacattcccccagaaatggaacaaatcaggaccagcaatttttccttcagtcattttcttttcttacctcaaataaactttttttttccattgggttgatgtactgaagttattataaatacttaaggttttaaacaatagctaggtggataaatgaggtttggttctttcagtgaaagatgcattatccagaaaccatgagtaatatgtacaatatttcaatgaggacaagtaaaatgcctattgtaacagatggatattgcttaaaggggtagtacaaatcattagtgctttaccaaacaataggatttgcattcaagtttaaatggaagtatgtgaatctaattcttagtgattgaattttgaagagtggaccaagtccatgggcaaggcaacacagacaaacaaacactccgtgtcacttttatgaagtatatttcccaactcagatgaaagcaagttgtgaaactcgactcacaactcaatcttctaatgtggcactaataccacaaaaccactggtgactgtgtgccttatgattgctgttgaaattctaaatcttgtataattttttttcttaaacagacattcttcattgctgctctcttggcc

SEQ ID NO: 10583 - DNA, 1149 bp, Vitis vinifera
  Intron number 1 from transcript GSVIVT01014115001 (locus G SVIVG01014115001) derived from phytozome v7.0 (chr-ID chr1 9; pos 527500 to 528648 reverse strand)
gcagccccagggctgtgctttgcagaggtaaatcctctctctctctctctctatgagttgtgtattggttcctcctctctatgatttgtgtgttggtatggttttgttcttattggttttctgctcttctctctgatttgtgtattggttcctcgtggtgcgtgcaatacttggttcagtgtggagtgaatagatttataggcattttcaaggaatatttctcacaaaatgcaaactaattttcactttgaaagaataaatccttttcaaagaaaaccgatttatattttatggaaatagcatgtttagtccacacttttaaataataataataataaaaaaaccctctaaaaaaatcattcgaatttcatatattctaacgtaaaaataatatttattaaactcaaattattacttatataaatatcattaaatggtaataactccgaactacttttactttttattcattattgttgtctatgtttttttagtagctttttaataattagagtatcagattgcatttcctttgtttgtttgaatccaaattttgtctatctttgtctattgggatatgaatccagattttgtttgttcctccacctgtggcatgggaccacacatgagggagcttaagcttaaacatttagaaaattggtagttcaacaattttgaatagttggtatgcaaaagggtattgttcttctacttctcaaattacacatttttttagtttagtgacttggttcagtctgcgcaactcctcttttctttagggcacttggaaacaacatggacatgattcattattttttgaagggtttggcacaggtctgttttaatatatatggaatctcaaatgattcttctttgatgctacctatatcattgaaaatttcatcgctctttatgtgttgctcttctgaaatttgccaacagtttgagcatcttttcatgtttatttgactttgactctgaagaataatgttgataaaatattttttgtgattagtctctttttgcagcattactaatggttggattttgtttttctttgtgccatcatttgcctaaaagcttccattccatctgcgtatctgttctaaccctgttttcttattgcagattttatacctccttccagaa

SEQ ID NO: 10584 - DNA, 7979 bp, Vitis vinifera
  Intron number 9 from transcript GSVIVT01012829001 (locus G SVIVG01012829001) derived from phytozome v7.0 (chr-ID chr1 1; pos 5857940 to 5865918)
tggaggtccagagagatactaaaaacaggggacaggtaagaacaccaatgctgctctttctgatgaatttctaaaacttgattatgagaatcttatcctacatgcagttgagtgattgatctgccttagtgaaatccaaatattattacaagagatagtaatttgagctagtttgcttagattttcatattgaatgggctctactacagctttaaaggccacatctgcaagtgccataactaatcatccattgctaattgtaaacttgtaatatttatatatatcccttttcctgcatgaaaatattggctgcacacaaatatttgctaattctttctaggtatagaacaaaatagataatgtggttgagaatgattctattcactgtctttgaagcactgtgtgtgtaagggcacatttgagtaacaaaacaagggatcaccatccttagaacatgttgattttttttggatgaatttaacaagtgctagggaatttcaagttttgtttatttcaaagaataacaagaacaatggattgaatgtggtgtcctttgagggtagacattgagaaggcgtatgatcatgtaaattggaatttcttgttgttggttttacaaaagatgggttttggggagaagtggattggttagataaaatggtgcatctcaacagcgaagttctccattcttgtaaatggaatcccaattggtatttttcaaagcactagggggttgagacaagggggccccctctctccctatttatttgtgattgttatagagatatttagttgtttcctgaagagggtggtgagtggcagttttcattttaggtgacgggtgaggggcaagggcgaagatgaaattcagatctctcacttattgtttattgatgatactctcatttttttgtgaggcgtctcaagatcagatgacttatttgagctagttgtttatgtggtttgaggccatttcaggcttgagaatcaatttggacaagagtgagttaattcttgtggggagtgtggataacctgaatgacttggctttggagttgggttgtaagttggacgttcttccttcctcttacttgggtcttcctttgggtttttttaaatccgtggcagcagcttgagatggagtggaagagaggtttcgtaaaaaggttagccatgtggaaaagacaatatattgcaaaaggagggagacttattttgattcgaagcactctttctagtattcctatctacttcatgtctcttttttccatgccaaggctggttggcttgaggttagagcagatttagagggattttctatggggtgttggggcacttgtgtggagctggcgctttgccagtgaaaaagggacgctttggaagcaagttattagccaaaagtatggtgaaaatgaagggggtggtgttcccaagaggtgagagatggggcatggttttggcctttggaaattcataagaaaggagtgagatcttttgagcagcaagctatctttctcgatggatgggtaatggtcagagagtgggattttggaaggacaagtggtgtgaagacgaactgctttatgtttccttcccctccttatttgccttggccatttctaaggatgcgtgggaggcgaacgtttaggacttaatagttgaagggggaggatgggttccttgcttctctaggtcatttaatgattgagaggtggaaagtgtagagcgctttttgttgaaacttcaagcaaaaatggtgtatagggatgaagaagacatggttatttagatggtttcgaagagcggaaaattttcggtcaaatccctctattatgttttggagcccagtgaccctatattgttcccatggagcatcatttggagttcttgtgtgccacccaaggtggcttttttttcttaggaggcaacatgggggaaaactttaactttggatgaagtccagaggagggggttttatttggcaaacaaatgttttttttaccattttgaagaaagaacggttgatcacgttcttctccactgtgcaaagacaaggattctctttcaactactttttactctctttggagtatcttgggttttttcctcttcagttaaagagacactccccgggtgacgtgggtcctttatggtaaagttcgcaaaaagtcttggaagattggcccattatgtattttttggattatttagaagaaaagaaatatgcttgcttttgataatacgaagtttttggtctaaaggatgaaaaacctttttgtttgtaatttatggtcttggtctagggtgtttgtagatgtagccctacttttctttttagctttattgattggctaggttctaagtgagggcagattatgttttttgttctcttcttccctcacttggttgagccttttggtggttggtgtatacttcctgtatactttgggatgctattttggtgtttccttctagtatactctttcttttacctataaaaaacacaaaagcaagaacaatgggatttgattaaaaagaaaaaagaagaacaatgggaaataagatggaagaatatagtcttatttgggtagaatttaccagaaaaattctaaaaaggaaaacctaattttattgatgagtaatactaagaatctatctcaaacccctaaaataatgggaaggttcctaaaacctaaattattgggaaactaattgtaattatgattggcttcgctagattggcaagaaaataaaataggaacctatgaagataagaaacctagaaaataatacacctagacattgaaaactttctaaaactaagaaatctaagaaatagaaaatgtccaaaagaaaccatcttcattagcttttcgctttcaagatatcaattttgaaaatgcttagaagagaaaagatacttgcatgattgctttgaatttgatggaagtgaagctgatgccacttgggttgatagatcatgttcttttatttttattttattttcttttttgataggcaaaaattatattattaatagcaccaaatcaaaagagggcgcatcaaactacacaaggagtatatagaggttccataaaggcaattagattgagagattaacaaaaaaccacctctctttcatcaacaagagtccaaccaatcaacaaaatttagaatgaacaatgaggcaccctctaaagacttttttgctccaagttagagagagcacaagaaagggtttttgagagtttgaatcgatagttcttcatcaacaaaagctttacaattcctctcattctagatggtccaaaataagcataaaggagctaccttccacaccttcatctgcttcgtctccctaaaagtcctctgttaacttgataacatttctctaagcatagtaggcatcacccattgtactttgaacaataagaaaaataactaccaccatattatatccatttcagcatgatgaagaaaaacattatgagcagattcctcacccacaaagattgcatctattcactaatgtccatccccttctatttagctaatttagagtaaaaattctccctcaggctacttcctaagcaaagaagcctactttctttggcgcttatgggttccatactacatttaccataaaggttgtttctttttggctccaagggctttgactgggtggatgtttgaccaggagacatccactctttgatcccttccacaccaatttgtcttccatacctctcttcactgaatacttttgcagcttttctagaaaggcttcaacactttctagctcctattcagttcactgtcttgagaaacatggatttcattgccctcccttccctatctccttccaaatatccctaaccgatgcatccttcgggatgacaagggcaaaaaaaggattggatatagatgctcagtgcccctaaaaaaaagctctgcttttaatgtcccccccactttctccctattgcttttcataatccagctccgtgaccatcccttaacctcacggttgttccaaccctttacttccccatacttcctagcaattactcgcttgtagaagggctccctttttgaagtgtatctctaatttcatttcctaagcaacaccttgtttagattggctaaatctcttgtgcctaaattgtctttcctcttatttatatatgcaattgaccatttcaacaaatgaggttttttctcacgagctcccccttctcaaatctcaagtacattttttttgggatgacaagtagcaagatgtactatattagcaaagtagacaaaatacttttaatcaatgttttttgtctacttgtggggctcttttgtggggaaaaaaaggaaaaatacctggaattccattccgttgtgcatattttggacagtttggaaggaaaggaataggttaacttttaggggggggggggtctttagatattcaaaaattcaagaatttttttgtatgtaatttgtggagttgggctagggtgtacattggtgaggatacctattctctcttaggctttttggagtggcttgcggtcacttgagggtgggtgaggttcttcccctctcttttttcagctctctttcttgggcttttgtgtataccccctgtatacatgcggctttttagccttttctaatatattctgatgtttatctatcaaaaaaaaaaaaaatgttatccttccactcttcgatagatattgtctcttccacatagtaagcctcctgatgaatcttttggccactacctcccaaactgttcacaacttaaaagaagcaccttgttgaagacccaaatatgaagtagggaacttcctccttttgcacccatataaagaagccaaatcctccccattaggaacctcctttatgggaatgagctcactttttgactaactctaaaactaccttaaaccacttaagggtcaaacttaaatacaatatttgttcttcacatgtgtcacagaaatgagcatatcacctgaaaacaaaaggtgtgccacctctaccctccaacccatgctcatagaattccctaaagagacctatttcttcattcttcacaaaatcccaactaaacttccaaaaaaccatagagaagccatttgggccaagggctttatcccaatacaatcctgtcaaagcctctaagacctctgagaaagaactctccattacctcctccctttgaatagactcaaaacacctcacatttatattaggcctctaatctcttttttcaaatagaagattcttaaaagcatttgccacccctccttcaagtctgaatttttagagagcgttaccccattcacctttacattgcttatgaactttcttcttgtatgcgtgtatgtcattctgtggaaaaaattggtattgttgtcaccttcctttaaccaaaattctcttgacttttgtctccgagtaatttgtcccaacacttgttaaactcttcaacagcttttttacaggcctcacttcctccattgacaagattgcttctttctccttatgatcccaataatcaatcagagctaaagctttttcttttctaatagccacattctcaaatatctctttattccacacctttagatctctcttgagagattttggcttagaggttggaatgaagttgaaagatcctctaaatttgtaactcatcctttaacctttaagctgctctttgaacccctcaacttttagccacatattttcaaacctgaagggatttccccttttctcacccctcctcgaataactttgcgatagattactgaaatgattctcccaggctttcaataccaggaatctatcaaaccttggtgaaagctggttattgactcctgccactccatgtatatgggtgccccttactagtggaaggtcacacaaattcagctcctctgacacctcagaaaagtgtctcctagttgaagacaatctaacacaattccttctttccctcaggaatctaccacgttaaaatcccctctgatgcaccaagagtcttcccatagccctctgatatcgtctaactttgcccaaaattcttctcagtctctcccttgagttggcctgtaaaccccaaagaacacccaaactcacaatttctgaatcaacaagatatcaaataaatgcctttttccttaccaatcagcttcaaaatcctgttagccataaaaacaacaccactggttactcccctggcttccacagcatcccactctaagaatctgcctacccctaggctcttgaccaaattcaaggtcatctcctgcacttttgtttcttgcaaatacgccaaatctgctttctgcattttgataagagacttgattattttttgtttctcctcgtcatttatccctttgacagtccaatataggattttaagcttcattaaccaactgcggttatctccctctcatttttgccagcaatattctctttatttgaaccactattgtaattcattgggctttccagcttttgaaattctctatcagtcttggacattctaacagaggtccttttcttcgtgagagccagttggtgctcctcttctcacctccatcttcctaagcaaggttaggatatcttcaaatcaatttgctaagagtcaagtaaatggtgggagctcctattgagcctcccatagtcaaaaatagtcatctcaccgtggttcacttcaatattttcttataccgaagcagactttcccctcttccctacatccaccaagcccactggatctctttcagcattttcaggaaactccactgtcctcccatcttgtaaaatcatcttcaatcacctctctcctatacaaaggacagcaccaggactttcttctcttcataacctcccctcatctacccttcctatcatggccaatgaaccagccccccagagaagaagaagaagccctgattcccaaagagaaaatagaagagggaggagaacctggattcttatcagcgtccaacaaagagggctgatcttgagcagaagtagcttctggagacgcctctgcacttgttgctgcttcgccaagggatctggactgtttttcagccttctttgcagagcataccagagaggggccttcatctacatggtcttcttgggcctcagtagcttacaaaggtcagggcccaatccaaagcctccttcccctgaagcacctgcttccccttaaggagagatggacccagcccagtagatttactcccagggccacaacagtttattcaataacctgttggggtccttattccccaattttttaattctctttataacttaaacccaagccctttcgatatccttcactgacagattgggccaccacttgagattggatacaaggcccttccatatccttctctttataactaaaatctttcattttctttttatagattgtattcttctttttattattattgtaaatataaaaaaaaaacctcctaatgttcaaatctagtcatcttattgttgttcttattcttccttttgttattgtcaatatattgctattataaagaaaaccctttcaatcttcaaaaggctttcaatttctacttcttttcccttaaaatatgttgctagattaagcttgtagttatttgctcctttgatccaccacctgttattgcatcagacctgggccagccagctggtggaattggtacctgtgacctggtgccctaggaaattccgatctttattactcatgctttcaactgttgtatgtagtttgagtctgctggatacttgtcttttctgaagaaatactaacttgaaaaaccataagaactcttaaaaaaattataacgggtttgagtttaacttaggttggtactaagtttatatttatttcaattgtctcactttttttattcattttggttttcgtttttaggtgcacttggagcttctgt

SEQ ID NO: 10585 - DNA, 1800 bp, Vitis vinifera
  Intron number 4 from transcript GSVIVT01016137001 (locus G SVIVG01016137001) derived from phytozome v7.0 (chr-ID chr9 ; pos 19585729 to 19587528)
ttgatttggacttccaggtttggacccaacacaaattttatggtttttatcatttccagtttatttttccaactgatttggatataaaacttgaacccctgaaaaagattttaaattgttcctaaaatttcttctaggcttagtttgaagagaaactctgcaacttgatagggcactagcacattccaggaataacacgtcagtatgtggggaacttgcagtctgatgggttttaccacccatggggtatcaataggacatgcctagtcctcaatgtctaaacaatgatttgaatagacgatagtaaccgtcaggattttgcattcatatgagtatgacatgggacatgaccgaatatccaaaacttgatatcatactttctatggcttatgagtgcccatcaagtataggattaccagtcttgagatatattgaatgaatttaacataaaaatggttaattaaatcagattagaattatataaagttgtggtacgtaaggtcacttttgaattagcaattgtgtttgcctgttctcaatgctttatggaaaacaacgttaacccttctgtcatttcttattttatccattttacctttggctgtttggtagtttagaaaattgtttattagccaaagaaaattgtttattagccaaacttacctatctccattgagacaacacaattattattcaatagggggaatcaagggttgaaaataaacaaagaaatgtaacgcttttgcctattctgtttattctttccttttctcacatgaagatgttcaagagacaagtaaccatatataaactggaaattttttgttttagtgcaagagacatagagaacacttgctaaagtaaccatatattctgaaatttaattagataggtgcaattggatacccagctattgggttaggtaaaagagacaagtttctgccttggttttatttaaaattaatacaagtggaggtgaagtgtgtcatgatgatagtggtagatgatgctgggaggaatggaagtagatgataggtcatgtcatgaaggagagattatagtcccccaatacctttacttttcagttagcaatattgtccttgatacttaatagcaatggtaaatcgcaaaatattattgtgatagagtagcccaaatctcatatctttccttttgttttaaatttcggtctactcttgcacttgtagagctacaaggatgatccctatgagaacttaaaatcatctgcacaagtttcatcagaatcttgtactgtttggcttgttagatgaatacaaggattttctacccagaacacccaattacgtgatttatataattcttttttggaaaattggacctcaagtgctgtcatgtgatattgagcctatgcatcactttgccatcatgcatctacccttgttctcattctctcgagtatcaaacacaggctgctagagtgtgtgtatgcctactttaagacatttgttattttatgtgccttcatatttgccctgtggggtttttgttagacatggacctttgctttctattcgtagtggttaatgattgtctctgtaacaaggaaactgaatttctgattgtacctgaagaagacatggttggtcggttaccatgtccatgcataggtctttggtgtttgacttgatgattttgaatgaccaactcattcctttgatgatttggaataagcaatccagaagttgggcttatattatgttgcttttagtttctcactggatgccatttcttgtggcaggcattggaggcaaagctgat

SEQ ID NO: 10586 - DNA, 8827 bp, Vitis vinifera
  Intron number 1 from transcript GSVIVT01017860001 (locus G SVIVG01017860001) derived from phytozome v7.0 (chr-ID chr5 ; pos 4097478 to 4106304)
ccaaaaccgttgctgaagttaaagcccttgaaaaggttgtttcccttgttcatttccacgcaggactatttttctctgcattgacgatgaatttctcactgggtactttgattaagttaatacaacatgttttttcgattaatggggttgcttgttttggggcttagtggaggtggctctaccgcattcatcgatcgtcgattaaatttaatccattggtgtgctgtggtgcttgatagaggaatatccgagtcgggttctgtttgttggatgctacaattgggtactagcgggggagggctgtctgcatgaaatggacacaatgtttgaattttggattgagttcaaggaattttccatgtattgacgatgaaattcttaaatgggtactttgatcaagttaatatagcaaggttttgtgattggttggattgcctttttgggttcagtataggtgctcacatggggttgtattgcatgctttttatgtcttttcaccacattcatcatttactgattaaatttcatccattggtatagcatagtgcttgatgaaatatttgaagtgggttgagtttgctggatggaacaatggggtagtaccgcatggcagggaagtggtgtctgtttgaaatgtaaataatgtttgtacttggatcgagtttaagaatgtttcctatatcagtgattaatttcttaaattctgattaagttaatatggtacaaatttgtgattgattgagttgcttttttttttcgtgaaggcttagtagaattcctcaaatggcattatattgcatggtcgctgtaaactacaatttttgcagcatattcattggattatagattaaatttcatccatttgcatgctttgatgtgggacctgtttgctggatgcaacatttgggtagcaacatgtggctagggagtggttcaaggaaatagtgtttgaatcttggataagcaatgtttgatatcaagtttggcagtgatcgaagtttagcagggtttagggctaaattcattatggacttatcacttcccttttaatcttacctccagtgaattgaagactcatatctaaggctattttagaaacatgaactttggtaagaaatttttttcttaaaaatagtattgccattcccacagaacactatctagtgaaactgtcgttcaatggctttttgggtggctgggcatgccccaattctatgctttataaatatttaaagatcttggttttgctttttggaatagagagttgagtctggtaggatttagagtcaattgaggacatagtgagggaattttgtatgagatggtttgtcacaggcagaaaaaggagggagttgaaggtgtaaagaggtgaatgaacgacacaactctaatggagttgaatttcaaatagaatccatgcaatttaccccatgttattgggattcggttgatgttgatttgaattgtgtgtgttttgcacacatcgattcaaattggtaacaaataagtttgtatccaaaaaatatacagaaaaaaaggaatgcaaaaaaagggaattaaaagaacagcataataacgtgacagatgaaaactttgctacatgccattgtatgaaaatgctttgaggctttcctttaagtatacctagaccttttgttctctgcatgcacaaaatttgttaaccatgtcagttctaatgttcctgtttctgctaaggacccattcccaagtaaataaacactgttatatgagtttatctctggatgttatgatctccatgcgttgtcaagtcaagcaagttggatgattgcaggtgtcccaattgtcaccatgtttattacttcctcaagttggaagaactgaaaaaccaaaaacacccaaaattgccacttaatagtagaaaaataagcttgtattgtgactttgtgaaaatattggataagtagcagaaaaacaatttctttccaatgctcaagatgttaagggcaatggatcctcttgcccattacttattcataacagtaatgacagtagtacctcaatttttgcaaggggttgttgatggtggtctcatgaaagggtacaaggtggaggtagaggaggcaaaggggttgagatttcacaccatgtgttctaaggcattgtctggcttgaagggtaacctagttgaaagtgatttcattccaattgggagggtggatgggcctgagaagttggctaatcatatgggccatagagtggggagtcttcccacaaaatatttgtgtttacgagcccaaggcttagcgggtggtattttggtttgctgggataaaagatctttggagctgttggagatggaggtgggtaatttctctatatcgtgtaggttgaagaatgttgaagacggagtggtgtggatttttactggagtttatgggccgtgtaacaggaaggagagggaggagttgtgggaggagttaggtgcgataaggggaatttgggaagagccttggtgtttaggaggggactttaatgttaccttatctcaaagggataggagcaggcaaggtagccttaatggagcaatgcgtaggtttgctcaggtggtggatgaccttgcccttattgatctccctttacaggggggtgtgtactcttggagtgggggcaggagcaaccagacttgggctagattggatcgcttcctggtatcccagggttggttagatattttcaggggggctattcagtgtaggcttcctaggcctacctctgatcacttccccattttgttgaaggggggtgggatgagctggggaccctctccgttcaggtttgaaaacatgtggctcaaggtggatgagtttaaggagctccttcgggaatggtggcaagaaggggaaagagtaggaagggctagttttagaatgactgctaaaatgaaggagatgaaggagaaaattaaagtgtggaacagggatgtttttggtagagtggaagtgaacaaaagctcagcccttcggaaaattgagttttgggacagggtggaaagtggtagggacctctcagaaagagaaacggatctgaaaaatgaagctaaggagaacttcaagaagtgggttcttttggaagaagcccattggagacaagtgtctagggagctgtggcttagagaaggagataagaatacagggttctttcacaagatggctagtgcccattggagaaataactttttggacagaattaaaataaatggggtggaattagtggaggagcaggaggtaagggaggggattgtcaagacctttcagcaccagctaagggaagaaccagggtggagagccgacttagaggggctgcatcttaaaagtcttgaccttagtgaagctgaagctttggagcccccctttactgaagaagaaatattctctgctctgatggatatggatggcgataaggcccctggcccggatgggtttaccgtggccttttggcaagcttgttgggacttcgctaaggaggagatagtagagctgttcaaggaattttacgatcagaagtcatttgccaaaagtctgaatgctactttcttggtcatcatcccaaaaaaaggtggggctgagggcctacgggagtttcggcctatcagtctgctagaggggctgtacaagcttatggccaaagtgttggccaataggctgaaaatggtgttagacaaggtggtttcggctgatcagaatgcgttcgtgagagagagacaaattctagacgcctctctcatagctaacgaggtggttgactactggcagaagaggaaagaaaaggggttgatgtgcaaattggatattgagaaagcctacgacagcatcagctggagcttccttatgaaggtcttgaaaaagatgggctttgggtcgcgttggatggattggatgtggtggtgtttttcaacggcaaaattttctgtccttattaacggggttctagcaggcttcttctccagctctaagggtctgcgccaaagagacccaatttctccttatctttttatcttgggcatggaagtgctgagtgcactcattaggcgggcagtgcaggggaacttcatttttgattgtaggctaaaaggtagaggggatgcggagattatggtgtctcatctgctctttgcagacgacactattctcttctgcgaggccagcaaggatcaattaactcatcttggatggattttggcgtggtttgaggcggcttttgggcttaggatcaacctggccaagagtgagctgattccagtaggggagattgataatattgaggaaatggcggtggaattaggctgcagaattggaagctttccggttaaatacttggggctgccccttggggcccgacacaaggccttgtccacgtgggacggggtggaggaaagaatgaggagaaaacttgctcgttggaaaaggcaatacttgtctaagggcgggagaatcacccttattaagagcaccttagctagcattcccatttatcaaatgtccatctttagaatgcctactaaaaggcttgataaattacaaagagattttctttggggagggggaaacacgggtaggaaaatccatttaattaattggaaggtggtgtgtactcaaaaggagaaggggggtcttggtattaggaggatggggttattgaacaaggccttattgggcaagtggatttggagatttgccgttgagaaggatgtcttgtggaagaaggtgatcggggtgaagcatgggttggagggctgtggttggaaatctaaggaagctcgggggccctttggagtgggagtttggaaggagattttaaaggagatgagctggtgctggaataacatggagttcaaggtggggagggggactaagatcatgttctggactaatcattggtgcggcgacgaagcgctgtcccaagcgtttccccagatttttgccttggcagtgggcagaaatgaattggtgaatgatgtgtgggacccaaggcttggccaaggagggtggaatctcagattggttagagattctaatgattgggagctagtgttaatagaagatttgctctttttgctaagggacatcagggtaaccctagaggaggattcagtgctttggaaaggaggggattctgccagttttcggattcgggtggcttacaatctgctggcagcccctaatcctcttgtttttccgggaaaaaatatttgggtggataaggtctcaaccaaagtggcttttttttgcgtgggaggctacttgggaaaaaatcctcacgttggataggctgcaaatgcgtgggtggcagcttccaaattgttgttttttgtgtggttgtgaagaggaaaatgtaaatcacattcttttacactgtacagtggttaggaccctttgggaaattgcctttgccttatttggggttcagtgggtgtttccagagaaggtcaaagaggtgttgttctgttggcggggcccttttgtgggttaaaaaaggaagaagatatggaagaccattctgttatgtattttttggacggtgtggaaggaaagaaataggttagcttttagagggggtcttttggctattcagactcttaagaattcttttgtatgtagtctgtggagttgggctaagttgtataggggagaggagtcctcttcacttctaggcttcttggagtgggtagcggtcccctaagggctggtgaggtgttcctgtttatgtttttttggccttgtggctgctttgtatacctcttgtatgcggtgcggcctttcggccttctttaatatattttctgctctcgcttatcaaaaaaaaaaaaaaaatttgtgtttacatcggggcgtcattaagtctcctttgttgtaggattcagttgagaaaagattcaaaagagggctgactttttggaaatggcaatatctttctaaaggtgggagccttgcccttttgaagagtacctttctactttgcaaatttattttctgttggtatttataattctagaaaggcaaggagcaacagattagaaaggattaagagggagttcccataggcggatggggaggccacttaaacaacaagtatcatttggtgaggtggtctgctatttggtgtgataaatctgatggggatttggccattaggaaactagtgcctcttgacagaacttcactcggaaaatgactttggagatttgtagaggtgtgtgacagctattggagaaaggtaattgtaaaaaatatgggtaaacagaagggggatggcgttccatagaagatatagaagtttatcattcaactctatggaaggtcatttggaaggtggggaatatatatatatattcttggaggacacatttttcagtgggtaaagatcagtggatcaagttttggcatgactacttgcttggagggggtccattaaaagaccactttcatgggttattcaacgttcttgttcacagagaagcttgggtgtcacattattgggatgggtgttgttgtagtccaagtttacaccagtaaccgactcgtggattcatttttgcagatgcttaatacctattctgtctccaatgatttatcagatgagctagcatggaggacaaaccatacttctgttttcagttggatcctgttgtgtttctttgactataggagatgttgtcgccttctcatgtaggttagtatggaatcctagggtgccgtctaagtttggtctttttgttaagctgtatgggagaaaatcctcaccgcagacaatctcataagaagaagatgaatgttgtctctgtgagcatgattccgagtctaccaatcatgtcctgatccattgtgactgggtttctgagctgtaggctttggttctctctagttggactgtcttggattcttccctgttcagctagagaggtatggtttagctagcagggaacctttatgggtgctcaacttaagattggtatggaagctgattctgatgtctgttttggacttttaggaaagagtgcactaccatgatttttcaagggttaaatggtactagtctagctgtaaaaagtgggcttaaggaccttgtgtgtgtcgtccaattgggggttggatgtttcacttttccttttctctaggcatgtttcatatagactgtgtaaatgattgcaaccaattttatgttaggcactctgaaaatatatttccattttttgccaattaatatacatatatatatatatatagaaaatattagttgacaaaagcagtaatccatcaaaaatatgctttgtgcaagcataacttcagaagttcacagaaggaatgtgaatattaaagtaagaaagaaacctgcatatgttaagcagtcatagtagacactgccctatttttggctccatcacttgaatgaactgccatactttgcattttatgcataaatcagcttcaagaaaaccagtattgattgtcttgtagtataacctgctcaaaatcaattaaaaaagccatgaagtttaaagtttctctcttttcaaattgtaatcccaaagtcaagaggacatgaatcatgttggaaaaaggaaaagtccctttgcaacaagttgtgtcttgcaccacccttcacttctgttagatttcagttccatcttgtagacccattgggcatgtgcgtcagggtttcatggtacaaattttcaattatcaatttgagcaaatgcttctaacttcacctgcattgcaaatttgcaattatccatcgtccatccctgaggtttgatagttgtgttggagttgtcttcccttagctgaagtaaccattggatgtaaaggattgagaaactccaacctctgttgaactggaaagtctgcagtgaaaattcatactggagtgttaagaagttatctcccagagggaatctccaattagtggaatgacaattgatattggactccaagtaaagttgggtccatattgaaatggtctgttttagatgagtctgaagtcgggctcctgtcaactgcttgtaggcctaacttgctgtataataaaaagctggtgatgtaagaagatttgctgactccaaatgttccagtgacatgaagaacttggatgctgactttgcaatgaaccattacttggtgttgaaagtatcttatgtgctgagcatgagctaaccaatcatgcaaattttgctcgggaaaaagctccaactgaacttgcagagagactgcagcttgttttgattagagaagcaaaatgattctcatggaaagctacaaatcaggagataaaaggatgaccaatagggggagagcatctttaacatacatgatgttggctataacctaaaaaatatttgcctcaaattcctagttcctttcccaagaactaagaactgatccttaaacttgccgcaaaacttatcctgtttattaaattatccatataggactgcagagaggagttcattgttttcttagatttggttattttgatgagcaaataatctaagtttggatacaaattgtaagcattgcatttaagtgataaattgtacctagtcactcacagtttgtagtttaaattcaaaatttactgccacttgaagtaagggttgaatatcctgggagatctactttcctatatttcaagattttggcaccgttaaactgatgcttaggatgcctttccacttctcattgttcaaccatttccttatcattaattgcaagttttgttttgaatattgatcttattttgtttcatgacaggctctggaagaagttgaaaaaaattttgtaacaat

SEQ ID NO: 10587 - DNA, 9540 bp, Vitis vinifera
  Intron number 5 from transcript GSVIVT01020528001 (locus G SVIVG01020528001) derived from phytozome v7.0 (chr-ID chr1 2; pos 4802648 to 4812187 reverse strand)
gtgctgaacaaggtgatgttgtatgccaagaaaaactaactcatgccgttttttgatgtccagtcagtatctttatttctcgagttgatgaatttttccccctgttttccgaaattgactggtacttattggtagtaatttgtttgcttgtgctatttctaagcttagtgaaatgtagggctatagaagcagaagtttgcactcttttaaagagttcagaaaatcacttgggtttctttgtaggtgggaggctgtggggttatgatctctttctcatgaaaatggcaagacctttctagaaatcttgggatgactttcagatgggttcatttagattgcccaattagggagccccttgggtagtagcacaagggtagtgccctctggtaatgaactagaggtcctgagtttgagcctccccagccaactaggaagctgacttcttaattaacctttcttaaggaattagtatcccacttatgggttgtgtcatctgttttggattttactcattgataaggaacaatgttgaaaacatcctttacagacatataaaagaagaggaaaaatatttcattgggggtggattagtaatttctatattgttggcagactagcagttcatgggttttatttggagtttttattatagtagggttggttctaatagtttttctggtcaaatttctattctttgtggcttttagattgactagggaaggaagtcatattcctacataatctttagccttattaggaaaaagagttctataggtccatataaacttatttagtgtttcaaatttagtagtggtacttgtttagtttcttttaaatgtgtaattgctttttaggtgaaattgtttagaaatccaagtgtgattgccagggaaccttggtgtgcttgccaagggttttcttttctctgtctttgttgaccactttcatctctttctacgactaagaaacttttatagtgctggaaattaacaaacctgcatgaattattctaggttttatgcttctttatttaagggattcattctcctttccgtacttttcccccctcataaataatatgtttgtcttatgaaaaataggcgaagtagttttcgcttgaagttaaagttccaagttacaggggaagaaaaagacttgacatagactgatggcgaagttttttgaagtggagaaaaaggctttccaggtaaagtttgaaggttccaatgggggaacttggatcttaataacagagaggaaccgagggtttgttgtctcaataggatttggaaaggaggagttggaatggttgtcggagcatttgaagaaagctgtgaagttggaggcttccaggggttttattcgaaagattagaggcaagactaggactcacttgatggagatttgtttcaatagtagagggcgattcatgaaaattacagaaattgctacaaaaaggaaaccattaatccttgttattctcgagggtgttgaaggcaatgggtgggaagcccttaggaaggcgatttcttcagtgcaagatttttctaatcaagttggaagagtttcaaaggagacgttcgaagattttcaggcaagataagggcatttatagaggatgtcggtcctacgcagatgtggttgcagaggaaggacctaggaagggagctctgatgccagttggaaaatgggccagagcagtaatttgcgactgcaaagaaaaagttcaagattgggttcatgtaggaaaaactattgcaaggatgatgggtacgaaaggaatggtgtctgttacctctatttctgcttacaaggtttgtttctttgtggattctgcaaggagagctaaatggttccaagagcagggaagtttattagttggaggaagatctattcttctgaggagatggtcgccaagagaaaatatggttgtatttggaaaattcataaggggttggttagaactaaaaggtcttccttttcatttgtgggatgaagttcagttgaaatacattctgaagaagtgggggagggtaacaaaggtggcatgggaccctttgaagctagtagacttatcgaaggtgaagttgtgggtggagatgcttccaaatgtcgtgctacttgcgttgctagaggtggaagatggggcctggtcattcatagtcgcagtttcagtcaccgaagaagatgaagaagacaacctttttaggtttgagtcaacccgtagcagggacaagctgatgccagcgggaggttgcgtttctcagaggccaaagaatgcagaggggctatgcggtagcactagggataatgagtgttgcaataggaggcttctcccctgatcatgttatcgttattcaagttcaaacatggtttccaaaatggagaatggctgggaagggagtcttctgggcctagcggaaggaaataataacgggcccactatgcctgagaccttggttaaagcccggcctgttagggcccagattgggatgaaaaaccgtgggcttcctgctggtccaattggtattcaagcccacgagattgtagcgctgttgtcctcaatgttccagcgctcaggatcttctgcaaaggaggttccgttgtttgcacactctcaagatccagttgaagttagggccgacaaggacgaggctttctctgatgaggatggtcgggcttttgagagaaaggcctagtctcttcccaaccttagcccaccatcagccgcaatagtgggctgtaacttaaaaggcccgtcgtggttgggccaaagaataggaggaatgaagccttctgttatgacgggtttgttacgaagagaagaagatgttgtagtgagaatggggaaaacttctaaggttcagacgagaggctctacgcagaaagaagagaaggtcgtttcaaagaagttgtggactaccctttttcctccaagttttgatcgccgtcaaggacttcgaagtcgcaacgagcctcttttgctcgagaagtcatcgtcagttagcgaagagtgtctaatggaagaggatttcagggcgggatctcagatggaacgaggattcagagcgagtcctctcttccactgtcaatcgacaaggaatcgaaagcggtgttcgggggaagggacctcgtcgtcaagaggcgaagcagttttgcacaatccccatttcgaaaaagacaaaggtcttttgggccgagtggggttgtatctttatggttcattagtcacggatttaccttataatctagaaaatcagaggtaaagggctcaactttaaggggaattgtgaaattccggtagtggaaaactggaggtatgcctgtcttttccttctcagtcacccgagtcttcttctaccccttcttgtggtttgacacttcctttgccgagtccctttggtccaaatcttcctagttcagtctctcattttcagtctcctatggaaaatcaagtaatttttgaaattttttctaaaaaagacgttggttttttttttcaaaaatatgatggcaatcctatccgtgatgaggtggaggcccagtttgcttattcaaaccagatgtccgagagtgttaaccccagtaagtctaaacccgttttgcctaaggaggtttccaacctggttacagatagccagggtggcgagttccaaatagatggcctgtcccccaggaaaatggataaagtgcgtgaggttttaagttctttggatattaaggtttattccaggaggaagagcagatgctccacaggtatatgagacctgttggaactggtttggtggtttagggtctgtgaggtttctccatgaaaataatcagttggaatatcaggggtttgggatcaaggaataagcgaaggacggttaaagattttctgaggtcagagaatctggatgttgtgatgatttaggaagcaaaaaaggtggagtatgacacagaaggtttgtggatagtgtttggacgtttaggaataaggattgggctgctcttctggcgtgcagggctttaggtgggattttgattatttgggactctaaaaaactgcgcaatgaggaggtggtaataagatccttctcggtctcagtcaagtttgctttggatggatacagacctctttggctatccgcaatttatggcccaaacaaccctttacttaggaaggatttttgggtggagcttttagacatttttggcctatcttttccgttatggtgtgtgggcggtgattttaatgttataaggagaagttcaaaaaaattgagtgattctagtttaacttcaagcatgaaagactttgatggttttgtaagagaatgtgaattgcttgatccacctttacgaaacgcatcgttcgcttggtcaaacatgcaagagtctcccgtgtgtaagagattgaatcgttttctttactcaaatgagggggggcaattctttcctcaaaggcttcaagaagctcttcctagaaggacattggatcattggccgattgttttggataccaacccgttcaagtggggcccaacaccttttaaatttgagaatatgtggttgcaacatcctagtttcaaggagagctttagaagttggtggagaggttttcaaggaaatgggtgggaaggtcacaaattcatgaggagattacaatttgttaaaggtaatttgaaagagtggaataaggtttcttttggagagctaaatgaaaggaaaaaaggcatcctcaatgatttagctaattttgatgccattgagcaagtagggggtctcacttctgaacttttacttcaaagagccataagaaagggggagctagaggaattaattttgagggaagaaattcattggagacaaaaagttagggtgaaatgggttaaggaaggggattgtaactcaaagttttttcataaagtggctaatggcaggcgaaataggaaatttagcaaggtgttggagaatgaaagtggcttagtgttgaataattcagagagtatcacagaggagattttactttactttgaaaagctctacgcaagtcctactggagagtcttggagtgctgaaggtttagattggtcccctatgtcggaagagagtgcgtctaggttggattcccctttcattgaagacgagatttctaaggccatttttcagttggatagggataaggcgccgaggcctgatggctttaccattgtagtatttcaagattgttgggatatgatcaaggaggatttagtgagagtgtttgcaaagtttcacagaagtgggattatcaatcaaagcactaatgcctccttcatagttctgttacctaaaaaaagcttgataaagaaaatctcaggctttagacctattagcttgatcaatagtctctacaagattatagtcaaagtgctttcagggcgtctaagaggggtactacatgaaaccatccattctactcaaggcgcttttgttcaagggagacaaatattggatgcggttctcatagccaatgagatagtgaatgagaaaagacgatcaggggaggaaggagttgtcttcaaaattgattttgaaaaggcttacgaccatgtgagttgggatattttggatcatgtgttggagaagaaggggtttagtcctagatggaggaaatggatgagtggttgtttgtccacggtatcttatgcagtcttggtgaatggaaacgctaaagggtgggtcaaggcttctagaggcttaagacaaggcgaccctttatccatttttttgtttactttagtcgcagatgttttgagcaggatgttactgagagcagatgaaagaaatttgttggagggcttcagggtgggtaggaacagaactagggtgtcccatttgcaatttgcagatgatactattttcttttctaacactagggaggaagaattgcagactctcaagagttttttgttagtgtttgggcatatttctgggctcaaggtgaaccttgacaagagtaatatttatggcatcaatcttgattagaatcatctttctaggttggctgagttgcttgaatgcaaggcttctggttggcctatactctatctgggtcttcttttgggagggaatcccaaggcttgtggattttgggatccagtgattgagaggatatcgagaagattagatgggtggcaaaatacttatttatcttttggaggaaggataacttttatccaatcttgcctcatccacatgccctgttgcttcctttccttgtttaagatacccgcttcagtggttgcaaaaattgagaggttgcaaagggattttttatggtcagggattggggaaggtaaaagagatcatctagttagttgggatgctgtgtgtaatccgaaggtaaaagggggattgggatttgggaagatttctctaaggaatcttgctctcttagggaaatggttgtggaggtgccctagagagggttcagttctatggcatcaggtcatcttaagcatttacgaatcacactttaatggttgggatgctaacactatattcagatggtcacatcgttgtccttggaaggctattgcacaagtcttttaggagttttccaagtttactcggtttgtggtaggagatagggaaagaattcggttctgggaagatttgtggtggggggaccaacctttgggatcccaatatccaagactatttagagtagtctcggataaaaatattcctatttcttcaattctcggttctacttgtcctttctcttagaactttaatttccgccgtaacctttcagattctgagatagaagatttagaaggtctcatacggtcacttgatggtttgcatctatcaccttcgatttcagatgctagatcctagcctttatcttcttcaggcctttcttcagtcaaatatttctttttagcctcttttccggtttttcctactaagttcgtttacaattctcaagtacctttcaaagttaagtcctttgtttggttagtggcacacaagaaggtaaatactaatgacttgctacaattgagaagaccctacaaagctcttagtcctgatatttgtattatgtgcatgaagcatggggaatcagcagatcatcttttcctacattgctctttgacgatggggttgtggcacatattatttcagttggccaatatggattggatcccctcgaggagcatctttgacatgctgtccatcaattataatggttttggtttatctaagagagggatagtgttgtggcaagctgtgagcatcgctttaatttgggttgtgtggtgggaaagaaacgtgaggatttttgaggataaagcaaggaattcagagtatctttgggattctatttatttccttgcttctctttaggctttctgttccaaggtttttaaggggactcctcttaatgtgttacaacttgactggttagcggtatgtaattccaaaaggctggtctaatctagagagtttgtttgtttttactgtgtactttcatgtttttgtattcttgtagtttagttttatttggtgggaggatttcacatccttctcttgtacttcttttttctatcaatatatccctttgttgtttcctatcaaaaaaaaaaaaaaaaaaaaaataggtgaagtgttttttaaggcaagtatctagatgtacattcagtgtttatcaaatgcactgcttccaaaggaaattactgggtaaaatgtatccttatttgtattattatggcctccattattcatcacccttttttaatgtgattcattacacataagacagttataaggtagtagaagcacctaacccttgtgtggaaatagcagtttcctggttaagttactgtaatagtgttgacattgcagagcttggttgaaaaagtagtcgcatgaaattaaagatgtatgagtttattaactgacataaattgggtttgaaattgttgtaagtatcatatttcaagttttcaactaaaacaccctattgtggttgggacactgttaatggtttaacatagcatttgtggaccacattatatatgattttagaaacaacactgatgatttgaagatattggaattatgcatagaaaatgcacaaatgtatttaaaaaatatatatgtacacagttttttactaaagatttgcattatgggcattaagaaaaaatgtgcaagacgatgctcagctattggactattataaattgaatttttatatgctatacaatacaaataaggtgaagatgaagctctagatttgtaaagaaggaagatgcacgagaagtgaacaaaaaataaagaaaaagttaacactaacataacctaggagttgggtgtcatggagcggttcctttctaagctccaaggatagacaatgaagaggaaggaggaggatagagtagtatggaaggaagatagcaaaggggtcttctctgtaaaagaggcttttactctttgctggagttagattatacgacacctttccctttaaagataatttggaactcgtgaattcctttgaaggtgagtttctttacttgtgaggcttgctggggaaaggttttgactttggatcagcttcaaagaagagggtgaatgttggctaataggtgtgcattgtgtaaataggagttggagtccactgatcatatcctccttcattgtgatgaggtgagaattttatggcagctagtattctccatttttggtgtttggtgggttttatcttagtcgattagggagactctcctagggttgcatgactcttttgtagatagaaggcatattaaggcttggagagctgctcctcgtattttctggatgatctagaaggaaagaaataggagattctttgaatgtgaggaattgttagattgaaggctaaaaaatattttccttaacaatttgtttatgtggattagggtgtatataggcggggtatacacatatgattgatttcatagattggttgggccttgggtgagggagggagtattttttttgtgcgttccctctttcctgttttttgtctagtgcacttattaatccattctcttatcgaaaaaaagaaaaaaaaaacctgcatctataaaaaaggaagcatttcaaaataaagtaaaaaaaatcatgaatgcactaagaataacccctgtgaaagtcttagacacaaattccgttaaagtttacttctcttcattaaactttcttaggagtaaggagcttaggctgatgatcatattgccctccaattggaggtatgattttgatattgccaattggtaatgggtcattcataaaagtagcatattgtacattgaaagttcgaaatgtctcttcaattccatcatcgtattatgctaagagggtaatctttatcaagactaaatggtgttcatattacagcacatgcacattctatgataaaatttttttgcctggcttaaagttgtatatttttcacagacattagtcagggcctctgatttcattttggttgttttttttcccctctttttctactagatt

SEQ ID NO: 10588 - DNA, 13266 bp, Vitis vinifera
  Intron number 5 from transcript GSVIVT01025088001 (locus G SVIVG01025088001) derived from phytozome v7.0 (chr-ID chr6 ; pos 4614061 to 4627326)
gaagtggtacccaggtgatgatatacaaatccatttgaatgaaatagctagaacttgtccaatgtatgtcttttagttaatattctctgatagctagccactggtattttaaccagagaggtggctaagattagtatgcttaaatattctcacacttataatatagaagcagttgcttagtaggaccaatcatggacagccaaaattggatgacatcttgttcaattatgcttgctgcttttgctcatttttgcaaaaacttcttagctgcaaattcatatatattgttgttggatatcattgaaataagaccagttggtattataaaaaaatcctgtttataatactctagcagatgtttaattacctaagcagttttcacatgtgagtgtccaatgaaaacctatcattaaagaaataaatacaattctaggcaaaaggcaaagccccctattttagtaggaaattctaattttattatagtggaacttaaagggtaaggtcacaactcacaagacactccttagagaaagccctaacgatcaaaatggaagattaagttcaatagggatgttcaggactgtaatattttattttttattttttatttttttatcagaattccaaatagtaatattgaattatctaaataaagatgcaactccactagggatgtttggacttaaattgaagaagtgattggacactcctttaatttaattttgtatgttattttcttgtttattatttccttaattacagtttttatctctccttttgttttattttggttcatggatgatattattggtgcttgagtttagattttgataagtcctggccacatctgttctttttctcttcaaacacatgtactctcatgtgcataaaatttgcattctctttctcatgaatttgacagtctcttttcaagcatgaagttaagacaggtgcggcatgattcaaacacttaagacagaatttggaaaaaaaggataaaggaatgatacaaacactgtggagatgtgtttataaatgtatttcatgtatagttaacttatctataaaaatattaaatcttatttaattaatctagaattctatggttataggatgtgttttgcctagaattatctggggtgtctcaagacatccctgggtgcatctatgatataaatgttaaaaatactctaatcttggacaatttaaatgcatccaatgcatgttaagccatgcctatggtgtttgcctttggcatgtattgcatatggctatgatacttccatagaagttaccatgcttcgtagttcacaatcctttgagcctttgtgatcactcctaatggtttcgtcctcaaaatgggtgtgccatcttaggctaaacccaatccatcttggctagactgaaaagcttatgccaaaaccccaatgttaattggcaatgtagatagtgatgaccaaccgattcttcactctctatgcataagatgtccaacaaggactgcctatcaaaagaaaaaaaaaaggatgtccaataaggactaaggaacttgcaaggtcttttcaactgtagcatgtcattggtttttactttcttgggcactactaaccaaacaaagaccttaatctttaatggagcttttgatttccataaaaatttggttaaagagaatgagattggaattgataagttggacaaggccaagattttttttattttttatttttattgagaataagaaaaataataagtttgttagacttattcaactaataaaatgtataaatattcttaaattttataaaaattcataaatattatccattttacaaaaaatcatatgatataaattactatatttttcataaaaagtaatcaacttatcttagtacaaaaaatggcaattggatgcataaataatggggtcatgattctccctccctccctctctctctctctctctctctctctcattaaaataaaaaatgatgattttttgctgatgtattgccaattttcagctagtaggcatggttttgcaacaattctccaactgataaattgcctattttttccgcaaaatgtcgtttattttcgaatttttttagtatttatatttaccctatcctaatattggttcaccattcttgagatatattattgacattattgattaaaacaaataatagaagtgctcaagagtaatctgtctacctcagtataagagaatatgatttaggagtctcaataaatgtaaaggggatgggctcgggatggggcctctcccatccccacccctgtagagagaaacctgatcctgttcccaacaaaaaccaagggcagtttagtattccaaataccatctcaattcagggtagagtagggtgggacatgagtactaaaaaaaatttgaaaatttgtttgattgtttctccttgatgctatttatggtttttccaatatgctcctatgttatgaaaaaacaaatagaataaaaagaaatcaaacgaaaaaagagaaaataaaacctatcttatatagagtttcatgatttggtaactaaaaaatctgtgtataaatcctcaaaaaatcgacaccctttagaagagcccatcaatctccataatgttataaatccagaaaataaaatctaaataaaaaagaaagaaagatatatgatgtgatgttttcttttttacctatcaaaaaaaaaaaaaaaagaaagatgtgatgtttcaacaaaccaatctcaaaactccaaaagttttaactttaaccttcatgtaaatatcccaaaactccaaaaatttcaactttatccttcacagaaatctccaaactccattgattctaacatcaattcatagatttggatgaagaaaaaagagatacaaaaaaatgattctatgccaatccacaaagttttactacgatttgagtgaaaaatatgtagaaaatgaaggcaaaagggaaacgagggataatggttgtgatagagaaaaaattgtagaaatgaggggtgcctatagaagacaagatgtcatggaaagggaagaaagaggtgttgatagggttttgggtgtgtgtgtatgtataaaggtatcttgtaattagtaacattcagaaaggcgaaattgtaaaatgatctctttccggcgtggggtaggcaggctgagtaagatccaccctcgacccaaaccagagttgggttataaaaatttcccattctcatctgtaccaggttatattttgcccaaactcaacatattaagggcaggttgaaccaagtttttgaaacattcaggatattgacatccctagcagaatcttttccaagcttgtaaagataataccaatgaaccaagggcctccagctttgcatcaactgacctgtggtaagtgtcatccttctgcaacttggggaagttggaacaagttcctaccaagtaccaagaatccatgacatctatgaattatttggttctttcatctcaatcagaagagcttctctctttgtttaagaagggcagatatctaggaagagaggctacttgactcgttcttaaaatctagagacttgggaattggaagaatcatacaaagcttgaatatgttgaggagttcaactaatgagttttatttatttttttattttcattcaagaagttcaacaaataaaaaaatttagaactataggagccttgcagaaatgaaagtggctgcaaaaatctgaccttcccccttagccaagtctttaatgcatgaaggttcaagagtaaatgttagaattggaattcttgcacataaaatatcttgatgttagaattggaattcttgcacataagatatctttacaagatggaattccatattcatgaagagaagggagcaattaaaaagaagatggttattcgtcttagatttagatttacaaaagttgatattaaggattcatttgaaggctcaagcaaatcaagcagtctttcatgcttaaaagattatggaaaactttcatagctttagacttcattgagaaatgctagcttttaatctcatgatatttagctattagacatgattacccttgtgaagaatagcttcctttgtagattttgatgttgaatcaaccctaaccacccgagggtaatcgttggagttggtatctcaagcaataaaatctttgatggggtagatagaaggcaaactcctattgagagatctttcttcatattttaatcatattagaagaattgaattaggaagaatcaaactactttttatctctagaaaaataacaatatatttattgaaagtagcaatcaaaagcataagtgcaactcaaatacatgcaaataatataattgtggatcgaatatccattagacactgtagaagtgagcaatccatgaagttggacaactttcgagatgaacaacttaggcacatagtaaacatcagttgttttcttgaaacttatgaagtgagccatcttttggagaattgatcaaccattactaaaataaagttatgtccttcagtttttttaagtcaagaacaaaatccatgctaagatctttgctagaggtggcaattggtagggttgagttgacaagagacagttttcaagggcctaaataggccataggttaggctaagcgatacctaatgacatggatacctggcttagcacatgcatgaggcccacttaggccatggtagggtggtggctcattttttttatttattttttgttatccttttttttttttttaaaaaaaaaaagtagatttagatatgtgacttaattgtaacttatagttttatgttacttatagtttatattttacatgtaatattgtaacttataaaaatattatattttaacttttaagttttaaattacattatggaaacttataaatttggacttataattttttttgaagtaatctcaaaacttaaaaaatgagatgaataaactaaattatgttaacaattgcatcatcatatttgcccttgaggcctagcttaagtggtaaagggatgcggagggtttgtgggaggttctaggttaacaattgcatcaccatagtttaggcacatcccaactagattggcaccaacctaactattaattatatatattacttaaaagttgatatacataattacatatttagaaaaaaaataaaaatgcaacggatactaagatatacacttctttttgacaaaaattaatcttcgtttgaaggttgagcttcatcatcttcaatattctctacttgttgcatgtttaatttttatagcacatcccctatgtcatactttccacgctcgttgccacctatttgcattttcccaatcttttattcatgctaaatatttttatcatctcaaatgtgagccacatcctcttgtctctagttatgtatgaaactataaaaaatgcaaatctgatgctatcatatacactggtgaggttagtatatcccatgccattttagatagcatagggaacgtggtttcaactttcatgtcctttacaccatttgcaaaaacctaaacttttaagttcatcatgagttaaaaatgcaatataatttgaatctaaatattttgaaagtttaggcatgtttcaacttccatttggttgttgtcatttagataaatttctaaaaataatattttgtccaagtgtggtgaaagttgatgaaataaaacaagattcactaccatatgtagtgtgattttttttatatgaagtttataactacacattaatttccccataggagaaatagataaattcatattcaaaaccttgaatttttatcctatagtctacacgagttgctaaataaaaaattgtggaatttcccccaatattttcaaaattcttttgttcagtcctttacaaacactaaaaaatattgcttcggtatttttatattgttcaaatattccattgtcaaataaatgagcttgcccactagactttgatatcttcttttatttgaaaacatagtgctttcatctccattaagattcacattttgctccataaaagtgtacttgttattactcctaacatgttagttcattaaacaaattcaatacatacttcctttaggacaaaataatcttacctctactatgtgtaactttaatgcttaagaataacgtaataacctaagatcctttgttggaaaggtatttttcaaataatctctcactttttcaatacctttaagatcaccacttgaaacaatatcatctacatgtagaatgaataccactatgctactttccctcttgagaaaataagtggtcaaaattacatcttctaaaaccaaatgatagaagaatagtacttaattaatcaaaccaagctcaaggaaattgctttagtttataaatagccttatttagtttgcaaattctaacttctaactccccttgagtaacaaactcatgtggttgctccatataaatttcctctctcaaatcaccatacaagattgcattcttcacatctaattgatatagacttcactcaaaattaacaattaaggaaatcggaatatgtagtgaattaagacgagcaataggagagaaagtctcaaaatagtccacatcataagtttgtgtatacccattagcaactaattgagccttcaacctatagatagtctcatctggatgatacttaatagtaaaaaacctaacaatagcctataacatccattccttgaggcaaatcaatgagttctcatgtatctttgtttaggagagcatgcatttcttcttccatggctttcttccatgtggtatactttagagcttcctactaagacttagggatggaaatagaagacaaggcatgagcaaaacactgaaaggtggggggaaaggttatgaaaagatacataatgagtaagaggatagtaagtacaattgcgtttaccttttttgagtgcaatatggaggtttgactcattgggaatttgaggaaacaaatataggtggtggtatagaatcatccactaacaagttcggatgaagtagaagttgagtttgatttgtttcactatctctaaccagttttttccatttatatgcttgttatggtttgtcagtcttagatggagaagtataataacaggaagataaccagacttggaccgaaataagtcattttctaattgtaaaccatgattagaaaaataaagtagtcttaaagaatgttacatcaacagtaataaggtatttacgaaacataggatcaaaacatttgtgtcctttttgagttttagaatatcccaaaaatacacatttaatagatcgaggatccaaaaatacataaatattataaacaaagcaaacacatccaaaaactctaagagacggagaaataagggatgagcaagaaataatatagaatatggaatctttttatgcaatataaaggagggtaattgatttataaaataatatgtagtttgaatggtatcccctaataagattttgaatagtatcttgtttaggattgagactagcatccgtaatgagtcccgtatcctaaaaatggaatgcccagctacaaaaggttttttcttagagggtctttctcccagtaaagtggccaaggccctttcgattttgtcctctaggaatgtcaagttagtcaaatgtcaccagaacatcataccttcgggaaataatagaacaatagtgatggataaggtgtatgttgggtgaaagtatagaccttccttggatgactaggaggtgttggattagaggttgggggatagagaagtcttgttatgaggatcgtcagttggaatactacttgagaattaggatccaaaaataaaacaagggtgattaaagattttttgcgaaaggagaatctagaaataatgatgtttcaggaaacaaaaagggaggtttgtggggagcatttggtccgttaggaataaggattgggcctaccttccaacttgtggggctttaggtgaggttttgattatttgggattcaagaaagtttagcagtgaagaggtggtaatagggtccttttcagtcacaatcaattttttaagagatggagtaaggttttgttggcttaccttttgtttatggtccaaacaacaccactcttaggacagatttttggcatgagctgttggattttttttatttaacctacccaaattgttgtatgggggagattttaatgtcataaggagaagttcaaaaaaattgagtggttctaggttaacacctagtatgagagattttgatgaattcataagagaatgtgagttaattgatccccctttaaggaatgcttctcttacttggttaaatatgcaagatgtctcgatgtgcaaaagattggatagattcctatgctcaaatgagtggtagcaaagttttccacagagtctacacgaagctcttcctagattgacattagatcattgcctgattgccttaaacaccaacctaagtgaggaccaactccttttagatttgagaacatgtggttgctccatccagaattcaaaggtaattttactagttggtggataaaattctagtgtaatgggtgggaaggacataagttcatgagaaagttacaatttgttaaatccaaactaaaatagtggaacaaggtgacttttggagagttaaaagaaaggaagaaaagcaaccttactaatattgctattattgatgctttcgagtaggaaggaaatcttgcaacaaagcttttagagcaaagagcctttcgaaaaggggagttggaggagctactattaagatagaaggtacattggaggcaaaaatctaggttgttgtgggtaaaagaaggggattgtaattcaaaaattttccataaggtggctaatggcaggcgcaacaacaagtatataaagaccttagaaatgaaggaggagcaattctagataacatagacaatattttagcaaagattttgcatttttttaggaagctatatgtgagtccccttggagaatcttggaggtaagaaggtttagattggttacccatttcagtagcaagtgcttctaggttagaacgtgcctttattgaagaaaagattcatcaagccatttttcagttatataaggataaagcttctaaccctgatggcttcattattgttgtgttccaagaatgttgggatgtggttaaggaggatttaatgagggtgttttcagagtttcatagaagcggggtagttaatcaaagcatgaatgctaccttcattgccctagtgccgaaaaagagttaaaccaaaaggatgtctaatattagacctatcagcttggtcacttgtttgtattaggtcatagccaaagtcttagcagggcaattacaagatgttcttaataaaactatccatatcacataaggagtttctgtttaagaaagacaaatattggacgctgtgttgatagccaatgagatggtggatgagaaaacgtgatctggagaagaaatggtagttttcaagattgattttgaaaaggcttatgaccacgtggattagggctttctagaccttgtacttgaaagtaaggggttcaatcctagatggagggcttggatgagaagttgcttatcctttgtctcttttgcagttctagtaaatggtaatgccaaaggtaggtcaaagcttctagagaattgtgacaaggaaatcctttatctccatttctctttaccattgtagttgatgtgctaagtagattgatgttgagggctgaggaaaataggttactagaagcatttagagttggtaggagtggggctactttttcccacttgcaatttgcaaacaacaccatctttttttcaagagcctgttgggaagaattggacactcttaagataattttggtagtatttgggtatatttatggaattaaagtcaatttagagaagagtactctctttagcatcaatgttatctagattaactcgataggatggcattggtccttggttgtaaggtgtcaaattgacctattccctatttgggacttccattaggggagaacacaaaggcagatgtattctgggattcggtgattgagagagttttgtgaagattagatgggtggaaaaaagtttatttgtcttgaggtaggaagataactcttatccactcgtgcttgtctcattttcctaactacttcctttccatgtccaaaattccttcttcagtggtgttgaaaattgagaaattgcaaatggattttctatggtgacggtcaaggtttaaggagaataacagagaccatctcgttagttgggacttggtgtgtaaggctaagggggggagtgggattatagttgggaggatttctataagaattcacgttttattagagaaatggctttggaggtttcctaaggaaaggtatactctttatgaaacacatactaagcacagtcaggtggtcacatcgttgtccttggaagaccattgcacaggtctttctaaatttttctagatgcatttggctggtggtgggagatgggacaagaattctgttctaggaagacttgtgatgaggtgatcaacctttgtgttctcaattctcaggtctatttagaattgtcatagttaaaaaccttactatctcataagttcttaggtccgctaatcatttttcttggaatctaaacttccatcacaatctttcggatcttgagatagaagatcttgaaatactcatgtcctctctttcacacttgcacttatctccatttggtcatgactcgagagcatggtccttatcttcttcaggtttattcataataaaatcgttctttttagtcttgtccaactatattgatccaactccatcattccctattgattttgtttggaaatcacaagccccatttaaggtcaaatcctttgcttggttagtgacactcaaaaaggtaaatgccaatggcaaggcattatggcagtttgtttatcttagtttgatgtgggttgtgtggtgggaaagaaatgctaggattttttaggagaatacgagaatttcaaagggtctttgggacataattcatttcttagcctccttttgggcatcttacaccacattttttaagggtgtttgatctctctctctatggatcctgacatgagggatgggtgaacttctctttctcctattagaatggctagggtttctctttagaagctctctagaagatgacagacaaaagtctaaaaccctaactcctaaggaggtatatatagggctccttctaaacttaagtgactgaagtccaaattgggtttgagtcacctaattcagctcgcctgggtcataattaattaattaattgattagctcggtccagaaagacaagttataagatctaatgcaaccttacgtttttgtcaaaacactcttatgcacacttatgaactagaaacccaaattcctccgggcaaacgtgctaccatgaactaggagcttgagaggggaccattaagacacatagaaaaatattggcttctttggaatccaatttgatgctaagtaaactctcgactaatgagagtcaaccgcactccaatattttatgaaattatgataagttaaagctcgggtttgtgacttaccattcattgcatgcagtctccccattaactagtgtccgtaatctaacaggatagtgttatcaacttatcaagattacctctcaaatccttaagttatagatcctcttactatgtgatcaactaacgtactttatttcataaatagcatatgtcaaattctacttaaggaataatactatgattattaatttcatgatcacatatcccttggatgatccaagaggatacgctatctcagtcccatgagatattatagtacctctattgagaatacctgttgccactagcgtccatcaaccatagcctattccgtaaggatatatgaccaaattagggtatcacccataggtcaaagtctcctgttgatttcaatatagactcaatatcctctcaaggttcaaagtcaatgcaacatagtagattggtgaatcatgataatctgatagcctcatgtcatgattcactctaggtcctttccaatgtgtaatcatacacactagtgcactcatcatgagaaacttctcccgaaaaccaaaacaagttatacctctaattaggaggtagtgtactaccgcctctattggatactgattgtgaactacttatcatcttgtaaagaattcatgactagtatcttctgtgtaacttttaatgcatcaaagtcatgtacaatgcaagtgatatgggtttgaatgctcaaatcaatatcaatgcaaatgatggatagaaaagtggaagcccatatctaactttgttgcattatgtcttgctttaatggactctatcctaacatttagtaagtctgctatcaagataaaatgtatagaaatagaagaaaaggcagaaaagaaacattgcaaagattaagaaacatgattataaaacacaagtttaacagtgggatgttagtcaggtaaatgtgccttgatgtaatgtaattggtaaagctcaacatcataggtggataacaagagcctctgaataagaagatgttaagcttgagccatgtgaaacaacttactgatgatcactgataaacctgtaaatgaggttaggaggtggaggtggtgaagctagtgatatgggaattaatagagaagattagagttcctctcacaaatagatatgagaagagatccaggtattttcagaggcccattcaccaatactgcatcccatagcctctgcaaattcctccaactgatttttctctaaattttttttgccccaagatggcactgttgtcctttgttactactttaagaagtaaataccattgatttaactagaaccaaaactggtccacaattagaacttgcctttaacatgttgataattagaaaaacaaataattatgatagcaatgttcatggtttgatatcaatggcttccatatcccttttcagtggtttccaatcctaatgcatatggtacttatagcccaagctcgctttgtcatgtctaacagtatacagtatcaaatctgtttcaaattctgaaaaacctgaaacaagcctgtgaagaacctaaattgataaattttgagaaaggttgaacttgatgttgctcttaactttgcagagctc

SEQ ID NO: 10589 - DNA, 3415 bp, Vitis vinifera
  Intron number 1 from transcript GSVIVT01027573001 (locus G SVIVG01027573001) derived from phytozome v7.0 (chr-ID chr1 5; pos 15448124 to 15451538)
attgggaatactgagaagcagcaaaggtacagtgttatgctcagtgagtgtgattctttccccaatgaaaggtcagtttgttttgatttagtgcacaagggggagtggtttaccttttctctgttgcctttccctttcctgtccccacattgctaattcttctttgtaattcattttaattagttcctctaaacgatgtgctgcattgacctgtaagaactcccttctgtatttggttgtggagttagtttgatttggcagagaagtaaacctcataattatgaggatttgattgtgaattaatctgtattctttatacttactgctcatcctttttgtataatttaatatggggatgagttcagaaatttaaatagtcaatgctttctcttaacaaaccacagtaggttgattgctactccctctgattgttctcttatcgtagttttcctgacaatggaattgaaaaaaggaaaaaaaatctcagactgttgttcctggttcatttttatcgctaatgagatttgagggatacaattcatgttttccagctgtgatatagtatacagatggaaaaaaccaggttgaggttgagcaaaacatttcagcgttcttcaaatttttttcccttcttttgaatctacttttctggtcctgctgaatggacccactgaatgttggtaaacagaaagtacacgagtatggagctttattcgttattctttatggctcatgagaggcttatttgttttgacttatatgtaggaatttctaactagggatagtgtgtcactaatcattaatgaagttgtatgcatttggatgattaatgctaaatagaagaacaatgagggaatggtgattatagtttctcatttgaaatgttctgttaagtagtggtctggttgtttatccttctggtcgcttgtgatttgtcgctgtttggctctaaaccggcatcagtcctttgacttacatcggcatgaggggggatatctcaaattttatgtagttgtttaggctggataaatgaaggatttgaaccataatatatgaaagatctcaaattttactaggtcttcttaaaaaacttttctttttcctttttttaactctaatctcatttagttgtgttggtttttagttggactgtcaaaattgtgatttgatgtttgaagtgaaaattttccaaaaatgtgtggttctgatgtgattgttaattggagtatttattgtcattgttgataaaattatggaccttatgatagtagatctgctgtcttaccccatgggtcagtggtggtcagtatatctaatgatcttttttcttttttatttttgatttctatagctgcagatttctttgatattgtaatttttttcatgctttaacaagcatattcactcccatagtctcttcacctccactctggggagcatagatgaggaaaggaaagattattaaaaaacgaaagcaaaaataaataaataaataatgaagaaaggttgtatttcttgattccaccaatgaaaatacacccaaaaaatccctctgaaaataggtgttgtgagctatattgcctggtagatgtatgaatttttttatttttttatatttcatagacactgttcttgcagagctctttttctatttgagcttgattgcatcactagctttatgagttgaattggtatgtgtcctaaaacaatcatgtgcaaatccaattcaaaaaaaatttggtggctcatttggttttaggaaatgaagacagaggcagtgataatagctttaaaaattctttaaatatctcaatttcacaatcttgaaaaccataatatagggaaccccataaattgtgttctgagtctcaaacttagatctaggaaacaagtgagacccagctgcattaggggaaaggcacaagggtggtaaggcccccctaaaaaggaaagttttgctatgtaaatgtttttgtggttgtaccttgttcagatttggtttgtcgaatcatgcatgtgggttgatggtgcatctatatctgctaggcgtacttagttgaatgatcaaattggggtccacggaatagtttctgtttatgtgattttccagttacccaattggggctttctcttttctgatttcctaatgcaggtcccaaaccaaatgcttgccatgtctttcatgtggggcatctacagaacacaactgtccacacacattgttgaatcatgttgttagaactcaacttagggtaggttatgatgtatggtttacccacttattgtcacactctttgagtctgatggatatcatgaacactagttgtatgtttgaacaacctaaaacttgattctttatgatatttgcctataaactgcatcattttttgtttatttatgttaaggtgcccataagccttaccttggattatgataactttggagaaaagtatagatttctttccaacaagccccaagccagattaaaagccagaaaagggatgagttccaaagtgcagccaacacccatattgtggggttagatgactcaacaagaccagactctagggcatttcaagtacattatggtgtcacaagcactcaccctaaagctacacataagtgccccaatctggtctttgaacaacaactttcccaagcagtacttcatcaccagtactttattgaacttctcaaatctgctttccttggatgtgatgtgattctgtctctccttggccttattctaattctctatcttcacttgcataagcctgccttttttagtccacttccatgcacttgccttttccttcctctaacttccaaagcaaaaaatctaattgggatcaactttgctccccattatctttataagccctcaagccgcccccccaccccccacccccatcagcacatccaccaaatattccctaacatagccaaacatctaggcatcgaccaaactctaaatccacaccatcccattggatgaatagggagaactacataactcaactagttttgtcttcaatgtgtctatcaatgtcacagaagttgctttgtgagggggtccttatatgctcttccttttagtggcatataacatctttgcaaactcaccctagtaattgccactaaaggcaactcaaattggtcttatgctatactacccaaatatcttagtttttactttccttgcactgttttttattttaatattggaatagaagattcattgctgtaagtgaactgtcaaaaatctgttattctcaagatgattagatgattagcttaaggcaggagattatgatacttttgtttgacattgaaatgatcgaaaagctaaagctaggaattaatgcatggtcgtcttattgaatacagagtacaagattcgggagggattctctac

SEQ ID NO: 10590 - DNA, 5859 bp, Vitis vinifera
  Intron number 1 from transcript GSVIVT01012252001 (locus G SVIVG01012252001) derived from phytozome v7.0 (chr-ID chr1 ; pos 112286 to 118144)
tgatactactagggactacacttaaaagaaggggagtatattaacaacttatgacctttgcaacaatgtttttgaaaacaatttgcgataataattttaagaagaattgttttcaagagtaaaatttgatttgagaattcaaatatgaaatagttatataatgtagaagttcttaaatcatacatatttaatttgagaaatagctttatgtagttggacctatgaacattttcaaagttattctatagagcttattctatgagtctcttggaaactgtcatacaaaaataacttcgtatcgttgaagtttcatcaaaggtttagtggatacaatctttatataaatctcctttaaaaataatctttacccaaagtttagtagatataatctttatataaatctcctttaaaaatagtcttcacctaagatgattcataggagctaaaactttgagacatcaaatgctatcattaagaaacatgcgaccaaatttttctttcttttgaaaacttttgtacatattagattactttttgaattgattcccaagttgtattagatgatcttttggatcacttctccaattatatcaggcgttccaatcgcatcatcaaccctaagcataacccatgtgtgctcactctatgaaagatattaagagatcatattttgcaaattatattgtattataattgttacacaaatatgattagccagcgtgacgaggatccttaagggcacctatcatcttgatactctaacccctcctaggatcctttaattacatgacaccaattattctaataatctaacgcctcttcacttgttcttactcatcatttttatctcttaatttttaaatttcataaaaattctattgattgccttcaacaatttaaattaaaatgagaattaagattaataatagtaaaatgtaaaaataaataaaaatgaaaaataatggtagaagaaattgatttcttctcaaaattggtcattctcttaataataaaatgtgaaaaaaataaaaatttaaaaatgcatataaaaataaaatataaaatataattataaattattagtttatctgctcatagttcagcattctatcgatacctatatattttttttttcatttttgtatattaagaaatatcatattaaatgaaatgtggtgacaaatttaaaaacaaaaattatttcaattttcactgaataatatttttttttcttttatcttataattttcttttctttttttctctccttttttagatacaatattaattaaggttgtatgagtcttaacatgcatgtttgccgtaatttcatgttatattaaccgctaaaacggatattatatatagcttttgaattttttaattcaataataaatttgtaatctattaatattttatcattacaattttagaaaatagaatattagagttaagaagattctattattaaaataaaattaagaaaaattataaaataaatatataaagtaaagctaacaataatataaaaatgaataaaaattttaaaaatgatttttaaatattaggaaaaagagaattaatattaagataatggtttcattgaaaagaaaaaaaaacaatgaagatataagggcttgtttagtcggtgtttcaagaactattattgaaaacaaaaaatactaaaaacttgtttagttgagaaaattatttttgtttttcttgttcttcgtgttatcaaaatgacactttttagagaacaaaaaaatgttggggcctgtttggttcctattttcaagaacggttttttgttcttgaacacaaaaaacacaaaaaaaacttgtttagggaagggggtgtgtttttgttttttgtgttttctgtgttatcaaaaaccatttttttaaaacaataaaaagatattttcattgttttttcactgttcaaagaatataaattgtttttttcgtgttttcttttctttctttttgcgttttcttagttgttttttgtgttttcacaaatgtgagctccacccaaccaccacacactcacccataaaccattttaaattgttgaaattaatatatttacacatggtgacaaagttatcatttgtttaagaaaatcataacaggtgtaaaaatttcaaaatgaaatattttttttaatttaaatgaattgtatatataaaaattatttatatatttataatatcaagttaatggaagaaaacactttattaatttaaaacaaaaaactttcaaacatgttttttgttttacttattttaaattttttttattaacttaaccaaacatgtttttttaaactattcttaaaaactgttctcaaaaattatttccagaacagttttcaaaaataacaatcaaacaagccttggctttccctttttttttttactgtttacagaacagtttttaacttcgtgcttttttcttgctgttcttcttgttttttttcttgtttttctcacatttcctcttctcccgcatagtggcagcatctccagtagcaccaaacgaaggtaactccataaggtaattgggttgaatcggttaaattacaaaagtttttctgattcaaatcaatgattttttttcctttcaaatcacaacataaagatcataaaattttccaaaaaaaatccgaggaagaagaaacattgaaatttaaccgagccgtgacttccttttaagtctagaagaggagaaatcagacagatgagggctcacttacctcaccacaatcgatggaactcgggagctttggggctgatggatggtgactccttagcgtcgattttagtgattaagcattggataccttttccaatgaagatgaccatccggggagtgcttttattgtgggtttgcaaacttgcagtcgggtggacatgaggacagtgaaaaccatatttgggaaagtaaagtaaaattggaatgttatggtttatatgcaccatgagatttaatgagaataaacatttgaatatttttaatttattatataatctaaattttgtcttataacattccaaattaaagtagaaaatcaataattatttaaaaaatatatttttaaaagaatcataattataaaaacaacattttaataataggtttatattagagaatcaataattatttttgtatgttataaagattacatttatacttgaattattttaaatttattatatcatgtaaaaggcaatataatatttaataaataataatatgatttgtataagatagatttatatgttgagcatgaaatcatttttaatttattatatcatgtaattatttttgtcttataatattttaaattgcactaggaaatcaataattatttttaaatgatataaaaattatatttatatttaaattattttttattttattaattttttaccttatttatctatatcatattccatgttcatatttatctactaaaagttaacaaaaattataattggtgtaaataaatttgagaattatttttttaaatttaataaaatatgaatttaaaaattatttatatgcttacaatatcaagttaattaaagaaaaaaatacctttaaatattcttttttattttacttgttctaaaaaactttttttattaactcaaatgtttttttttgtttttgagaacaaaaattattttacagaattcagctcccaaacacaattttgtttctaaaaatacaaaaaatcattttccagaacagtttttaaaaatagcaaccaaacatgccctaaggaattaaaaaacaagataattttagaaaaatttagttttatttttttttttctaattttgattgtatttttaattttatttatttatttattttacctaatacttaattttatattatagtagcatgaaaataaattgaatttcataagaatgataaatttaatacttttaaattttaattggtttaaataagtctaaaatcgcaaaatagaaacaaaaatattttcaaatatttaatgtaatctaacgggatgaaaatcaaaatgaagattgagatcggatctaagtagaaatcattcgggatatctcaggcctatgatattcgggatatccactcttttgctttattttcggagaaaaagaagtctcagacgatgtttctagtatagactgactgcatacttttccaagtttgaaagagccgcatgttggaatctgttagaagtttcagtgcaatctgttttgtttttcctctaccaccaaacgaagccttaatcccttttctgggtttgtttgtttctccacgatattgtgttgaagcagaaaggggtggttcaaaagttcaaaatgggttgtgtttcttcctgtttcggcccgagggattgggaagataaccaagacaggtccatccacacaaaccgcacctgtcccggtgccttcattcccaactttctcaacaaggtacttacttctggttgttccttccacggtttctaggttttttttttttttttttttgccctgtttgtttgataagaaagtaaggaaaatgacatgtcgaatatatatttcactcctgaaatatatatgtcttttacttgaaaggaatattccacagccacatgcttaggagaatcctctgaacttattgcttctctcataaatttatgttcttttggctgctgatatgctgcttttatggtatttaaaaaaatgcttcatattttttttgtggtacattccattgagaactggcagaatttaataaaacacaagttctgttttttttttttttggaatgaaaaaggtcttttgaacccagtacgtaccaagcttgatattttttttagtttgaattttttcaaccttatcttcttaatctgatggaaattataattaagaatgatcagatgaggggaatgtaaagcccaaaaaaggaagaggaaatagggagacctgttgcaaaacagtgcccaaagaaaatagaaaatggcttcatggaagtaactcttttttccgtctccaggatactataggtctttcactgtttgagttgtaggattttctatgaaggccacaaatggcagcgaaaatgccaaatcatgactggcagatttttccttaatacatctcaaccaagcgtgcataatcttaataggcccagtaatgtgcagtcataattgcttcactttaaatggtacttctgatcaatatctgatgccctgaaccttccgaggtatctaaaaaaaccattcctttcctttattcgaattagaaactaaaagaaagatccattaaggtttatggcagccacattttgccacctttgtattctgttctttccttaattatatgctaatgcactgaaggattaagtcatcaagaaaaacaaatgcaagggggtttgtgtccttgctcctgctggatcactatctgcttaaattcttggaatctagagaatttggtcgttgtttaccttgttcaaaatgctgaggaggttatatagcgtatagctttagtttgtaatgtatgtattagtctcacctacgcactgaagtgaacgaattatttctcataatgtatccctccccatttttctgcagtatgtacaaatattaggcaccagacagatgcgtaccattcggtgtgctgcctcttcaaattttacagtgggacttgatgatacagtatctaacacagatgggtttcgtcctagatctttgccatgtaatgcgaatcctagatgttccaatttgcaactgggtggacgaaccacaagccatgagaaaggaccttgtcatttgctgaaagattctgaaccacacgggagaagcaatattcaggcg

SEQ ID NO: 10591 - DNA, 11493 bp, Vitis vinifera
  Intron number 12 from transcript GSVIVT01022685001 (locus GSVIVG01022685001) derived from phytozome v7.0 (chr-ID chr 2; pos 14970651 to 14982143)
agagtttcaaaaatatataaggtcaactaaaggtaatgtattgtctttctaaatgaaaatattggggttaatcttgatatcatgtcttaatctaatttgtatcatgcgcaaaaccttctgaatcttgacatttacatttgatgtgctagttatattcttgatcttttcttttttgttgtcttctttttcttttttcttgttagattgtatatttaatcaaatgcaatatcatgtcttaagttttccagcaataggttatgtgaaatttggaagaaaaaaaatctcagattgagagccatcatctttcataaaccatttctgttagctacatgtcattggttaccaatttttcgattgagtggttctaccagccaagaatgagacataattcaagaaccagaacaacagcactaatcattttttagattaaatgaaggaagatttagatatcctagcatatctgtagattggaatgctaagcttctgtaatgcatttcaattttgaaccatcctatgcaagattcatttttttttaggtaaggtgtttaatgtgcataatgaataacttgagaactaccaaattatcaatacctgaaaatttttgaaaaaataaaataaaataaggaaaacatcaggaagtgcccctaagttgagttagggactagaaatatgggtgaaatctcaaaatcttgctttctatgatacaccagcaattggatgttgaaaaaaaccaatgatccttgccttggtccctccaaattccaattcatacctaatttaagaagatttgaaatctcataaaatagatagagaggcaatcctttctgctatttcccattggaacttcattgaagatgatccacaaatgtcattggctagaataagcttttcagtgtggcccataggaaggagatgaccgtagggcataagaaagattgaggtactttcaaaggggagcttctagtgaagatagatttcatgtcaaatcaacgttcacttttgatggtaagcaataggcatggttttaatgattctttggtgaatgttttcaaataatcacttgatacatttagcttctaaatgcttctttttgtttgttatttattcccttcatctcacctcctatatagattgaaaatttcctgaatgttagcttataattgacatgatggaactttgacttccaagaccccttagtaattaggaatttttctgacttcccttccctattgttagcattgcagaaagcttagtgctcatcatcctatatgaacaaggcattgggccttggtctgcaatgacctttctcttctaaaaatcaaagtcttagcttggtttgtggcctataagagggtgaacattaatgcatagggattaggaattttttgacctcccttccctattgttcatattatattaacttttcattccccatcctcaacaaccaagaggtattgggccatggaaagaaggatttggaagagaaaggtcatcaaaaaacaagaggttgaccaactcttcctcctttaaatctttacttaagaatactagagaggttgtattatgttggttggcctaaaaaaatggtgcagacatgctagttatttctattccagtgcttgagaggagccttagggggagatattatggtacgagactctttcaattactctttgatagatttgtttgagaggaatatcagaatctttgagaatgagaggactgttcatgattttatattttttattaggttactcttttttactatgcatggagtcaaatctcaaagtttcccataatacccaaaaccccttactatccaagcaagcatgggtattacctttttgttagattgctgatcaatttgcttccatgagtcattgtcaggggtaagtagaatcccccacctatttagtgctttgagctcaatactgatgggtgttttacgggcaacctagaacaggtgagtgttggtgaccttttctgtttaggcctaatgtttgccatctcatttgaaagttaattgcttgttggtaaagatgtaaaggtgtgactatacccttctatggcatttgatattgtgcttatcttgaggctacactcatcctaaggcatcctaaggaatcattaattcagagacatcttgacttaatgcatacaaacccatcctagggttcatttcttaagccatcatttctcaaggagtggtattgttgcatacctacaatccctcccctaaaatgatgctctcgtggttcaaaatttcaaactcatgacctgtttttgataccacttattcggctcatggcttaaagccctaggactagctaatggtgttagagttgggttatgggtttgagtcattggagcatcatgcgagtagagatataattagggtatgtaataatgctacttcctaggaattgatggctcaagaaataaatcctaggatagatgcgtatgccttgctataggtgttgtcctaggatggtgttgggataggtgtgatattgaatcacatgaaagacaattagcttgtccttattcaaagtcaattggttattagataggatgtcttttgccttgtgcctaacacctttcaagactataagggtgtgattattagggcattctggaagcctagcaattctaggatggcaattgaagaggaattttggtcttccaaagaaaggcatgaaagaggtgtgtcataggggcatgaccatattgttgaactttctagatgcatgggttattccttcctagggaatttaggttaggcaactaggaagttgctaggtagctaagagggaaagttgctttctctattgagtttgtttattgtttcggactttattcaattttgtggaaggggttttttgttattatgcacgtagtccttttccttctttattttatgattttaagaatcttctacccttcttcatgacttcttagttatacttacctttcctaataaaaaaaaatgcccttttggggaaaagcacatatattaagtccctagttgaggaagcacttacgtagttttccttcttaatatttttgccttgaaatattgaaaacccatgcagaattatttgcataatggaacttatcaaatagagtttttatgttcttgaacaaactcccaattcatctagcattgtcaaaagtacttgtgaaagtttgttttcaactttgcattcaatttgaaatttatgatgaagacatgtctggttcttgtgatcgaaggccactaaagaattgcaaatagtagtggcctatcactcacctaacatttctttttgtcgagactatgaatattgtttatctttaatttaaatattagcatgtatctatttattatttctttgaattagagtacaatgtagagtttgaattagaataggagatagagtttgaattatagtagaaatcaaatgtattggtatataaatattcatcaagatcaacaaattcaagactagaatcagagtttgaaggagatgtatttgaatttggttcaggctcttaaccttgttgaagaactatgggattttctcttttttctgaattcttctttcatgaataaacaagtagctctagttgcattagcaaatctccccctatcatgttttgttcattggtaggaggcatcattggctcaaacacatgaggggaatgggattgatttggtttggataaatccaaggaacttggctgattttgtagctcaaaatcatgatgagatgggaattgagatgggctcggtagaggaatgggtgtttccctacatgtttcccaaaaattttcttcactttctttctccccttgacgggaatttttggtgtaaaattgtcgattttcaaagaatgtgacatctatagaagtgaagtacccatgcttttctagagaataacattgatagcccttttgagttgcaaaatatcctaggaacacgcatttcatagcttttggatcaatttttgtttggtcgtgttcatgaacatggacaaaggtggtgcaatcaaagatttttggatccaatgaagagaagactcagttttgtggctaaagattactgagattatccaaatgtgtttgaaattgaaggtctcgtgatggcatgcaatttatcaaatgacatgatgtgagaattgcatccccctaaaaatgttaagaaacattcatagtaaagattagggaatgagttacttctaagagatgtccattttttctttctgatataccattttgctttggattgcttaacaagaactttgctgtataatcccttttttttccaagaaaatccctaataatagactgaaaatattcttttccattattagtgcaaaaaacttgtatacttgcattacactgattttgaatcatggaatagaaatttttaaaaatttgatcaacttcaaaattttcttttaaaagataaacccaatagacatgagtatgattatcattaacagtaatgaaccaccttttatttgtaatactttgaacttgagatgaaccccaaatgtcactatgtattaaagtgaaatcttgaaagaatagtaggaaaggcaagcctccatctaaaccatgttcttcttccaatattaaacatggagagtctcttagtgatcttgatgtccctattgcattccaaaaaagtgttaagtattgtactcaacatcctatgtccaattatgcgtcttataagaatttgtcatctttcatgctcgcatttacctcttaactttctagtgtagaaattctgaagaatgtacaagatactttaaaaattctagagtgtaaggaggatgttcttgaggaaatgatggcccttggaaagaataagacttgggaggtggtaactcgacctaaagggaagactatggttggctgcaagtgggtgttcactatcaaatataattttgacggttctctacaaaggtaaaaggcgtgtcttgttgctaagggatttacacaaacatataagattgactacttagaaactttttctcctactgcaaaattagatacagttagagtttttttttattaattgctgcaaatttggattggccattacaacaactagatgttagaaatgtcttcctcagtggagacttaaaggaggaagtgtacatggatctacctcttggttttgataaaaggattggctcaaaggtttgtaaactaaaaaattcattatatggccttaagcaatctccttgggcttggtttaaaaggctcacccactttatgaagaaaataagttttgtcaagcacaaacagatcacacccctatttctgaaatactgtccaaaagataaagtcatagtgttaacaatttatgtggattgcattcttctaactggagaatatatggttgagatgaatcatttgaagaagtacctagctactgaatttgaaattaaagatcttggagccttgagatattttcttggaatggaattaacatagtaaaagaagggaattgttgtttcacaataaaaatatattcttgatcttcttaaagaaacatgaatgagtggttgttgaccttcaaatacccctatagatcctaatgtaaagcttggaaaggtagaaactaagggtccgatggatactacaaggtactaaaaattgattggtatgatttacctatttcacacatgaaaggatattgcctttgtaattagtatgcaagtcaatatatgcattcactttttgaagtgcatcttgaagcaatttatagaattttaagatgcttgaagagtacagtaagaaaatgactattttttaagaagaatgagcaacaaaaagttaaaatatacacagatacagattgagctggttcaataactgataggagattaacttcaacgtattgcatgtttatctagggaaatttggttacttagaggagtaaaaaacaaagtgtggtagttaggagtagtgtgaagttagaatttagagcgatgacacatcgggtttgtgaagtgttgtgccttaagatgtcctaaaagagttggaacaaccaattttcctaaaaactgaagcttttaggatttgggttcattatgttgtggcccctagggatgaataaatgaaatgcttttattgattcaattgaatgaatgaatatgaatgaatatgatttctgcttttttattctcttctagattgggttgtgcatcctataaggggtataagatttttattttgttgtaaaaatcttttcttttcaatagataagttgtaagttacattataagggcattgaaatttttattattgtaaaaatttcagttttttatatccatctatggtgactcaagagaaaaggaagaattcttgaagtttcttttttgaaatcctatggtgatttaagaaaaagaaaaatggaaatattcttgaaagttcttgcttcgagatccatggcagcatagtgatgtcaactctaacttgaaatcaacactacctcccatgagtttcttagggcaagccacatatggtttcaaagcttaggatgttaggaatatagtactttaaacggattggaattcagagttgcaatgagggagatatggtcgattgaggcaaggttatataaagagcatgatagcacagtgatgtcaactttgagtcaaactatttccagttagtttcttaaggcaaatcacatggggttttgaagcttaggaagttaggaatccaatgcttcaaacggtttgcaattcaaaactaaaacgagggggatatggtcaattgaagcaaggttgttcaaagagcatgttgttacaagattatatgcgagtccaattccttttgattgtttgggtttattttttgggccttttcttgggctcattttttgtggcaattgaccttttagggtttttcaatttttactaaccctaatatttggttgcaaggctattttggtaatttagattttatccattttttaattaccaaatatgtaacatgatctatttagttatttccttatttattctttatgcactttattaatcacatatatgacctaaaataggatattttagtattcttaattgaatataaattttcatagatttttcaaaattggaaaacttatttaaattggaatgtgcatgattagaaaattttattttaagaaaaaataagttggaaaaggattaagagctttctttccctttttaaattacttgttagagattttaattttgtttataatcttttcaaatctttaagatctctaagaataattttttttttaaggaaaagtttttatttttccaaatctttataaaataatatttttcttattttgcacaagattttgatttaaagaaaataaattaattttagaaattcatgatagataatttataattaagaaaattaccaaaataagtgttagaacttaaagaaaaatattttggtattcttggtaaatttttatgagaagatttttcctagattatttattaaattggatgttgctaataaaaatgttattccttttgaaactatccacttggttttgggatcagtggttctataggctttgtgaggaattttgttatgagaagttaaagttcctttcttggataaggtactcttaagattttcaaaatctcataaattggtaatttccttattatagtagtgtttccaatttggaaaataaatattatgaaaattttcattatagataatttatgattaaagattattaccaaaagccttagtattttgatgaagataaatttctttgaaaacattttctagataaaatatttattaattgaattaattgtgtatagaaggagaattttatgaaaaatagtttttaaaattttgagagtagataatttatcaaaattcactttgaaaaatactcccatgaaaattttaaaattttcatcttgatattctcctgttatactagattttcaattaggaaataaatatttttggaaattctcaaagtaaataatttattcatcaagataattactaaggatttaaaatactcttatttatctcaaaagattaagtgggagaggaccttaggaagcccacaacctccattatcaagtccatcttaatttgggttcataccactcccacaataggttagccctaagaatcaagagatatggactctccacagggatgagactagatatggtgggagcgaccacctccatagaggggttctttacttggtggcatttatagttcaaggacaatggttatacatttgacattggatatgaagtagtagaagtgtctcatgcggttccacttgcatagtctatgggtcaaactaaaggtatgttgatctagcctttaaatacctttatggttaaggtggggagatcaattaaaagggatctctaacttgtaatatggtcatgatctatctcacgtaggcttgatttttatgatactagaataccttgcaaaaggacatgtagtttgagagcactacatttttgttaaattaattattaactgctttgaatgctcaattatgttctattcttgattgttctccttataacatttatcatgttggttttattatcactctctttctcacagtagaccagacctaactaatcatttagactaattttattttggatatagtaactaattgcatggaagctagtttagatagacctaactattccttatgaactaacctactagaaagaaagagtggtatatcaaaggtggcattaggcgaattaaaagaccaagtgtcttatacttgagtaaattgagcctaccaaggcttgggtcactttgtcaaatgggttctaattaattaattagctacataagaccatctaattaatcaattaacctaatctagtaaacttgttcactatcccttatgcaaccttacttatttaccaaaacaccattatgcacaagagtgaactaagagtcaatctaacccttataaatcgtgtcatcatggtgtatgagctcaaagtggggaccactaggtcccataagagtactagttccctcataatccaattttgaagttgattcaacatttcactaaagagaatcaattgcactctagtaccctatgtaaataacaataagacaaagttcgggtttgtgacctactatccactacatgtagagtccctatgaactggtgtttgtaatctaacaaagtagtgctatcacctatcaagattatctctctaatccttgagttacaaatcctaattattatgtgatcaattgatatactttagctccaaggagtatatatcaaattccactaagggaattactacggccacaaattttatgataacatgttctttggatcatccaaggggatacactgtctcaattccataagatataatggtttctctattgagaatacctgttgctaccagtatctatcaatagtaacccaatccatagggatataagaccaccttaaggtctcatccataggtcaaaacattctgttgatttcaagagagactcaatattttctcaaggtggagagtccatattgtgtaataacttgatgaatcatgacaattgaaagtcttaagtcatgattcattgcaggttttgtccagtgtacatcatatatactagtgcactaatgggaaactcatcgcaagggccaagacaagtcatccctctaattagtaatatagtttctactggattgcccaaatccatgaactggccctgaacaatttctctatttacaaggaaccaatgatttgtatcctttgtataactcctaatgcaacaaagtcatgtataatgtaaaagatatgggttgaatacttaaatcaatatcaatgcataaaagggatagctaggggatagtcaagtctgattttgttacatcacatcttgcttttagggtctcaatcccaacactattgttgtcctcttttggtctcctcggttttttggaccaagagctgttaaagcggaattttcagtacttagcatggatctagcatctccaagcatcacctgtttttgagtctcgtccctcttgaccttagcaaatacctcttcaatagtaggtagtggttttagtccaagaatctgtcctcatacttcatcaagttctctattgagtcctacaagaaaatcatggactctttccttatccaatagttttttgtatcgcactccaccttttaggcagcactaatcacagtttgtgaataggtttaattcttgccacaacttggttatagcattgagatattgagtaacatcaaggtctccttgcctcatgttttaagctttatttcttaactcgaacacttgagaataattttctaaatttgagtatgcgcaagtcctggcatcccaaatttccttcgcgataggataatataggtatgtctcattgattttatcctgcattgaatgaataagccatgccatcaccattgagttctgagcatcccatatttggtacaagggatcatttgtgctcggtttaaatagttggatctccccttcccatgtatcaccatttgaatagagcatgagcattgaagaaaattttttccatttaatttgtgggttattatttgtacagaggaattttctgaaagaatagtgggagcaattgtagggatcgtttgagaggtatttgaagattcctcaaagctgccacccttgcttgctctagtcattgtcattttggccattgttttccgttattggatgttggctcagataccatgttgaacaaccaattttcctaaaagtttaagcttgtaggatttgggttcactatgcatatcataattcttaataccctccctcacatatggccccatacttgcacgtggagagacagacataatttggattgtggagaagtgtctcaaacacgagacctcttctcaaatcaagctctgataagcttttgagaaaattggttgttcaacactttcttatgttgtttccgctatggattagagtaggatgaaaattttgctataatagatgtggctagtggctacttgggatacttggaggatttattgattggacaaatgtttcttagttgatttcgtttctattcctaatatccctagctgattctgtgaaggctcacatgttttgtgcactgtggaaacatattttcaatgtggaaaaggtgtccatctccatctcaagtcttttgtttatccaccagagttagcttggggttttattgaattactgctgcatcagcatttggcttgtagatgacttatagctttctctacattttagtccagaaattttttatttttactgtagacaaacttatatcctacagtcaaccacatcttcaatcctttcaatgatcccatgccccaccccccacacacacacagataatgttgatatgtttatgatggatcttaattgttgacttggatgtgtttctttcctgattctctagcg

SEQ ID NO: 10592 - DNA, 4174 bp, Vitis vinifera
  Intron number 5 from transcript GSVIVT01000567001 (locus G SVIVG01000567001) derived from phytozome v7.0 (chr-ID chr1 ; pos 6994662 to 6998835 reverse strand)
gctaccacattcacccaaaaacccgagttcatgttaatgtatgagcaattgggcgagatcccaacgtctggaagaacccaaaagagtttttccctgagagctttattgacaactccattgattttaaaggtcaacatttcgagctgctgccttttggggcagggcgaagagtgtgtccggcgatcaacatggggattgcaatgttggagctcacatttgctaatctcctttatcacttcaattggaaattgccccatggaatgaaagaggaagatattaacatggaagaaggagcaggtattactagccctaaaaaatttgctcttatccttaggcctacccaatatccatgaccatgctttagcttatagagaaagttaattttcttcatattttttgtcggtctccttacggcaatccataaatcgctattcattgatgaaagcaatggtaaattatgaatattgaatggttgttatgaactaattttgtccatcacatgcatacatctgcaaatgattggttatccgtaggaaaaatgactgtattttcccatagaaaaataaaggtaccttctaaactcaaggtggtagtggcttcaccttgcacaaccttagcttaatataatgtactagcagtagtataatgtaaagaaatacccagggtcttatgggattgcaggctgagaggcagtggcatagggtgacagagagatactgggaggcatacaagcagattgaccctgaagaacaaaatcaacaaaacacgtttcaataacctctgtagccctttgaatgaaaatggtctagaccctttttgtttctcttgttttcctttggcgttccatcatcaaaccatgtatctgatagtcactttgtgtacaattgtctgagttagattttgcattgtggggtaattactggaggaaaattgaggaaaaagggcatgtgcccctgagcttttattccactgcaaacatagctgggtagcgtacctactgtggtagtctcttctgcttgagctacaaaggaagtaaaaaccacagagaaaacagagaaagcttcttccacagcaaaaaaatctcatctcccctgctgttttgccgactttttttctctcccttgtgccacagcccacacaaacagagatattctcactaatgatcatattaaagcaataatcgaagtctccaccgactgactcatgtgccaagtcttcctgtgctccaatttagtgtattgcacatcatttgaagtattaatagccaaaaatcatggaattgttaacacattaagaatcagtttgataatagttttaggaagtacttctaatatttctagtacttgaaaatttttatcagaagaattgtttttcaacattggaaaggcttctaatatttcaagcgctataatttttttatcaaaagaattgttttctttgtttctccaattctagttgtgtcatcctgcagagtcctgtggcagggggctttaccgtagttctgactcgatcgaccgagcttactcttttctaggagggagtttcttaggcagcttgattagtatcacatcctttaactttttcaatcactcccataacttgcttaggcatgggcttttttgtagcgggctcatcctcctccttaagggccatctaagactctttaagtatgttgctttccttttttctgcaccctttccctgagctacgtggaagaaagaaggggagtcttacatacctttgcttatagctgggatcatgtataatgtaccttcttccaagatagtcatcgactgtaagaagggtagtagctttgccatgaccttgctgaggaaatacatccccagctacttagaagtcatccattctgtcaaatcaatccttccttgctatgtctcataagttctttcttaaaatcatctcgcatatcaatagagcatttgcctttctctatgtaggtactttgccagagtgtgacatcattgaccttagttgacaactcggtgctttgcctggatcaacaacacttgtttatattttttcaaaacaaattctaggtttcacgcccatgattgacctttggtggatttccagtacagggatgcagaatttagagatggtttcacgagctttgacctaaaatactatgttttaaaaaaacaattcataaagtacccccatttccaaaataatacacaatctaatgtgtttataccacgtaaattgtcatgtcataaaaccatagttggtaactacgattttactttttaaaaacaatcaaaactgtagtcaccaaccacggttttaactttaagtttaaaaccgtagttaatgactacgactttgactatttttaaaagcagtcaaagccgtagtcatcaattatgactttaacttcaagtttaaaactaattagttacaacaacactattttgatatagaaaaaataatgtattaaaaaaaatttacaatctaaacctccaatcaaaataatttttaaaaaattgaacattaacatgatttaaaatttgaacttaaaaatttggatttaggtttaaatttaaagttatgatcaccaactactattttgactattttttaaaaaaaatcaaaaatcatgattactaattacagtgttgtgatgtgaatatctatatgaataagacacattacattgaaaattattttgagaataaaattattttatgaattttctgttttaaagaaatcatttttacccaaaactcccattagtacccaataagaaacatttttcttattatcaatgaatttacaaaaatattccaaaagcatttttatctatttaccaaaacaattaaactaaatagtgaatcgattggaaaaacaaatctattttctttctacaattctatattttaagaaatagaaaaacaaattcttttaggttggcattttaagtttaacattttaagtctttccattccattttgatcccattttaaaaggagaaaaatggaaaaaaaattatttttgttgtatttaagtaaattttcaattatttacccacttgaagtcatattatattttatacaagtgcataattgcctttaatttttgcacaaagttacaaaataatataatattcttcattatgagggtataaaatagtatatttataactaattatatttatattgagtgtagtgccaaatattttaataaaattatcaaaatatatttttatatcaaattaaagacatcaattatttaatttcatatattactattctttaaataatgagatcaattaaaggtaaatatttttattacaccacttacatatttttaatcaatataaaatcaaaataatataatattttattttaaaaaatattaaaattaaatatatatatatataaaattaaagttaaagttgtagttggtgattacgactttaactgtttttaaaaataaaatcgtaattatcgactacggttttatgatgtgacaatctatgtggcgcggacatattagattggatattattttaaaaatatgggtactttatggatttaaaaaaaaaaaaaaacgtagtcttttgggtcaaagctctttcgcgctctcgaagtccatgtcacaagttgtagccatgtagggatactgggttatccaccttgttcaccattatgacgtccgtaacccatgtagtaaagaaatgccacagacctagagccacgtgccagactgagggctgaatgcctctgaggtatcaaccaaacatttcaataacctcctctctggctgtttagaagaaaatgggcgtttctgtttttggcatgtaattgtgaaactaaggtcatttttctcagcccactttcagaaatgtatcaggatttttggcgggggcaaaacaggagtgccccaccatggtctgagaaatggcagagcttgctaggaacccaagaacaatgaagaaaacacaagctgaagttagaagttgtgcaggaaagcaaggtaaggttttgggaactgggatgtgaccttgatcaacttaactacctcaagatgatgactatgaaagagatgctgaggctatatccttcagtcacacaatacttccaactgaaaccatgcaacatttcaatataaatgagtagctcagtttatcctaaaacacagttccttcaactcg

SEQ ID NO: 10593 - DNA, 2354 bp, Vitis vinifera
  Intron number 1 from transcript GSVIVT01025906001 (locus G SVIVG01025906001) derived from phytozome v7.0 (chr-ID chr1 8; pos 27345114 to 27347467 reverse strand)
ctgaacttcgctacagcttccagcgtaattttcaggtctctctatcgtttcttaatctctatgagttgttctgccggtaattttgttgattttgggccgaattgttagcaaataattgtttttgtggatacccagtttgtagtttctttaggttttttggggggttttgaattttggattctgtccgattgtttcttttggtcttttcctggattgaagttgtgattagattttgttatccttgactacccatttcccagtttaacagtgtctacagtgttgagttattaaaattggaatcaaacaatataaaatgtgtatgagtggtgagagatgtttctatggtttgttgatttggaatatattatgagcaaatgatgttcttttgccaaaattcccaattgtaatttctttgggtttttttttgggttctttgggctttgattctagattaccctttttcagtttagaattgaattgcaagaaactgatgtgtgattcaaggctacccatttcaaagtttaaaaatatcgagtagtgagagctgtgctttgggttggttgaatttgaatggaattatgagctagtgacatgaattttgtgaatccccagttcaggggtttctttctgttatcacgctctttgagtttcgaattctgtgttttctgttttagtattgaatttgcaatcatattttgtaattgtaggttacccatatcccagtttgacattcaaaagagagtgcaaaatattatgagttttgggaattcttgttcttatatttcattgaattcgagtaggttatgagcaaaatatatgctttcacaaattcctacttcacaatatctatccttaatcctggagtacagggtgtttcagttggatatatcagaaagtaggccaagactaaattaatttctggactagttgttgaacaatggagttttacctagcagatctaggacctgtatgcaaaatgtttttttttggacttcattacaataagttttcatgtcttgccaatttatttgccctgtgagggtgaaagcatgattcttatacatgtgagaattgatatattagcatgatatcatttaatggattattaatgacaattcaaacaatagaagatcaaactgactaccaaagcatcttgaagcatgatccatggaaaaaaatggtctgttaatattggggattatatatcaattagtctttgagctagtctctataagatcatttctaaggtcctctctagaagtcttaggaatgggctccatggtagaatctgctttctctgaggagtatttgtcgaagggaagcagattttggatgcattcttggtggccaacaagatagtggaagatcatagcaaatcttgcaaggaagattggggctttctaatgagacttaatccaagatgggtttccaaggttgttgggttggaattggctgttaccattctgaattgaaagcctagaaagtggttcctggtctctagagatggtaaaatgaaaaaatccctttcctaatcttattcatgttagtgattgatgcgcttagtggattggattttatgctgagctgatggagtttttactaattgttatgtagggagggagagatagcatgttttgcccttaggtttctagtgatataattctccttggttcaaggagacaagaaagagaaaatagctcatttttaaagttcattgcatttgtgcttcttatctggtagctaaaatcaaaatgaagatccattatatgggaagcatggcctgatgttattgacatattgtgtgcatgctagaaagttgtctatggatggtagtgaggggcagaatcaacagaataatttggttcataacacattttaactgcccactaactagagctatggttgtccactcttgtatctcaggtataggtaaatagaattgctcttgtaattgcaatgaatatggaggaaaactaactttgaacacaactgttcattcattatttaataaaagaaaaataatagatgcccttgcaacctatgggatggtgcatgaatggtattggttcaaaaggttcaaagctcaacttattgtcagtgcatttacaaagtatgataaaatcacatgcaacacacatcccctaatcctcatctccttttcataggtaaaaaaggacctgaatggtgaaaaagggactggccatgctatcctttctctgctgcacaccttgcccttctttttggtttggataacttggcatctgaatgcatgcgttctttaatccaactttaagattttgtattgttgtgtacttgcagtttcttcaacgagtgtttagtattgacaccattgt

SEQ ID NO: 10594 - DNA, 2616 bp, Vitis vinifera
  Intron number 2 from transcript GSVIVT01035964001 (locus G SVIVG01035964001) derived from phytozome v7.0 (chr-ID chr4 ; pos 6556081 to 6558696)
tttctcggcaccatactgaatttctttcttcacaagtatgttacacatttccgttttcatttttactcttctttttttagaattttgtttgtgattttttggctgtttggttgctgagaaagcttaggaaaaaaaatgggaattttgcattttggaaactgagaaataggtctggaccctggacttgggtacatagttatatggcttagttgcgttgaaatttatgttttcttggattttcccaaattttgagagtagtttaaacagtattggagaaggttgcttgcaactgttgctgggattttgttaaaaactgaaaagaaaaatacagcatttggtggtgaaaataagcactcctttgacttttggaaaaggggaaaaagaagagactgacaaaaaaaatgtctgatcacatacttctagaatttttttcagaatttgtcatgaaaataggtcactgttagagagtactaaaagtatttttctcacattttaaaaaattcatgtaattttaacggtttaaaatgatcgaaaatgaactttttcattgttttcaattttgaaaatgaaagctttttgaaagatcatttttatttccactcccaacaagccatttggttttggtgtagtgacagtgggtgatccatcaatgccatgtcattgtcttgttggcgtctaggtattaggtggcacatggaaataatggggggttcgacacttcacaatgagcttagaaagcagcaggagccatttactgattcatttcaatactgtgtgtaggaactaccattatgtattagtttactaacttgtctttagtaatggcacttagttttgtaagtttatcttgactatcttgaaaatggggcataaaagtttgcttccctaatagggaaatgtaactcatccccattccacatcttctatagaatctagaatgatctcctgaaattgatgctctatgctatcaaccaaacagaaaaagaatgcaatctaatttccttaaagcttcttggtactctaaagtcctcaattgctcttctgtttgttgatttggcagtccctgggcaatcaataacagagctgccctgcacaatctcagttaaaactgccataatattaggtgattgcatctgctttactcagtcgagtaacagtgtcgttgattcaattgggctggctgttaacctaaaaggttcccatgtaattgataattctgttgtggttagcgcaaaaattctgaaacgccattgatgttgcacttatataaccaaccttacttcgtcttaacatgatttctccaaattgttacatttcttatcaactcaaaatcaatcttaactagcaatttaaatgattttcataactatgcaaccacaaaagaatgttaaccatatggttgttgtagtgatcaatccaacaattattattattattattttttaaattagaaacaggcatgtttgttcattgaatgattatacaaagaaggacgaacaatccttgcaacgtgtacaattgctgattagaaagtaaactagtatcttgctctgcaaaaaactagagtcaactgcacaaacaaaagaaaaaacaatgtacacaccagataaacttcatacactcaaaggggaataaaacttccaacaaaggagaccaagtgctttgctccttgcttagctaacctgtctgcagcttgattagctgaacaaggggcctaagagaaggagcatcctacctcatcagcaatgtctattattttgcaaatctagttgtcaaactttcatgagcctctctccctattagacacataagatattacggtagcagaatcttcctctattgttaaattgaatgatctcttataatgccttcaatacctaacagtctcggactgcccaaagaatgtttgtcaaagtttaacctcaccaaacctattggaggtggtaataatcaatcataattttcctctccaatctagtagcaagcattcttccaatttgaaaatagaaaatgcaaaggaatatccccaaaaggctcaatgactaagacccataaggaagagacaaagtaagtcaaattctaaataacatccatagatctccatctaccctcaaatattctagcattccagtctactgatttcctatgtataatttcgttttttgttttctttttattactcagtagcccttacccctgatttgcttttcataccaagtgctctgcagatcttacattgtgaaaagagagaataattcctaccctattatatgaagcattcttctagttttgaacaaggaagatttccaatgaactagtttatgggaaaataaatagtgctaatgaaatattaagagtcttttaaatgacatgaatttctctgtgtggctctgaattggtgactctacattttcagacagaggctttcttaatggaaacaaaaataatttctagtttaacttatgaagatggtcataagttaatcttatggatagaaatataaattcatgattctgttatgcacatgacatgtttcttttattttgttccataattatttgtgctttcattttattcttgttgttctttggttctcccactctcagagattcaaaa

SEQ ID NO: 10595 - DNA, 8352 bp, Vitis vinifera
  Intron number 1 from transcript GSVIVT01038077001 (locus G SVIVG01038077001) derived from phytozome v7.0 (chr-ID chr1 9; pos 17501048 to 17509399)
aaatcggagttggtacacatcgtgtgacctaattaatcgtattttcaatacatgtcgaattggtactataaccaaaactaaacctggtacatctacatataatcctattattccataccactttaactaacttacaaatgattggacaagtctcattcataatgcacaatactttaagtaactccattgctaaccaaaatgacttaccaccacctcatccttcatcagactatgtttagacatggtataaaattagaattattttctttgtttttatttttattttttcttttgcaaacaaaataaataaatttggaaataaacagagaagagaagaacccaaaaagaagaaaaagagaatagagtgaagaagcttagttcactactgagcagaacaagcaacattccattttatatgtagggttggacacatggcataataaggagaaatatcaccctatatagaaaaagataaatagcgaactaatagaggattatgtaaaacagatacagtgaattaattatctaatctatcatcccctctcaagctaacaagttatggtaagactgagtttgtagcgaagattagagaaccgagcaattggaaaagctttggacatgacattaagtagttgatcttcaaaaggtgtatattgaatgatgagagagttttgcacatcttgatcatgaatgaagtgatagtcaatctccacatgcttggttctagcgtgtataataagattggtagttaaataagtagcactcacattgtcacaaagaaggagaggaggtaaagaaagatagatatgaagttcacgaaggatggactcaagccaagtaaccttagtagtagtggtacttgattggtgccaaaacatgtgctttaatagcacatatataatataatttatataatataaaaagttcaaatcatcaacttaattcaaattgatgctaaggccttagttacatatttaacttctaattttaacctaattctaggtttaagaggtgaaaaaaatgtaattagaaaatactaattttttgtaccttagaaattaaattcaaattcttcaaactaaaggacaatttttttttttttttttttttttgtaaaaaattggagattctatcttcttgattctcttatatatgaattgtttgtgttagagttaagcatcatcaaaagtcatagttcatgtttggattgattaagttcatatctggatcaaaagcaatgcttgatatttcttttttcaaattttatcttgtaatttaatttatgataattgttgttttttcttgtgattatgttattaattgagatgaatcccataataaaacttaatcaatatgcattcaaacaaaatcaaaagttgttgtaacctctttcaactaaagatgaacttgacatgtgttcaattaatgcaaatgaaggtgtaagaggaatgggctaatcaaaccaatccctctcctatgatcctattggtcatatcataatccattttattatactatagtggggtgggttctaataaggaagtgaatagtaataaggaaatagatagtcaatgatttcagaaaatactttgtaaatattttatttttgggtagtttctatattctagtatatattctcttactagttgtcaatattctataaatattttttcttaggtagttcctatattttaggaaattagtggtttgagaattattcttttccttttcaagtcaatcttgaatatcatatatattacaatcttctctctcaataaagggttagttagccatttttcttagtcctcacttctctcaaatttcacatggtatagagctcctaaaacctctcatgagtacaaccttccagtctttctgaaatggataattcctataacactcttatctccacaaactcttctaccatcaccaattcgtttgaccacgattcctcccttatctctattaataccaccactcaaatatccatcaaactaattgtctcctccaattacacatcatgatgtttctagtatcatgtcattcttatacgatatgatcttatgggattcattaatggaacttgctcttatccttctttaactatcaccataccaatggtgaaattccaaatctaaaccattccttttgggttcgaaaaaaattagttaattctcaatgccattgccaactccaattttcttaatcttgttccctttattgctttggcaagaacatcttgtgacagtaaacaatgaggatctcatatcgaggatccttggtggtcttgataaagactacaagaacctttgctcaaccatacaagtttgtaaaaatcccattacatttgatgagttgcatgaaaagctcaacaattttgaagcatatctcaagtatgaagcataaaataaggaacaactctctaacatgcctgtttttcccattcctacacataaaccattttaaaatttgtctagaaactaaatgccaaactgtccattgtatccaccaaaaactaacaaaaactatcctcccttttcccaaacatgacctctccacctactcacaaaccaaattcttttacctcataacctcatccttaccttggcaagtgtcaactttgtagccaacaaggtcactctatgaaatgattctcactattcaaatacatacctttgtctcataaccctcaacccatcactaatccaccctatcctccttaagatcattttgtagttcctcctacaaccttcaaaactgaatggcttcttgattttggtgtgtgtcacaatgtgacatctaatctttagaatctatcttttcattctgactataccataatagacaatattctcattagagatggagcgggccttcccatcactcacactaggtcaaccacactaccattctcctatgaatcctttaatgaaaaataatttaatttctatctttcgattttgctttaataataatgtgtttgttgcattctcaccatcttccttttatgtgaaggatttttgcatgggagcaatgcactacaaggagtggctaaagatggtgtttatgagtggttgcattcatcaccaacatctcagcacaattgccttttctttaatcaaagtccctgtcaatcaatgacatcattgttgggaaccccagattgctctgtttccattccctggattgtgtagggtgcatgcaaatctatcctagggctttctaaatctatcgcaacagataaacatgtattaaaaaataataagaataccataaaaaacatagatttagagaataaagtcacatacctttgatccgaatgttctcagatcgattccaatcgatgtagataacttcaaagtcacaatagatctcataaacaccatgatcttctattcgatgactcttccttatgtctaagcactgagatggtagagatcttaagggtagaggttagggttctctctctagactgaaggggagaatggaaagacatagaaaccctaatccctaaaggggtgtttataggcttcctattaggcttaagtgacttaagcccatcatgggcttgggtcacttaatttagcccaaaaaagttgttaattcattaattagctatacaaggcctaattaatcaattagcccagtccagagataccactcatttatccctatgcaaccttgtataattattaaaattccctaatgcacataagtgaactaaaaacccatccaaccctcataagtcatgccaacaagaaatatgagctcaaaacagggaccactaagacccataggagtattggctccctcataatcaaattttgaaattgactcaacatctcactacaaagagtcaattgcactgcagtaccttatgtatattacaatgagataccaagtgcttagatctatgacctattatccactgtatgcagactccccatgaactggtgttcataatctaacaaggtagtgctatcaactattaagattacctctcaaatatttgagttatagatctcacttattatgtgatcaaatgacatacctacttctaagaagcatatgtcaaattccactaaaaaatttactgtgaccataaattttatgatcacatgtcgtttggatcatcgaagaggacacattatctcaatcccatgagatatcatggtgcctttattgagaatagctattgccaccaacttccatcaatagtgacctaatccatagggatatatcacaactatagggcctcactcttaggtccaagcctcatgttcattttgacacaaactcaatatcctctcaaggttgagagtccatacagtatagtagtttggtgaatcatgacaaatgatagccttgcgtcttgattcatcgtaggttctatccaatgtgcatcacatacactagtacactcaccatgaccaagacatgtacaatgaaccaactacagtctttactgaattacccaaatccatgaaccaactgcggataacttatctacttgcaaggaatccatgacttgtatcttctatgcaactcctaatgcacctaagtcatgtacaatgtaagagacatgagctaaatgctcaaattaatgtcaatacaccaaaaggatagtaaggggatattcaagtttgactttgttacatcatgtcttgcttttaggggctcaatcccaacaatcatcgccttagtcatccatcatctcatgttttacatcatttaattcctaacaacacttttcctatgttatcctttattatgtccggtttttcttgtaattcttcccattgcaataaaacctataagttaccttttttatcctcatttctcactagttcttatccacttgagttaatatgttctaatgcgtagacctctcttgttgtttcatgtgatgactataaatattagatcatatttattgatcattacactcgttacatatgtctttaccatcttaacaacaaatatgatattcatgacatttttgtgcattggtggaaaaatatttcaaatgttccattgttgctctttgcatagataatggtggagacaagatattcttaaaatctttttttctactaatgggatttctcacctcttcacctcttcacatatccttaaacataatggtctcttagaacattgacatcatcatatagtagaaaatggtatcacattacttcaccacatgcacatgccccttactatttggcctcgtgcacttcccatcatcctctatcttattatttgaatgctaaaatttaatctctttatgaagtcttcctttgaggcactctttgggcacccaccaaattatctcaaattatgtgtttggatgtttttgttattagtggctatgcccatatgggtctcacaaacttgattcttagtctcaactgtgtgttttccttggttattcctccacacaaagtgcctatcattgttatgattctatctttaaaaatatattcatttcttgtcacgtcactttcattgagtcaatctttccttttttttctcatcaatcatcccatctttcatgtctcatcaatctcaccttgtaagaatgggctcaaattcatcatccttggcccaagcatacccgattctcctctttccttcaaatcttcaatatcaccctcaaatatgtcactattggatttctagcaacacccaaatcatgcctcacatacatgatcttccactggtcaacgtgtggaaaacacactccaatctccttcctccacaatttgacacttacccccaccatctcaattcaaaattctaccatcaaatcttcctgataattcccaaaatactgctctactcaattttttcctccactcaatcaatataggctagtaccttcacatatggcactcaaaaattcactcatgagcaacatctctctagcaactttcaatgtttgcccctaattgactattcttctccatcatattctttctcatcacccacaacctcattcttgttgtcccataccttctctcctaactcgaaattccacatccccccataataattatccgatgcaaactagagccaaaataacatccataagtctcttaccaaacttaccattatcactttttaccacatgtctcctactgaacctacttctatcatctaagccctcaagcaactcgaataactagcgaccatgtctaaagagtttaatgcacttctctgcaatgacacttgggatcttgttcctccaaacgtatcacaaatggtgttgtgattacaatcatcatatgaaaattgggggtcactcttttgaccttacctagtggcacataattcttacgcccccacatctttcccccattttttaggtcaatttagtgaatgagtgggaaaatcaaagttttgaggtagcgtctttccatctttagaggcgtttggtaagtcaatggttgcttgaaaacttttggtcttgacatttcactttcttcttcaatattgtaaaattgtgctttaaagaaatgatgaagttcatttctagaccatgctttaagcaaacattagcatgtagtatattttctattttttttattccttttataaatcaaatatgattgtggtataacataatccattgaaaatgatattgcaattatatatttttatattttatccaaccaactaaacctggtgtaagtatatatatattttttaatttttagatatggatttttgaaattctatcaaacactttttacatggatgatgcttttaattaattttcccaaaatcactcctaaaagcaaacacttttaagttcattaaaggtaataatcattattacctgctgttcttttccttagttttctttccttttcctttttttttaataattttttttaaggaagagcaagataggaggaggacaatggtaatgttctaatttttataatgaaagaaaaggatggccatggcagtagggaacaaggaattttttaatttaaatttttatttatttttattattgttaaatttactttttgtacttttaaattattttaaatttttggttgttataaaggatgagggaaagagatttgaacttttccacaattttgttaacacattggtggtataatgcaattggagttatacaggccaaatttagatggaagagtccatgtttgagaccatttttaaaatagcttttaaaaaataattagtgagaatagttattaaaagtaatttttaattatttttagcaacaaaattttgtttgacaatataaatacacaaaatagtttcctcaattttttttttgtaaagaactccaaatatttatgtacaatgtaaaagcttttaaaacaaattcttaaaaaactatgttctattaaaagtttaagttatttgtttttgagtgaaaaactattttagaaattaatgtacaaataaaagcaagtttatctaaattaatttgttttgtttcaatagccgttggatataatggtttctattcaaaatatgtaactaggggtgacaaagggggtttctgtccaatccccaaggggatgagtttgaaatttacataagttcgaaatttagataaatgagttaatagtgggtttaagatcttttttaaaatcaggacaggtttaggtattgccttgtcttgctccaccccaccatgattatatataatattaaatttaaaaattaatttaatttttattttcctattttaatataataataataataataataaatacttttcaataaaataagttataaaaaattataatattttaattatttatgaaatatatttatttaatgtaattaagaaattttaaattttcatttccattccaccccctttaattttttttaatgggaagaggatgagaattattttgaataatctcatcgcaaacttgcccattgtcatccttacatgtaactttacatttttaacatagagagacaaattcaaatgcatcaaaattttcttagtcttctttctttgttaaaattctagtcctaatatcatcttcttctctctctatctcttttttttttttttcaatacctttttttccttctatccatctcatattcttacttttatttgaagaacatgaaattagaattagaatttgaatgtgctttttacttttatttttattggtcaccatcaatttcattgttaattatttttcatttaaatgcttaattgatatatatatatatatatatatattataatgatatatttaattaatttattatttcttagcttttaaaattttgtgactaattaataataaaaaatgaagaaaagattgaagaggaagg

SEQ ID NO: 10596 - DNA, 2801 bp, Vitis vinifera
  Intron number 3 from transcript GSVIVT01023274001 (locus G SVIVG01023274001) derived from phytozome v7.0 (chr-ID chr1 2; pos 20249918 to 20252718 reverse strand)
aagaaaacatagagaaggtaattattcatctcatgtggtttatccattgtttttgtttcaaatattgcaggttttagatcccctggctgtttgcacctcgcttttctttagtaaaaatcttatgaactggatgatttttttacatattagtgcaaagttagaagttgcattttggttttgtcttttatttggctataatattgtaaactcgcttgtctgatgaatgaagagagcatgatagtgttaggaagtttatgcatgtcaatgatcttgaaaacattccaaattcagttgcacagataaaactgagaaagtcagtggttgagagagagaaaatttgaagcttgctgccctagttgcaggacaagaaagcaaaggacaaaaagaacttgatgaccacaactgaaatcagtggtacctaggttcttggtgaaacaaaactaccactaaaatttcggcctttatgggctttttttaaaccttggacataccaatgaatcctaacataacagctatacctaggttgcataaatgacactactcaaaactcttttccaaaagttacctcatatcttatgaaaattctgtatgaatttttttcaaactgctcaagtataaaaatcatatgaaataaaataaaataaactccaaaaaacaggagttgtcttccaattctaaaatattctccattttgtttgttatgattctatgttaatccatggcccaatttctctcaaaagagctttgaacttggacaaagctataggagagttgcatgttaaaacaggtaaacaatgatgttttaatcttcttctgatcgtcacatgaagctgctctaatggcaaaacctcaacatgaggttcaaagaagctttaatcagtctctaacgaacaagggaagttgtacctctacaaggctactattgatctcttgcacaaactgctagaatggtaacagcttttttattaagaactaatggacctggggtggtcaagatagtatttgatgtggctgttgtggcatgaagatatgagtttggttggcaaaatagggaagtgctacaagtagtagtagttctagtaagagtgagtgtgaatttttagttatcaaacatggagtatggtgtgtttaccaattatgtaagggctctggacaaacatcagaagtgggtggtttggttggtaatgaccagttctaaagttgggaatgggcaaagagttaagttttgctagaatacttgtgatatgatcatcctcttttttccagatattttcaggattgcagtgtatggggattttataatggaatgttactgaagtattgaggacgacagttcctaggtttcttaggagatctggtgactcggaattggagttggagggttctttttttgtttaccttgttgatattgtgatcgacaggagtaagtaagattgtgtctgttgaggtttgctgggatggtctttcttttaaatcttattttcgaggctttagttctggagggaacaatacttttcttcactgaagaagagggaagtcttctcctccatctaaagtggttcttttttacttggtctgctgtatcgaagatcttaactgttaaattagctgatgagaaatggatgaactcttgtgaactggtgtaacatgtgcaagagaaagtagtcatctgctaaccatttactaatctattattccgtggcttggaatctatggtctttattgtatattatgtttgggagaccttgaatgatgagttggcaaagtgggtttatcaagaagaggaaaggtgccagtacgcttaggagagaacaaatagccaggcttttgaatagatggaggtttctgagctaatgttgaaggaatatgttctttaatccttctttctattttatttatttatttatttatttttgtggttgcacttctctccctttttttgtcggctccagttgtctgtcctttttataactcttaaggagtttggctctatcatcttttttctatgctaaaagatgatttagttacgggtgttacttggcactaaatggctaaaaaaatcatgatgttatgaaaatactgggtttgagccatgcctgatactcatttagatgatggcagatgtagatgcaataatttcctttctgtatttgcaacacaaactaatcttgttgtcccttaaatcctagttagccctacagaaggagatcttttagatcagtctttgtgcctacccaatcctcactttgatgaagtaatgaagtttgcataagattaacaaattcaaggactgtttagttgtcagcttgtaagaaaaaatgatttttctttcatgataaatgtatatagattttgaaaaatatatttggagaacttgattattacataagaaacaaatatgatgcctactataagactcgtatccatatgagcgatagaacaaccagttagaagaatatgaatacctgaaaagtgttggacatttctttgtcttagagttctagatcaattagttgtaagagatgagatgaaaagataaaattcttccatactgtatcaaaataaaatatgcaggtaagcaccaaagggtacaagtactggattaatccaacagatagcaataatatggttgttaaagatcatgagaatatacatgtacaacacattaaccctacactgttgcttagaactgtttgttttatactctgcccacatttgcttaattttgagattggtagctgataacatacttgctaaccatttcaggtgcttgaggaaataaggccataccttgttggggc

SEQ ID NO: 10597 - DNA, 3457 bp, Vitis vinifera
  Intron number 4 from transcript GSVIVT01031373001 (locus G SVIVG01031373001) derived from phytozome v7.0 (chr-ID chr6 ; pos 19441601 to 19445057 reverse strand)
atccttactacgggggaccgcaaggttttgagaaggtaatgtataatctgccatatgatttgcaatataggaagtaaggtgggagacagcacatttttgcgcatgtttgggatgaaataaaatatcatatcataattattatggtatacagcaatcataacaaaagtttctgtctgtgacacatctcatggaaacaacaagcatagtttcatgatgacagttattgccatgtcatgaggtcctaaggcttcaacattaaatggtacttagccattcttcatgtatgaaatgtcaactgatatgcagtttgcattgaagaaactggaagtttttgttaatcagaaccagacataaaattcatggaatcatcaccatgatttctgcaaaattaggatctaaatagtttgtagaaactcaactgctcgaccatgatgagattgttaccattttcaaatttcagcctaagaccataaaagtttcgatttagcaattttgtagatctagataacactgcaagatctttcatttagtaaaaggtcacaaagaaactcagcactaggttggtctttaccaagtctcaaagctggagtttgattgaacagttcccttctcttattgtctctcctatcttatacaggctttaatagaccacctcctaagataagcaagttaactcttgtgaacctttcttcattcactttttaactaagccaaaaagggctttcttaattaagcctcaaccatgatgcccacctgcccatcttcaactaatccaacaatgcaaagcaccttggatctaactattagttttcatttcaatttggcaaaactagacatagtgtttaaaagaagccaaagtgggaagtccccttggagcgcaggggggtggtgggttgagagagagaacaatggtgtgagaccattgtcctgaatctacactgtcctaatgacaccatcgatgatcattcatactctgctttctcagatttagagcagttggatcaggctctcaaaatgttgttcttgtgcacttttttgttgtggactggaaggtccatggatgtgagttgaatttgttctctattggttgggttttagatagtaggagggaagttttttattcttttctccttttatcattgtttggtgcaccttgtatgcatcccgtgtactatattgtgcccttgtatgcatcccctcttctttttgttcttgctttttggcacctcttgtatgggggtatgcttttgggtcagccttaaggtgccattttttctaatatattttttctctgtgtgtttacttataaaaaaaaaatagtgtgcccttttgtgattgacattgttaatattatttttgtttgcttatctaaaaacaagcagatttaaccaccatccaccccatcttcaatgatctccatcatcttctcccaacctctaacgtggttaccaacagacaacaattttgccataggagccatttttattttaatttgggaacaatgtctgttgctaaaacaagggattttgggagacattttggaatcccatctcacaattagactcaaaccaatcaaggggttggtttggggagatgacaaggtgttgccgttgtacattcatctttgcatgctgcctaacatttgattggtcaaaaatctaaacagttgaccctttctatttgatttggatttttcctgatgacaatgacacctaatgcaaaagtacctcaagatgagatgaatacagaaaatgtacttcccatctgccctaaaaaatccagaaaggaaaatgtgtactgtaaaaatgcatacttttcctcaaaaaatgcacacccccattgaagacaccagattacatgtcttgccagttgtgttcccataagaccaggaaaccaaacagccatggtacccagctacccaccattaggaaacacctgtttgatttaccctatatttggttcttggaaatttgagaaaaagaaaataaagagaaaaaaatggaaggaaagaaaaagttaaaggaaaataaaaaatagattaaagtgaataaaatatttttacatgctacttcaacctcatttcacttatttgtcctcttctatataaagattaactaatttaataatgtataagtttttaagtaattttaattgtatgtgattttctttcatattttccatgataaaccaaacatgagaaaatcattttccttaacatttttttcctttgtacttttcctggaaataaatataacattagtctttgaaccccatcctgtggatttttatgccttcccaagagctgaaatctctgtgtctatggtattacctaatccatccaattaggagccaaaatgctctaaatatcaaagagccaaggtcttaacttgcagaatccttttcttggttaagctttgggtaggtataagatactaatttccttgaaaaaggggtagcaccaagaggctgccatgtgtgcacagttagcagttggtgatccgtctgctgctgcattcatcaatgcttggcatcaaatcatatttttttacacttgaaaagagactccttttaaatacagccacaaattgtgtgagatgtatcttcttctgcagaaatgacttgcaaaatagtctgactagaactactgttttgacattgttgttgaactccctttgagacaggcggggcgggggggggtggttggtgggggtgcgggaagaaagaaaagctcctgtttcatcagttcgctccatctcttttcatctctcctcaggttttctcacttccctgccttccaatttcattgacatttctcatttccttagtgtgtctgctatatgaccatataaccctttattgatgccatcaatttctcatttccttgttgtgtctgctatatgaccatataactctttattgatgccatcaagtccatttcccatatgacataaccatttgattctactggttttctcacttccctgccttccaatttcgttgacatttctcatttccttgttgtgtctgctatatgaccatataactcctttattgatgccatcaagtccatttcccgtaagacataatcatttgattctatttccctcatcctttcatctttttactatccctttaggtaaccccagttgcattccatttatatcctttaacctcctgtctttatgtaagttcacataaagtgattctagactccacagccttttttgtggaacacaaaataatacttgtccctactggactcacaatttctgaatttcttgattgttctaaaacaaaactgagtgctgataccatgatgtttattctcccagctcaagatttactaatttttatgatcagattcccccaaattgtgtgatttggttttctagaataatggaggacttttagttgatattcagtttatgcaaatggcaggttctggatttacttgaag

SEQ ID NO: 10598 - DNA, 10274 bp, Vitis vinifera
  Intron number 1 from transcript GSVIVT01038764001 (locus G SVIVG01038764001) derived from phytozome v7.0 (chr-ID chr1 2_random; pos 669774 to 680047 reverse strand)
gaaaaattatccaaaatatttataattagttgacaagtattcaaaacggtcaccaaatttgtaattgaaattttgatctcttatgaacttcaattataccctttttagattagggtcggtatttcttaaaaaaaatttagtaagtattgcctttaaaattttttaataagtattaattatttttccaacaaatattaataaaaaattacatacataataaactcaaaatatatttatatgaaataaacctaatataattgagtacttcgattaaaaaatacataattatattttgtaattataattatgaaaaggaattatattttgacttttatcttgtatacaacctatgcaccttgccatatagctcctttcattaatatatatgtatatatttatttattaggaacataagatatattaactatgaaaaaggtacaaaagaaatatgagagctctttctcacaaaatacaaaatcctaatcaaagtaagactaaacgcctccactatatatacaacgaaaattgtacacaaaggtatgagtccattaaggatacacaaaggtaacatctcctcaaaattggacttaactcctctcattgttatcccccccatttgaattattaaccaaaagctaatagcaagctcgaaagaagtttaaatgttacttttttgtctttaatcttaaagaaggggggtgtagaggatttgaaagattttagactaataggtttaatagggtctttacaaacttttggcaaaggtgttggcaaataaattgaagcaagtggtggggaaaagtggtttctaagtttcggaacgcctttgtagaggagagacaaattttagatgcatcccttgtagtgaatgaagcaattgatttaaccttgaaggtcaactccaatggtgtcatttgcaagttggacatagaaaaagcatatggccatgtcaattgggtttttctgattgtagttatgaaaaaaaaaaaaagggggttttaaccataaatggattagatggatgtaatagtacatttccatagcaaagttttcagtgttggttaatggaactccttttggtttcttttaaaatttctagagcgctgagacattgggatcctttgtcctttttttttttttgtttgttttggttatggaggtcttgagttgcttgttggagagagcctaagaggggggttacttatcaagttttagggtgaaagggaggggggagagggggtggttgtgtcccatctattatttgcagatgacactttggtcttctatgagaattctcaagagcaaatgacttatctaagttggatactcatatggtttaaggcattattagtgcttagaatcaaattggatcaaagtgaattgatttcaattggaaaggtcacagatgtagatagtctaactactgaattgggttgcaaaggtgaggaaacttccttacatttatctaggattacctttgggagcttcttatggattagaagcagtatgggatgtaatatcacggtactttttaggtcaggcttatatattttttaggtaacataacattgtatatcacgatacttttggggggcagaaaaaggaatttgatctgatgtttgactttttgtattatgagccattttgcttttctaaattatcaactatgtagcatggacaatctcaatgaggagctggtctgtgttggttaccaaattatagctcccaaattgtaggtgtgcttacatggtcacacgacccatttacctgtatgaatgaccttcaaaagtggaacataatggacttggatgagtgatcaagctagttcaacccatcttgtgtaagtgggggatgttagagttgggtatgggtgcccaagtgggctaacctgatccaacccaataaatgtgagaaaataggggaatagttttgggagttttaaaacttcccaaaagctgtgacaattaattttttttaaaatatgttttcttctctccttaaaaacaaaagaaagaatacaattcttctttatgaagaaataagttcttttctcgaattttattcattttttctctgtgaaaacaaaggtcaaggctcttgtgctatgagaaaagaatggttcttgtatttgtagttccattcatgacttgaagcgagaaaattggtcagtaaaaaaacaaatcagaattttaaggcatttcaaaaggtaacccaaaagccttattttccatctgttatattatgaaattttgcaagcattttatgtccacattatatggttataaaatattattttgcaaacaatatattttaataagtcattttgtacgttatgatatttttgcaaaatttttccatattatatgatcttactgttgtaatctcctatgcttataaattttttaacggttgtatgtaactttcacactaccatcaatattcaaagtgacattggcatctaaaccatcatagaacaataataatacaatagattatatatcatcattcaaatacatagtatcttccttgattacattgtcatacaacatttataatacaatacatcatacatcaacatccaaatcaatagtatcttatgtgataacattctcagaaattaaatcatgaaacatctcaatggtgggtacatatggagtcgcccaaccctaagcacattgatatcgactcctataccagctccttgtaataggtggcattagggctccaggttgcatcaaaacctataaatcaattttatattatagtaaataacttcattaagtaagattaatgaattagaaataaagtatagtagtattcatgacattgccttcttaaaatgattgttattaacaaaaccaattaatataatctttcgtataggtatagacaacaacatcaatcgaagacgctagaatgttaggcaccgctagatcaatatgtggacaacaacattgtatttagaaactacaatatggcccatatggggcgtagtgatccatctatcaatcaaagtaggattatccaagaaatttagggaatgaaagagctcatcaactagcaagttatcctaaaataacatgtcatactctacacaatatgtatataactcccacaacaagtcttgcctaacctatggctaatcatgctcacccatgcccaaagtagaggctatagctcggtatccacaattaccatttactcccacatctttacatgatgaacaatataaggttgcaaacattctggaaatgcatatttgtactctccagtctttttttatcatctcactacctcctttggtcttttcttttcttttaatgatgtactacctacttgcctcccatcccatgttggctttacatactcaaagaagatttactttttatttgttttttattttttatgaaggcatatgtataggttgtgttggtcaagtggacttcctgtatcaactaggttgttgatgtgggcctttgttaaggaatttttggccctcacttcttaaaaagaattttaattgttagttttcaataggttatatttaaaagagaagagagtgaaaaggaaactttttaattatttcatgggtaattacatgtataaattttaattaaaaaattaagagcatttcgataaaataaataaaataaaacaaaacaagtttggaatgtaattgagctcatgtatataatcctttccaatttgattaattatagatgataaggaggtggttcaatgttaacaccaactaactttgttatattttaaatcaattgttaaaattttagagattaatatataatgagtatgatacatagcatgtatatcaatgggtgtttcatttagttttgatctaaaactccacaccacttatgtagtaagggggaggaccataaattggtgttgtgggttttgatatcaagctaggcagtagagtctgaaatggtaaattatgctttattgtgtccttagatggatgaccaaaaaatgagttgtgatctaggatagtgagatcttaaagatcatgttgatgtggtattgccacaagtagtaagcttatgtatagataatagattgaccatagatatgtctagaatcatgattacatatttttaaatctcatatacttcttatatcctattataaattttaatatgttctaaatttattttgaccatcataacacttgtgaatcacaacttttcactagatcttatgttatttcaattaattttaatgttttcaagtaaagactcgtgtgcaaattgagaaggtggaataacttcagagagcaagttaatgtgtatctagctctagagttctttattatatattaattacacttgtaggacatatagtttatttcctttgtgtatttgagttacaattctttttctttttctactatgtgaaaaagataatatgagataaaaaccacgaagttgagaaagataaaaagacttaataaaacctgttaagttttcaaaataaaatcaatatattttttttatagactaataaaattgaaataataaatcctaatgacaataatgggtaaacgtagttgaatcaatgtctcaatgccaaatatatatagataattataaaagtttgggcattctttttaacttttcttttcttttttgttcatcacttaattaaaataaaaaactatcgataactatttaaaatagctaaaaaaaacaagaaaaaaagtattaataataattaaaaaaaaattggagctttttatggagtgagtgctttaggggattgcctaacttgtctaaaggtgaggttggactgaaattcgataggtttctagtcacctctataatagttttctcaaaagaaaattcaaggagataagtcatgacatcattacaccaattattgaagtcatgaatgcaagtgagactatgaagattattaatgcaaccacatataagagtggtattcgaaattcaatgaattccctacgcccatagagggcaccaacactcaagaatctattaatcacaagaagatagaaaggttacaatgtggaagcctctccttctctcaactttcacatgaaaccctaaattacaagaaggttaaatacaatatcaacatggcaaaatcaccattcaataaataaaaaaacttcttaacaagctgagcttaaccctcaacattaatttaggtttcacaatctaacaaaatagactattagttaggcaaagactttaaaatgatttaagcacgagttttattttagtcattttggtttagaagttgacattacctatcaaaacaatgaattcatgtgaaaatatgggacaagttttttaaggtgatttgaagttacgcaaagactttaaaatgggtcaagcatgagcaattattttggttgtttttgttattcaaaagttgaaactacctatcaaagtcatgagtgcatgcaaaaactatggaataatttttttaagataatttcaagataggcaaagactttaaaatgggtcaagtatgaagttaacactacctatcaaagtcatgaatgcatgtgaaaactatgggacaagttttttttaagaagatttcaagttagacaaacactttaaatgggtcaagcacaagtaattattttggttgtttttgttattcggaagttcacactacctatcgaagtcatgaatgcatgtgaagactataggacaagtattttttaagatgatttcaagttgggcaaagactttaaaatgggtcaagcatgagcaattattttagtggtttttgttatttggaagttgacactacctatcaaactcatgaatgcatgtgaaaactatggggcaagtgttttttaagatgatttcaagttgggcaaagactttaaaacgggtcaagcacgagcaattattttggttgtttttggtattcggaagttgacactacctatcaaagtcatgaatgcgtgtaaaaactttgggacaagttttttttaagatgatttgtagttaggcaaagactttaaatgggtcaagcacaagtaattattttggttgtttttgttattcggaagttgacactacctatcgaagtcatgaatgcatgtgaaaactataggacaaatactttttaagatgatttcaagttggacaaagactttaaaatgggtcaagcatgagcaattattttagtggtttttgttatttggaagttgacactacctatcaaactcatgaatgcatgtgaaaactatggggcaagtgttttttaagatgatttcaagttgggcaaagactttaaaacgggtcaagcacgagcaattattttggttgtttttggtattcagaagttgacactacctatcaaagtcatgaatgcatgtgaaaactttgggacaagtttcttaagatgatttcaagttgtgaaaaggctttaaaacgggtcaagcacgagcaattatttattagaacttaattagtttaaatctttattgagtatagttttttgcttataagttttttatcatttttaattactagtttaaattaaatgttattatttgatatattttttatttaagtatttaggtttcatttgaatatattttatttaaaaaaaagtagaaatttttatataaaagtagaaacttttatacaaaaggtatggacttactttatacttaagaaaattaatctagattcctagcattataattactgttccttaagccttgatgcaaaggattccattgttactttttatgttaatactaagatttaatagatgaagttcatgtacacttcactttgattagatgactcacatcaattaggatcattgacatctactattgataatttgaatattgggtatagattccttgaaagaaattgttgaaaagaattagtaatgcaacaacttttccacacaattattgacaaggattaggaatgcaatgacttttccacacaattgttgatacgaattaggaatgtaacaatttttccaccctatcaaagacaacaaaagttttgactaaaaacttgcaattggaaagggaattctatattcatttctaaatatgtaattttaattgaaaagtaagacatcttttttaataatgataaacaatacaaataatttattttttttagtttgttaataaattcaagataaaccattattttaatgcatgcttaaaataaatgaagttttcatataaattctacttaaggaatttttttttttagttcatgttataatgtcataggaattactcttaggtatcatttttttttaatatgaattttgactaacattatttaacttaaatgtaatagagctagatgtatgattttgaataatatatttgtttaaagtggtatctaaatgttcttaaatgttaagtctacttctttttacatgttaagaatatctaaaaatgactaactaaataccattgtctatacaaaaataattatcatctttcttctttttatacaattaaaacaaattatttcaagactaatagttttaaaaaaaatggtaataattttttttaaacatttgttaccgtaatgaaatttttaaagattggtaatttaacaatactatcttaagaaatgataattatatattcttatttgatataattaaaataatatatttgagaaataatgattttggaaaccaaaataaaattaaagaaaaatataatcattttattgcatgtttctatttaaatactttaaaaaataaaataaaatccgtctcttacaagccaatccttcacgaagaattgatgggaatgattggatgggaaatattgggaagcaaatatcttcgagttcttgactctcaggaaggaagaagtaaaagaaattatttacaacaatggtaaaataccctatttagaaaatgaaattctattttatttctacatgaaagcatgccacccttcatttgtgctatgccttgacatagatgaagttttaatacaaattttaccttttaaaaagaaaaaaaaaataatctaggtaaaataccctacttagccttaatacaatggattcaatcctcactttctattttaacagtcagatttaatacatcaagctcatatatactttaccttgattataccactcacatcaactaggataattgatggctaccattgatgatatgaatattgggtctagattccttgaaaacaattattgataagaactagtaaagcaatgacttttccactctattaaagacaacaaaagtcttgattacaaatgtgtgcagttgaaaagggaattttatgttcatatctacatgtgaggaacttcatgtctttcgacaaatgacaggcattcagttaaagtctagtatgatagagcagtcaatgaagcattcatcagcattattagattgtaaattcccattttggtcttgagctatggccacaactgttgagggggttttgtagatatacttttacaaaattttgtctctaacattgaatataatcccatcctgttgggccccggacctggtgatttaatttttcacaaaaatggaaaacccagatagggtttaggatttaggaggccagaaaaacacttggattgaattgaatatgagatctattgattccaattacaaagctgaaatctgaacagagaacggaggattttaaattcaaggagggtaaacgttctatgaaaaaaaaatggaaaaaaaagagaaaaagaaaaatgagttcccaaatagcaaaggcgaacaatcttacaaaaactacaatccttttcaacttgaagcacatatcgcgtttaaagatcattgaaaatttgaatgatgtaagtccatcaatggtgatggcaagcccaagtgggcttcaaagtgggttgtcaagatgactggttgataagaaaactgcatgtgtggtcctgcatcttttatgtggtaatgcccaaaagattttcgtctgatttttatgattcttctgagcctcacatattcagtcccgtctagggatttatttatttatttatttaaaaaaaaaattgtaataggaagtttaaacaagatcaattggtaagttttccatgtgttatttcaatagattgtgggtccagttaataatgtttacatagtttcaattttggaatggtttcattaagaatctttacctctagttatttttaataaattttagtatatttgaaacgaaactaaagaatccaattcaacttgattcaattttggcttgtatagaaaagatttggtaaaatttggtagattttcaacattatgtactaagaaagttttgggtcctggactatagtactatttgagttagttatagacttctaaattatttttataaatttttagacttgtcattgagtaaacatggatagttcaataatttctagaacttggattatttagcaaaaattttaaagcaattgttgataagaattagtaatgcaacaacttctccacacaattattgacaacaattaggaatgcaatgacttttccacacaattgttgatatgaattaggaatgtaacaatatttccaccctatcaaagacaacaaaagttttgattaaaaacttgtaattagaaagggaattctatattcatatccaaatatgtaatttttaataatgatatataaataatacaaataatttttgttttagtttgttaataaattcaagtcaaatcattattttaatgcatgcacaaaataaatgaagttttcatataaattctattgaaggaattaatttttttttttttagttctgctacaatgtaagaggaattactctcaggtaacatttgtttcttaatataaattttgactcttaactttatttaacttaaatctaatagagctatatgtataactttgaataatatatttgcttaaaccggtatctaaatgttcttaaacgtttaagtctacttctttttacatgctaagaatatgtaaacattactaaataaatatcattgtttgtacaaaagtaatgatcatatttcttctttttataactaaaacaaggctgctatcttcacagggtttctctgggatgaatccgtttaaccagagtagctagagtaaagtgattcagtgtgaaatgatctaggcgttcttatccttttctgattactttggacctaggttcttcctgctcaagaatgtgaggaccttcacatctttcaacaaaggcaaagcattccgacaaactctagttttgtagagcagtct

SEQ ID NO: 10599 - DNA, 10524 bp, Vitis vinifera
  Intron number 1 from transcript GSVIVT01026049001 (locus G SVIVG01026049001) derived from phytozome v7.0 (chr-ID chr1 8; pos 25315844 to 25326367 reverse strand)
tatctgaatctagcttgcttttatctttgtaattagaacaaatctatatatgtttgaatctttgcttcttcctattagtgagcagttggacgagaaacattgtgtaactcatcatcaagaaaagttactaaaagactcaaaacacaaacactcctaaaattaatgcttgataatgaatgggcgaaggagaagatcatagggtcattcataatcaacaaaggtaatttgggttttcaaatattgttggcatttcaaaacatgatatttctatacaattagtagctgataatggatgatcgcaggatggtttaatataggattgataaaaataaaaaattatattaaataaaattaaaaaattaaaatttaaaaaattaaaaattaaaagaggaagggcaagtaaggtcttctaaggataatcatgaggactttggtataaaagaaatgggtagatgggcaaaggataatcacccttattcctgtatcaactttatacgaaagagttcaatttctccatcatatctgtcagactctttgaagctgctggaataaaaggataattatccttataaagttgataaagaaatgggtggatggcaacaatgtgggctcgtcccgtcccatcccatcacatcccatctcaattatttaggcctcttttcatggtcatctaaaaaataataataataataaacattgcaaggtaagccaagtttaaggcaagtttttttaatatttttaaaattttatctacaaaaaatttataaataataaatattataaacattttataactttttttatgagaaatacttttaattttatgtgttaaaaaggaaaaattaaaaaaaaaaattgaattagaataattttttatttaattatatacataaatggggtgaggagagaggagaaaaggtaaaagttgaaccaattttgctttggacctcaaaacccaaacccattccatcccgttcggatatggatttggaacaaaaataagaatatgttaaaaaaatgagaatatatttaagaaaaagtcaaaatgggtttgacccaacttgttgctctctaactttgaatatccatgttgaacactattaaaggaaatattcaagaagatatatggaatcaagcttataaaaaagtagaaaggcactctcataaatattttcataaatctaaaggaataaaaaataatcaaatattaacaatatttgattctcacaatatttggaaatcaaatatgaaagaaaatagagcagaatagagtatttggaaatttggaaatttattgtatattcaatctgtcaacttaataagggaagaagatgcatatatacaaaacattggttagcctattctaggaatctatgtgcaaacgaataagttacaatcaatcaaaaataatctcctatatacgatcaatctcatcctaaaattatgggattcttgattattttcccataatacttcccctcaagttggagcatgtatgttaagaacgccaaacttgttgagaagggaatgaaaaattgatgaactaaatggcttagtgaacaaatcagcaaattggcaagcagatggaacatgagcagttactatggcacctgactgaattcgttctcgaacaacatggcaatcgatttctatatgcttgatacgttcatggtaaactagattagcaacaatatggagtgttgctttactatcatagaatagtttggttggttgtgagtgttctacttgcaagtcatccaacaaatacttgagccatataagttcacacgtaatggaagccattgctcgatattcttattcagctgatgtccttaacattgttgtctatttcttggttttccatgaaataagagctcttccaagaaaaatgcaatatccagtcataaatcgtcttatgatcgaacatcgagcccaatctacatcacaaaatccccttagtagcaaatttcctttggcaggaaaatataatccttgtccaggtgcacctttaagatactgtagaagatgatgaacaacatctaaatgaagctttcttggttcttgcataaactggcttaaaatgtgaattggataacttatctttggccttgtaatggtaagataaatgagttgtctaaccaatcttctgtaaatggatggattcttcaataaatctcctactgtcggcaggagtttattattttcttctataggtgtcgataatggtttggccccaagcaagcctgcttcatctaagatatcaagagtgtatttttgttgggatattgaaataccatcaatagaacaagaaacttcaataccaaggaaatatcgtaattgactgaggtccttgatgagaaatttggtgtggagagactccttaagagctacaattacattctcatcattgacgatgatgatcatttcgtctacatagatgagcatagctgtgaaggaaatactagagatctttgtgaaaagtgaataatcaactcttgattgatggaaaccatcttgttgaattgtggcagaaaatttttgaaaccagctacgggaggcttgtttaagcccatataatgacttgttgagtcgacataccataggtgtctctccctatcgacgaaaaccaggagacagttgcatatagacttcttcaagcagatcagcatggagaaaggcattttgaacatccatttggtgaagtgaccagtgtcggacaacagctacaacaagtaaacatcgaactatagttaacttagtcacaggagaaaatgtctccttatagtcaatccctttatgttgagtgaagccttttgtgaccaaccgactttgtatcgctcaactatgccatcagagttatatttgatcttatacacctatttgctctcaattggacgatgatcggaagggagaggtgtgagtgtccaagtgtgattttgttcaagagcatggagttctgcagccatagtttcctgccattttagatccaatattgcttgttcataagtttaggttccacatgagtggtgatggcataaacaaaattccgatattttggtgagagttttgcataggaaatataccaagtcaaagggtgacgcgtacctgaaaaagaagaagattggttggaagcaaccttggctgtgtggtaaagatgaaaatttgagagttggacatttggttgcttgatacgattagaacaacgagtagtagcaagtggaagtgacacaatggtgccaagatcaagtgtaaattcattggacatagactcgggggatgaaagtaacagtggtaaagacaaagattgatcatcagcttagggtttggttgtctctatggttatgggttcatatgaggtttgtggtcaaggaagaacgaccacatcatgttgctcttcttgtggattattgtggaacggaaatatatgttcatgaaagacaacatctcgggaagaaaaaaatttattatttttaatatcataaacccaataacccttttaaccaagaggataaccaacaaatatgcagcgacgagctcttttatcaaatttatgtgtgggtaagagattggtggcataaaaaagacatccaaaagttcatagatgattatatgaaggtagcttgttatatatagagaagttggtatgacgatttgtaagaaaaaaaatggtgtaggtaagtgattgattgtttgaacactttcctcccaaaattttaacggtgggtttgcttgaaaacgaagagttcttcccacatttaaaagatgacgatgtttcctctcaaccaccctattttgttggggggtgtaagcacatgaatgatggtaattgatccccttagtatccaaatactgtttcatagaggaaattttagtctcattattagttcgaagagttttaatgcaacaattaaattgtgtttccacacaagaaatgaatgattgcaatatcccttgtgtttcaaatttaaaactcatgagatgtatccaagtatatcgagtatgatcatcaacaattgttaggaaataacgagcctcagaatgagaatttattcgatgtggtccccaaatatcacaatgtatcaaatcaaaaggcgcgtgagaagaaatgaaactagatggaaaagacaaatgagtttgtttggataaagggaaaatttcacaaacatgcttggaatcaaaataaatttcaggattaattttagcaagaacttgaagatgaccagatgataggttcccaagacgttgatgccaaagatcagaatgtttgtgaatggcataagccaaggctggattttggtcttgtgcgaggtagtagaggtcattatgttgcttgcccaagccaatcgtcttcctcgtagtagtgtcttgcacaacacaaaaataaaaaaagaacatcactatacattgtaatgtctgtgttagtttactaactgatagtaaattaacttgaaattgtggaactttgagtacatcattaagtttaatgtggggggtaatatgcaatgaaccaattgactcaatatgttcttgaccaccatctgacaaactaatggtagtggtcttgggcaaattttttggatctaataattcagttgaggaagtcacatgatccgttgttccactattaataatccaacacatatttaagtgtaggcaatccagaataattttggatgatggcatatttatacccgtggcatttgcaaaatgttgtgaattaccaccattgtttttccaaatcatagccatcaattggttatattcctcagttgtgagccttggtctatcacttgttggaagaaattttgtttctatctcgacagccttatttgtttccactttcatattgtttgcatttgagtgacattgattgggaggcttcacgttcttcacatgaagcttgtggccaattggaaagccatgtaggtagtaacacttctcaatgttgtgataatcacggtcacaataagagcagtgcagcggagtcttttgcttttgaacctggtgtgctgaagtcaccttattgtcttgatctgcaagcatggcatagaggttcttgttcccattactgagagaaacttcaacctgtttttcttgttgaaggacaagtgagtaaacttgatgtgtatcgggtaaaggttgcatcaataagatttgtccatgaatagaagcataactaccattcaatcccatgagaaactgcataactctctttttctcatcattttcctaaaatttctctaatcctccacaagaataggataacacttcatgataggatgaaagttcatctcaaaaagctttaagctttgtgtagtaaatcgaaattgattgttgcccctgcctatgttccacaatgtctcgcttgatctgataaattcttgaatcgtttccttgaaaaaaaacattcttgtagatctgcccatatttctgctatagtttttctgcataaatcacattgttggctatgtctggatgaatggaattcaataaccatgagatcaccatatcattgcattgttgccaagaaggaaaactatcattagtcgaagaggatggcttaatggaacctgtgacgaatccaattttgtctttagcactcaaactgattctcatagctcgactccatgtgttgtagttatctccttcaagtaccttggagacaagtaccatacttgggtggtttgagtggtgtagagagacgggatctaaagtttctatggtagccttagatgatgtcaatcccattttgtcgatgttcatggcagcgactgtaacaaggaaataggttgcggaagcgcttggaagaattcaaagtcaccaggtttggttctctaataccatgaaagaaaacagagcaaaacaaagtatttggaaatctagaaatctgttgtatattcaatctatcaacttaaggaaagaaaatacatatatacaaaacattggttagcctataaaaaaatgtgcaaacggatcagttacaatcaatcaaaaataatcttctatatacaatcaaatctcatcctaaaattatgggattcttgattcttttcccataataaaatattaataatatttaattttgacaatatttgattttcaaatattaataatatttggttctcttaatttaagattattttcctatatgtcaagaatatcgtttatctctttccttgtataaatcatctatatttttgtataaaattacaaaggaagaaattgaaaatatagttttcattgccaactaatcaaactttacatggaattagagccaaaaagaaaaaatgtctttttttttaatcattttcttctttcccaaacatagaatccgaactcaatattccatcattttatcaatgctctagtttcatctctatcaagttaaacaacacaaattcctactatggcaaaatcaaatcactcccttagtttgtaacatcggtgttctctatcatctattaatcacttgaagggtatatccttcaagaaatacaattttttttgctttccttctccaaaacatgtcaaacttaatctcacaatttaatctataaaaactcccatatcacatgttttccaaacaatatgctaatcataacaatttaagtttaatattcaattattatctctttttgtgtatttaattaatgagaatacaatgctagtttgtagaattttcttattttagacaagggttaggcattctattcaatatgaggcaatatattatgagatgcatctgattttctctcttcaaaatattgaaatttgttaaaaacaattaattgataacaaatacgaccaaggcatctcaaatagactaaggataaactcattaaaaaaaattcaaaatttaaatcctattaatcattaaatattcaaatactatttaacataaaacttctacgaaacaaaaaaaaaaaaatcaaatattaccttaacacttttaatcacttgaaatctttcctacaatatcttcttcaagaattttttttttttttttgttttccttcttcaaaacatatgaaacttgattttcaaatttaatctatgaaaaaaaatatagaaatattgaattaataacaaatatgaccaaattatctcaatttgactaatgataaactcataaaaaaaaaaatccaaaatgtaaatattatgaatcattacatattcaatattatttaacatgatatttctacttacaaatgttacatttagatgaatcaagtgatacaattttttttgctttccttcttcaataaatatcaatcttcaaatttaatttatcaagactctcatccccaatattttcacatattttccaaacaatacgatagttggagctatttaatttttatattaaattattatctctcttttatctttaattaatgatattaataagtttttctttcaattttttaaccatatatattttacatgtgtaatcttattagtgggtcaaacatagatatgtactcccaaagtgaagagcggataccaaagaacaatcccgagattgtagcttttcttttcaaattcattcaccttaccttaaaatatatgatagagagtatgggaaacgtgtaaatatcaacctttccattaaataacaaccaatatcattacgtaattagttgttatgacttgtactacatttaatctactaataaaaccactctttggatttggtgcctttttctctttttgttctaccactctttttattagcttcttagcaattggttaagtaatgggttctttagattcttttaattgcaacaaagtatatattgttttattacgctaattaatatttttaaattccatcttgtttcaattccaaacttcatttatttgtttagtatagttttcgttttcttatttttgaaaatattaaataattatagcattatataaaatataataacttttatacaagaggtataaacttgtcttagacacttaaaaattattttcattgccaaatttcaagaaaaagtcatcaggctaaagatcccaaaggttgtcgagacttctatggattaaaaaatgatttgggaatatccaaattcacaagtatgaggttatatcaaccccaaaagtatctaggccttggtttgtttttttgaatgatccaacatccttcatctccactcgccaccaaccatggcttccatcctaggccctccaagaatatggataaacccttccttcttttagctccacgttaaaaattatgtggggtttagtctttgggctttctttaatttggatattgttggtattggctttaggcttggattgtttatttgagtttggttacttcaattaaaacttttagatttagattattcattggactgttggcttggataaatatcttcattttgggctttgcatgttgtatttatgagattgggctttacctttaatttgggtttgctttttagtgacttgtattttgggttgaaccttgtcattgtcatatactgcggttcacttctatactcatttgagggttattttttggcttaaacatgaagctgaggataatctataaggtgttgaaaaagcaaattcaaaaagggggactactttctccctccttgggttctctccctcaatcctaaggtattacacttggactacatgtagttggtggaaaacaataagttaagatatttttattcctatgacatcatattccattaactaacaaatacatattctaaaaaatcatttttaattaaatataatattttttatattatatccaatataaatgaaatcgtatatctaaataattacattatattatgtctatacttaatttgtaaaataaataaataaaaaatgaaatagaatatatattattttttaatattcgatattcatttaaaataaaaattttattacattgcaatgttaaaaaaatacatatatttaaaatgcgaaatttttcttaggtttaaatagattcattattaaatatttaaaaattataactaaatttttttatattttctatttaatatataaaaataatatatatatatatatatatatatatatatatatatattatagtattattttataaatatatttttagttctttttgaactaaaattttaatttttttttaatcaaaattcgaaattaaacaaaaaaaaaaaaagcccttccatctaattggaaaataatcaaactctgcaagtctaacagctgaaaggaagaaagaggaaagaaagaaaaagaaaaaagactgaaagaaaaaagtcacaacatacacatgaagaaaaacccatccttttcaggtcatcatcatgtgccagaaaattcaacctgaaatgaagaaaatgaatccaatttaatttttttttataatttatctccctaaatattaactttagagcttgaattcatgctaaagttaaggaaagtgttgaaattttgacaagtattcataatcgacaaaaccaatgaaagagataatttcagaggtaattgacttcatcttaggaattaatcaactttttatatcttaggaataaatatgttccagtaacttcgtcttccttctactcaatggcctttgtttataaacgtactaatcaaatatgaacaaatataaacacatcaccattattttttagtagattaaattatcaaaattataattctttagtttaataaaatttgggctcgataatttacccaggtatatatattcaaaaggtggtacttgaaaaaatttaagaagttacagataggaatggcaacggggcgggttcgggacgggtcgcccccatcccaactccgccccgtttatttaaaataaatcccatccccgtcccatttaaaaacttaaacagggcggggcggggcgggtacaataaattcctatacccgccccgccccgccccgcccgccccgtttattattatttttttttgaattcaccattgaaaccggcgagacagggcttactgccgcagtgccgccgcgataaggtctctgtgggtaaagccaaccaccacccctccttcgtgtactgctgcagcaccgccataatcagatctctgtgggtaacgttgccgcccctccttcgcttactgttgcagattatccaaacaattcacacgccccagaaagactcagaatcaaaagcaacattatacaattaaccaaacaaactgcactaaagcccagtagttgtacaaactgaagttaaccccatgtgtgtcattcaaattcaaaacagaaatcagttaaatattttcccaaatgctctgtttggtttccaagaaaatgtgggaaaataaaagatggcaaaatcttggaatctgcatttttcatcatttgggacctagagacaacaatggggcttccatgttacctctgtttaggttagtccttcagtttctgcgaaccaaaacatcataaaaacagaagcttgacaattttctttcagaaaataaagaaacgaagaaattggaatcgcgactcatagaaaag

SEQ ID NO: 10600 - DNA, 2104 bp, Vitis vinifera
  Intron number 1 from transcript GSVIVT01003722001 (locus G SVIVG01003722001) derived from phytozome v7.0 (chr-ID chr1 1; pos 7406938 to 7409041 reverse strand)
tgtctttgatgtaatgctagtggaatcatggatggaaaagtgaagtgtagcaactgcaaaactagatgaaatgtaggaccaatgcagttttatttgttctattataggcttccctggtatttggtaactgactttattcaaacaggttgtgccaatgaaaggttttggttgcgtttggtttggaaaatgctttctagttttcattttatgaaaacagtttttgttttctattttttcttttcttgaaaatgcgtttggttgagaaaagtgaaaactacttttagaaaatgaaatttgtaaaatcttgtttggttttaagttttcattaatgtaaaaaatggtaaaaagaaatgtaattaaaattttacagaatacacatatgatgtcatgagatatattattataatggaaaatattattattgtgatgttatatgtataacgtatatggtcttattattatattgcatttcatttcattatttcttctttttcttttctttattagatttttattttaacatggtttaataaattattcttataaacctataattaatcaactaaattatttgaatgtgaaaatatatccactgatagtaatccatatttttttataaatgaacaaaatacttataccatatataatatttaatttcaatatatatatatatatatatataagataatgttgtattcatattaatatttcttttgtatatgtaatatactaatattaatattccttttgtattataggtcttataaggtattctatgtgattttatttactttatttgttttcaactttttagaaagcaattcacttttttttttttaagaaaattttgaaaacaataaattgttgtttgcacttgattcattttttgagatcagttttctagaaagagctaaatggaaaaacactaataaaaaatgttattttgacccaatttttattttctttgaaaacaaaaatagaaaactacctcaacaaacatgatcttaatgtgctgtattagtttaacaagtgatttatacacaaagaaaccttagtttttaagtggtttggctaaccacgcttacctccacggatgagagagaaccaatacactatactaaagagaacttacaaagggaagagaaaacaaagataatcctcaaaccccaaaataataccatggtttcccgcctttagtgtctacactctgaacctcaagccttattctaccgggtgtctcctattctttgtcacatctctacctatttgtatactctttaaaagctcatctcaatctcacaactttttctttttgtaacctagaacattagtagagaaaattctaactcctttcctttcacatatgaaatattttatacaatattttttatagaaaggaatatgtaccaaaaagaaatatgagatattttctaacaatttccattttggctccatctttctatgatacatgcatccactatacatgtcttcttctcacatgcctttaccggtgcacccaactcctctaatgcactgcaatcaagccaattacctaatgtactccccttgaaaacttacctaaagcacttccattagaaattgaagttttgcttaaatgaacaaataagcatccactctctccaatccttggtccacaatactcgatcttccaaatccttactctacactacaacttccttgtgtgctacatccttgtttagttttggtagatctccatggattcaaatcattaacatttgattgtttctactattcaagctccaataagtgtataagagatacgatacttattctagataacaaagaacatactcaatgtatcacataccaacgagagaacaactaactgccccttatacaaaaagcccttccacaatattcttgtttaaatggaagtaagttgcatgtaatttgtgttcagaaggcctgatttcaaataggattttgatgattctctgtaatagaagttttatagtgtgcttaggtttgtttttgtaccttcttaacacgtctatgtactaatgaattgcattttttgtctattacaggtcttcaccaccaagaatacaagccccaggaggaa

SEQ ID NO: 10601 - DNA, 9617 bp, Vitis vinifera
  Intron number 2 from transcript GSVIVT01013107001 (locus G SVIVG01013107001) derived from phytozome v7.0 (chr-ID chr2 ; pos 8223719 to 8233335)
gaaaaacaaaaagaaaagaaagcacgattcaggttgagcatgtctgaaattcaaggtttttttgctgcttttataatagatgcaagaaatgtcagatattttgtgtgattttctacatatgagatatccctgatttgtttagcaaacttttctctgttttggttaatatttactaagttatgcttgtctaatgtggacctaatttgagataattgtacggttgatttgtcctattcaagagttagacattgaatgggttgatgtagctggcttgtttaggatgaatggaccagtctatttatttgctataaataatttagtattcaatttctgttgggtttaaaatatttgtttcattgtttttgtttgttattatctttgactaggatgtgtagcttagctcgaataccgtagatcaagtcttgaacaatcgtccttgggaaaaaaaggcaatgaaatgtgctagtaagagctacaaagctgtaaatatctgttgatgaattcagtaatctgaaaaacagaggattattatggatgacctgaagagcaactaatcccaccatctcttgacttaaaatctacctaacccttgaattaagacaatctctcaattgttctgagtacagaaaatgatcatttttactagttataaagattagaaatttatggtatgtttggctctctctctctcataaaaaacaatgaagttgcaatgaaatttcactattgttatacctaacccttaaatttaagatattgtaatcactgtgaggacatggttctagcttgcctatcaaaaagagtgaggaagcagttctggcttagacttttgaactttcatgtatgataagaatataattatcctttttcttaatattgttatttattttcagttttattagatccacttaattggttttttataattttttctccctacagatggaaataaactagatgttgaaaatttacaatgttgtttttcctcctttcccttatatcaggaaattatttcaaaattaaaaaaagcttgtcttcattgaagaaatagagtctcctatcaaataaaaataaaaataaaaattgaaaaaatagagtcatactttttgcgagtggtggtctgtgtttggttagttttggtgccactaatttaggaaattttggtcaaaacaaggttatttgtttgtatgctttgtctgaactttatggtcaaaacaactggtagggaccgctaaccaagcttattggcctaaaatccttgagatcatcaacacctttcttcttaggaatcaacaccataaaggtcgtatttaggctttgggcaaacctaccatgctcatggaactctttaaaaaaattcagtacatcaaatttcacaaactcccagctaaaatgccaaaagaccatcgaaaaaccatctgatcttggaggtttgtcaccatttagctccatcaatgaccccaacacctcttcttccgaagaaaacccccctctaactttctggcctcaaaatcatccaacacctcaaaaggcatcaacttcaggcctccaacccccttcttcagacataagggttttaatggcacccaccactccctttttcagctctttatcccctataagctactccccattactttaatcttagcaaggaagtttcttcttctgtgagtattagtcatcttatgaaaaaacttttgagtttctatcccctttctcaaaccaaatttctcttgatttttgtctccatgatacttcttccatcaagtattcactattccatgtattcattgctctagctctcatgtattcactgctccatgcatatctttcacttacctttctagacgtgaatgttaagtcttttacaacctcaaggtttatcttagttagttccttttttggagcattgcaactattaatttgatacctttccttccaaccaagttcatttggaactcaaaagcccctcctaaagttaaggcctttgtgtgtcttgtggctaataagaaagttaatgccaattacatcttttagaagaggaatcctttttgtcctatcattatgtcatgtgcttagctgtaggtgaaatagttgatcatcaattttttttacctatccactagctttgggactttggcataagctatttagattcattggaattgtctggtcacccaccaaaagtttgatagcaatgatggatatatcttttagatgctttggcagtctttctagaggttaggttctatggcatatgactggtctccttgtgatttggaatatttgatgagaaaggaatgctaagatttttttaattattattattattttttttaggatagataaagatttggagactcctagaggcgtggtttatctttattcttccttgtggacctccatagcttgtcatttgatgtgtagccccaatgtaaatgtaaaaaagccattgagaatctagtgtggaagatgaatgcataatatccacatgagttgttttatgcaaagcaaaacttgagttgtaatgctgtggacatgtgatagccatatgtgttcagagagaatcaaaagtgcacattaccaaagcaaataattgagtggttttttgagactccttgagacttggtttatctttattctttttcatggaccttcatcgtggatgcgttttttgatgccccttatggtttccaactctagtgggctctataaaatccaattttgatggttgttccttcggtaacttggacatttttggattggtaagggtctatagatcattgtggtacagtatttagaacatcttggatatcaattgaggtagagattcaagctcttttataggttttagtgcaaagctttgggattttcaaagctatggttttaagtcaaattctacattttttatttcttggatgtctaaaggggggaagaggttcatggaagtgtggcatccattaaagtattgatgttttaagcgaatagaaatgttctttttcttggacctcacatgttgcaaaccaacatgctggctagacacttgcgtttaagacatgaaacatgaaaataggatgaatgttggaacctgttagatgatcaactttgtaagctaccttgccaatgggtttaaagtacctgaatggaccataaaatgggataatgatttttggtttgaaccaaaaactatacaagattctgaatatggttgcaagcaaaaaaatccaatcacttttattaaactatttgcatagaatgctatgcaatcttgtgctgtttgaaggttagttatttgaaataattagagttttgagaggatgaggatcacgctcttgtttgaaataatcaattcctgaaaggattattttatcttaggttcatttcaaattttaatgttcttaccttgattttaggattagtagttggagcaatttctatttaaaagaaggatttgaaagagggagatcattagccctcaattcccaacattcctcatctggaaaagaaggattacgaaagatattatgcaagattgccaagagggaagaaggtatcatccatgaactaaagttctaggaagaagatttataagaggggcaaaattaaaaacaaataaaaaataaaaaactaataaataaataagagagggaagtgaatcattatctcattcttaaaagatgtacaagtggaagtggctgactcctccactaaagttagtaggttccattaccaatgatgggatggatgtgaaggatgaggatatggtaaaccatgggttaaaccttatatatgtgtgtgtatacatatattttaaatcttagaatgaaggataagctcaagattttgcatgttttttcttttttgccttgaaaacaaaatgctatcatctgggaattagaaatgggaaatctggttggttttctccttacatcaaaacctttcactaagcactctcctcagcctagaagtaaacacaggaaacaaggaaggagatctgagcctttatccaatttgcaccagtacctctatcaagcaatgcagagtttacagttgaatgacaacccgagctcccattgctccatagattcccaagtgacctaaaaatccccagttcactgttcataggcttttcaaaagtccagctttaagacaatccttggcttttctactgccttctcttacctgcaatcccatggctatctgggctgcatcaaggattgtcctgccttcaactttaactgagaaaaaacttcgcttttatgaatggttaaggtattgttcaaccattaggacattaccttttatttataatggctatctttaatctggtccaacctatccttatacaattttgtggttgatcttggtattggttaaatatgtaaaccttgttattggaagggaatttatgttaaacgggtttgtgcggatgaaacaagttctacttgggataggggttgatgttaagtttggattagggctatgagttaataagggaatcttggttatatagagagaacatttcttggttggttcaacatagctttgaaggggatgtggttttcgtgggttagaaatggatcttttaaaggaattagaggttgatgataacatttcattagtgttggtaactcattttgcacacttgtttagacattgactgtgttgtatatatcgacacttggggttgtgcgccctactctttgattggctacttttatatatgcttatttgcctatctatatctatatgcatgtgtgtgtgtgtgtgtatcgacacgtagcttgtgttagtgttctatttttctatgcatatggatccatgagcaattgtcacatatttcattgtgacatcaagacattgtaacatgtgggctaataatccaacatcatgtgttttatagccccattttcctgggagccattagaatggtgacatatttctctctaggtgaattgatcaatagtttacatggtggaaaagggagtttgagattcaccattgaaaatgaatccctatggaagtgggtgattacgtgggagtatggggagataggggggtatggtgttcaaaagaatctagggaaggttatgaggtggggttgtggaccactattaagagcgagtgggacgagtttaatagtaagattggttttagggtgggaaatggtaggagggtgaaattttgaaaggataggtggtgcgacgacaaatccttggaagagccttcctagttgttctttgtggccactactaaagacacttgagtataaattgtgggattagaatgggaagggaggttgttggaaccccttgttcataagacaaaaaaatgattaagagttgggagaggtaaggggttttttaggagattgcaagtgcaaacgattataagggacataaaggatattaagattcaatagatttcaaagagtggcaaatttgtggttaaatctctatattcctccttgacatggatcctttgtagagaaaaataggtagaaagcttggagagtagctcctttgtgtttattttggaccatattgaaggagagaaataggaaagttttcgaaaacactgtaaatgtggatcaagcaattacacaaacttttatatacatttttttggaatgggttagggtgcacataggagattgttcatcaacaatgattgactttatcgattggttgaactctaagaaacacgaggatgatgtttgtttttgtgcttctctttgccaagtttggcctttagtgccttgtatacattgtgtatagttctacacacctttttgttaagcactataaattcaattgatttttacctattaaaaaaatggtgacatatttctctttgtaatctataggatgcaatttctatcttaaaacatggtggcaccctagcatagatgcacatccttaagtgaacaattgaactgtcaattgcctatgaaactgaaatgctttttatagatattgaggaaaggattggtcgctttacttcttaaggatgaaaatattggccctatagcacaacttttataaaatagaccaaaaagggcttcctttcccttttccatgctttctccttgagatcaacatagatggaagccttctatcttagctaccccttctattagggctgtaagggaatttgtggaatgatggtagttggggtctatttccatggattatcttcttgggtgcttcttaagtacaataacctgccattgtacatttacctgagctaggagcaaggctaaagggtcttgtacttggttcaccttaattataagccccaccttccttataagtactttgaattgttttgctagtgtttgtgtggttactagaaatggatgtttaccaaagtggtaatagatttcaaaaccgtaatggtttgagataagaatgggccccatgggcatccaaggggcatgtaccaagtgcatttattgacttaatttatgataaatctgactcttttattacctataaaagtgaatcattctacattcccataggaggataaaaaattgccatggagagaatatgaagctccttgaaggcttttctttgtgttactactagattctccaattccctcccttcctctctatctatttcaccatctgttagtttaaaagcctactatcttcagccaacttgtgcttctattgagaattacctttgacaaattgtctcattttgtgtttttgttaagaggaagtataacaaaggatggactattattgagaattacattttgctgtttaagaaggatggactatccttctaagtgtaatcaaataataatgtagcagtgtcctactaaccaagagacttctagcaaattactgggtgacatgtaggcaaatgttaaattgacatggcaaaagttactgaagtgaggtccattaggcatcacacatgaaatgaagggggccatagtgggctttttattgaaaatttggctaataacctctatatcctcattctacctgatgcttaatgcatgactgaatccatggtggggtatggggtttcctaagatatcttttgactagggtctatcaaaaaaaaagaaaaaagaagggaagatatcttttgacaccacctgatgcttaatgcatgactgaatccatggtggggtatggggttcctaagatatcttttgactagggtctatcaaaaaaataaaaaaaagggaagatatcttttgacttggtgtcaatcattttccatcaaggtgacgacaaattgccatgctcaatcaatggtgggatgttatgagggtcttgacttggtggttggaggaggattaattgaactagttgtgtcccaggttagccacattcctggcttgatcttctaagaacagtttaggagtgattgttatactcttcaagacggattgggttagccaagacggattgggttcccctgaggagcatttccgacatgttgtccatcaattataatggttttggtttatctaagagagggataattttgtggcaagctgtgtgcattgctttaatttgggttgtgtggcgggaaagaaatgcgaggatttttgaggataaagtaaggaattcagagaatctttgggattctattcatttccttgcttttctttgggctttttgttccaaggtttttaagggggctcctcttaatgtgttacaacttgattgactagcagtgtgtaagtcgaatgggttggtctaatatagagagtttgtatgtttttacttagtattttctagtatttgtattcttgtagtttagtttttctttggtgggaggattcctcatccttctcttgtacttcttttttctatcaatatatccctttgtcgtttcctatcataaaaattgttatactcttcaatcctatcacaaaccacctttgacgaatgtcaagtgcttattagttggctaattggcatttcaatcctaaaggaatttcctagggtgtattttctttcagcttcctttgtagatatgcttgcttaaagaatagggattctgttgacatagtggcttggagagcttcatggagaattccctaagatcctaagctggagatatgtctagagctattttgaggcaaaaaagagaaaaaaaaaaaaaacactgaaagttcagaaccatctcaatatccctgaagttaggtacctcaaggcttggaacacaatgcatagcgctacttaaaatactcttgctactaccaccttagatatgttcctctcagtcgcctcaaactctcccccaaagccaagcatcttaatcatcctcactgcactcctggctacctatggcatagtgcaaggtcatcatctctacagtacaccttgacatcgtccagctttcttgacaaaaaaccttgaaacactagaatgcacgaaaaaaaaataaaaatgaaacacctaagctatgtttggttctcggaaagtactaaagaaagaaaaaaatgttaaggaaatggttttttcatgtttggtttcattatgaaaaatatgaaagaaaatcaaatataattaaaattaattaaaaatttatatagtttaaaaatcatttaatctttatatagtagaagaaaatatgtgaaatgcatttgaagaaacaattaaaattaatttattgactttgaatttattttttatttttcttcgcttttttattttccttctacttttcctttatattatctttccctcgcatttttccccatttacttggtcaacagcttgttagtctcttagactgatagggttgaactttttgtggaaaggtcttcatattcatattcgacgactttcccttttactggtgttgagtgagaaaagggtgccatattgaagctgaagaggcccaagccctaagagagcttcgtctgattttaatgagaacagcgtgtggcttgggtttgcataggtggtattgtattgctagcatctaaactagacaagttcattgatgccaggaatagctttgggttcacttggaaggcataatgttacggtccttagaaaagacatcaatggcatttcaaattgaaacactcgatagggatgtgttttgccatccctatcaaaggcataatgttacggtccttaaagttcctctttaaggtgtctggttgtgttttgccatgtgagtgaggaaagtgaggaaagtaaggaatgcagaagaagagacagggatttaaatggaagaggctctgtggtggacctgatgtgggtgctggtgctcaaaggtccttttgctgtgaatgctcaacatcatagggattaacacagctcagtgagaagtgacaaaatcgaacagtacattcctgcaagccacatggtagattagcaagtaaaatgcacagattacattgatgttaaaaaatttacatttttccttatccaaggggtcagatttgtatgcttggaagtgttagatttttcctattcttatcaatttgatgagcggttttattttgtatgtaatcaaagtctctttgtattctgctgattatagtttccctttcttccccatcctattttcctatcttgtcactgtctgcaaacagggattcaggaaggttgatccagaccgttgggaatt

SEQ ID NO: 10602 - DNA, 11271 bp, Vitis vinifera
  Intron number 4 from transcript GSVIVT01023832001 (locus G SVIVG01023832001) derived from phytozome v7.0 (chr-ID chr3 ; pos 3117950 to 3129220 reverse strand)
gtattgaatccataattgagtacaagtatcctaaggtatgttttttctagttttctgtcatgaagctagggaagaactaagtttacatgattgctttttgttgaaataatgccaaagttaggactttaatttaggaataaaaaaggagagatcatttaggatatttccttatgatttagtttcctaattttaggagagaattaagctagattgattgtttcttattcagtcatttgtgtatatatatgtgtatggtgtgtaccgattcattatcaataaaggagttcaggaattcttcatggtatcagagccagttttctgaaaccctaatcccttctggccacctcttattcaggccatcactcattccggccaaatctttctggccatatctcaatccgatcatctctctctctctctctcattccggccatcagtccctgttctcagagccaagggagaaaacactttccagtcagtcgaatagtcgtcagaaaacactcaccgccggcaacttttccggcgaatttttccggcgaactttacggcgacggtttttttctacaccgcaaggagcgcctggaggagatctccaatttgtcccaaagcaccggaaccagaaacccatccacgcgccgcccacgcgcgtttttccggccggcgactgcatctcacgcgccggcgcgtgagggcgcgtgagccactttccggcgacgcgcttcctcctccaggctcgcctgacgccgaccagccacccttcctacctgtttgtgcaatccgagccctgcacgtgcctcttttggggttcttttgcttccgcgggccctctgatcagattttccggcgtccttcggctattttttctcaactccagtccctgcacgtgccttgaaaagtgttcttctacctttccggtccatgacaaaatacggaatggcatcatcacaagtatccagcgtcacgtcaccagaatcagggggcagatctgaaattccaaaccttggtggcaatgattcctctcctattctcatcacaggacacaaattaaatggccataactatttacagtggtcacaatctgtgttgctgttcatttgcggtaaaggaaaggatgagtacctcactggagaagcagtcatgccagaaactacagaaccgggtttcaggaagtggaagattgaaaacagcatgatcatgtcatggcttatcaattccatgaacaatgacataggcgaaaatttcttgctgtttgggactgcaaaggacatatgggatgcagccaaagaaacttactcaagttctgaaaatacttcagaactgtttcaggttgaatcagctctacatgacttccgccaaggagagcagtcagttactcagtattacaacacactcacaaggtattggcagcaacttgacttatttgagactcactcatggaaatgttcggatgatgcagcaacatacaggcaaattgtggaacaaaagagactgttcaagttcttcctaggactaaacagggaattggatgatgttagaggccgaatcatgggcattaaacccctgccaagtctcagggaggctttttcagaggttagacgtgaagaaagtagaaagaaagtgatgatgggatcaaaagagcaacctgccccaacattggatgcctctgcccttgcggctcggtcatttaatagtagtggtggagatcgtcagaaacgggataggccttggtgtgattattgtaagaaaccaggccattataaggagacttgctggaaacttcatggcaaacctgctgattggaaaccaaagccacggtttgacagagatggcagagcacacgtggctgccaactctgagagcacctctgttcccgagccgagtccattcaacaaagagcagatggagatgctacagaaattattaagccaagttggcagtggcagtactaccggtgtagccttcactgctaatcgaggaggaatgaggccgtggatagtagacacaggtgcttctgatcacatgacaggagatgctgccattcttcaaaattacaagccaagtaatggtcattcatccgtccatattgctgatggttcaaagtcaaaaattgccgggacaggttctataaaacttactaaagacttatatcttgactctgtcctccatgttccaaacttggattgcaatcttttgtccattagcaaattggctcatgatctccaatgtgttactaaattctatccaaacttgtgtgtttttcaggacttgaaatcggggaagatgattggcagtgctgaactgtgttccgggctctacctcctttcatgtggccaattctccaaccaagtctctcaagcaagttgcgtacagtctcagagtatgtcagagtctttcaattctgtgtcaaattctaaggtcaataaagatagtgagattataatgttacactatcgccttggtcatcctagctttgtttaccttgcaaaattgtttcccagattatttatcaataaaaatccagcatcttatcactgtgaaatttgtcagtttgcaaagcatactagaacagtatatcctcaaatcccatacaaaccttcgactgttttctctctagtacatagtgatgtgtggggtccctcccggataaaaaatatttctggcactcgatggtttgtgacatttgttgatgatcatactcgggtaacatgggttttccttatgaaagaaaagtcagaggtcgggcacatttttcaaaccttcaatcgtatggttcaaaatcaattcaattccaaaatacaagtcctcaagtcagataatgcaaaggaatactttactagtagtctcagtacttatcttcaaaatcatggcattatccacataagttcttgcgttgacaccccacaacaaaatggggtggccgaacgcaagaatagacatctcttggaggttgcccggtgccttatgttttcctctaatgttccaaactatttctggggggaagctattctcacagctacctatttgattaaccgtatgccatccagagtgcttacctttcaatccccacgtcaacttttcttaaaacagtttcctcacacccatgccgcctcttctgatttaccactcaaagtatttggttgtacggcattcgttcatgtgtatcctcaaaatcgtagcaaatttgctcctcgagcaaataagtgcatttttctagggtattctccaacccaaaaagggtacaaatgctattctccaaccaacaaaagattttacaccaccatggacgtctctttctttgaacatgtcttcttctatcccaaatctcatgttcagggggagagcatgaatgaacatcaagtttgggagtcttttcttgatggtgtaccttcttttcactcagagtcaccaaatccttcccaattcgcgcccactgagttgtccacacccatgccgccatcagttcagccagcccagcacacaaatgttccttctcccgtgaccatccagtctcccatgcctattcaacctatagccccacaacttgctaatgagaatttacaagtttacatcaggaggaggaaaagacaggaattagagcacggatcacagtcaacatgtggccaatatattgactccaattcaagtcttcctgaagagaacataggtgaggatagggctggagagttgttaattcccagcattgatgattctactttgccaattgcattgaggaagggtgttaggagatgtacagatcatccaattgggaattatgttacgtatgaagggttatcaccatcttacagagcatttgctacttctcttgatgatactcaggttcccaacacaatacaagaggcattaaaaatttcagaatggaagaaggcagtacaagatgagattgatgcacttgagaagaatgggacgtggactatcacagatttgccggttgggaagaggcctgtggggtgcaagtggattttcaccataaaatacaaagcagatggatcagtcgaaagattcaaggctcgtttggtagctagagggtttacacaatcctatgggatagactatcaggagacttttgctcctgttgcaaaactgaacactatcaggatccttctctcattggctgtcaatcaagattggtgcttgcaacaactggacataaaaaatgcgtttctaaatggggacctagaagaggaagtctacatggaaataccacctggtttcgaagaaagtatggcaaagaatcaggtttgcaaactccaaaaatcattgtacgaccttaaacaatctcctcgagcctggtttgatagattcacaaaagcagtcctgaagctgggctacaaacaaggtcagactgatcatactctatttgtcaagaaatctcatgccgggaaattggccatattgatagtctatgtcgatgatattattctatctggaaatgatatgggggagttacagaatttgaagaagtatttgtcagaagagtttgaagttaaagaccttggaaatttgaaatatttccttggtatggaagtggctagatcaaggaaaggaatcgtagtctctcaaagaaaatacatactcgatcttcttaaggagaccggtatgcttggatgcaaaccaattgatactcctatggatagtcagaagaaacttggtatcgagaaagaaagtacaccggtagacagggggagatatcagcggcttgtcgggcgcttgatttatctctcacacactcggccagatattggctttgcagtgagtgctgtaagtcaattcatgcacagccccactgaggaacacatggaagcagtctacaggattcttagatatttaaaaatgacaccagggaaaggcctattcttcagaaagacagagaaccgtgacactgaagtatactcagatgcggattgggcaggaaacatcattgacaggcggtccacttccggatattgttcttttgtctggggaaatcttgttacctggaggagtaagaagcaatcagttgtagccaaaagtagtgcagaagctgagtacagagctcttgcacagggaatctgtgaagggatttggataaaaagggttcttagtgaactgggacaaacgagttcatctccaattctgatgatgtgtgataatcaggcagctataagcatagcaaagaaccccgtgcatcatgacaggaccaagcatgttgagattgacagacactttatcacagagaaggtgactagtgagacggtcaaattaaactatgttcctaccaagcaccaaaccgcagacatcctcaccaaagctttacctaggcctaacttcgaagacttaacttgcaagctgggattatatgatatatattctccagcttgagggggagtgttgaaataatgccaaagttaggactttaatttaggaataaaaaaggagagatcatttaggatatttccttatgatttagtttcctaattttaggagagaattaagctagattgattgtttcttattcagtcatttgtgtatatatatgtgtatggtgtgtaccgattcattatcaataaaggagttcagaaattcttcacttttgaatgtaactgattgaaactggattggtaaatcagcaagccttgacagtaaagatagatgaggcttggtgaaatatatataatttaagggaattgttttttcaatgcaagaattgtattgaagtttatctttcaaaattgatggctttcaaaattgtcttaaattatacgttgatatcttggggacatgaaaccttaccttctgcagtgagggtacttttattaaaactctggagtgggtgacccttaatcagagctttctgcattaagcacatactcctttgatgtttgatgttttttctctcttcaaatgtaaaactttttaaatttcagtccaattgtccctgcatagcgaagatataattttttttttttgctttcttcggtctatgatcaatgaaagagatatcagacctttttggattaacctcttcctgaggtgctgttggaggagattttaatgttactggaagagcccaggggttctaggataactctgagcatgggggagtttgataatcttattatagagtgtgagttaattgatcccccatttagtaatacctcttggttaaacctctgagagttccttgtttgcaagaggttggataggtttttgttttccatggattgggaagaaggtagtttcccgcacagtctttaagaaactttacactgccctatctcatatcattgccctttagtattgaataccaatgcttttaagtaggggctgagtccttttaggtttgaaaatgtgtggttacttcatcttggcttcaagggttgcattagcttggtctgccaattgggaatcatcgaaggctcttcaattcctctttttccataaggtccaaaataagcacaaattagctactctctacaccttcttccttttcttccctacaaaggcaccatgccaactaattgtgacatccctaactgaagatgagttgaaggatagggtttcacgggaataattttctttcattgagattattcttttacagagtttacagcatatacaaatccttcaaattaggaaactaaatcactgattaaaaggaaagaataactcctaacaattacttttctaaaaatacaaagattgacaactaataaataatttacagctttacaaagttatttctttccatattagtttcggttttccaacaagatgacatcacccattgaacaccaaaaaaagtgaaaatatgctgccaaagcatgactgccttgggatagtgaaaaagcatatgatttactaatacctcatctccttttcacaagtaacatctgcccaataaacactaacccctcctttttagctaatccaaagatagaattcttcccgtacaactttccaagcaaaaaagctagccctcttcaagacctaagggtttcacacaatgcctgaagtgaacacactagcattgcaaattgcgaggaaggaataaaagaatttaactgtaaagaggcctttctttgacacctgccaaggcatgacatcctcaaccccccttctaatcacttgaccttgcaaccttctaaaaaaagcttccatctcttctatttcccaatcattattatgtcttgtgaaaactagattccaatagcccacttcaccaaactgctcccacaattagtctaccattgggaaagcctccttcaaggaatcctctccacaccaactatccttccaaaatctcaccctcttgccattccataccctaaaaacaaccctttttgtgaaactccttccacccattcctgatagccttccaaagacccactccataatcttccctcgaagttctagagcattcattgaaggtatacaaattctagttgtagtattattgaccgataaagtggtagatgagaatacatgttcaagagaataatgagcggtctttaagattgattttgaaaaaggttataaccatatggaatgagattttttaaatcatgtcttagaaaaggttttgcagtgggatggagatgttggatatgtggatgcttctcgacatataattttgttatgttaattaatgagtgtgctagaggatgggttaaggtatctaggggcttaagacagagcagcccactatttccctttcttttcacgttagtggctaatatcttgagtagattaatattgagagcaaagtagtgtgggttcttagaggactttttaattggtagatctaaagtgaggattacccatttacaatttgtaaatgaaacaattttcttccctcaagctaggccactcaaattgcaaaacctaaaaccaattttgatggtgttcaggtaagtctttgggctcaagataaatttagataaaagcactttgctaggtatcaatatgaatcaagagcaagttcatgatttagcttcctttttatgttatgggatgtttgagtggtccatatcctctttaggtctcccattcggagggaacctaagagttgtttacttttaggatcctaattataaaaaagattcccaaatggttagatagttggaagggagacaatttatcttttgctgatagaataactcttgtgaacttatgtttgtcttttattctcatttttttcctatcaactttcaaagtttcgattaaagtggctttgaggactaaacaattgtagagggattttttctagttgggagtgggggaaggaaacggagataattttgttggatgagaccttgagtgtaaattcaagagtgaaatagggaagtggttgtggaggtttccttgaaagaaaaatgctttatggcattagatcatttcgaatttcttttggccgcattctattggttgggatgctaacattgttgttacaaccctccaaggttattgcttgaatcttatttgatatttttttattcacttaattctctatgggtgattgtttaaagattcacttttgggaagatacttggtgtggtgatttaccttttcatttttatttttttttgataaccaaagaacttgccaaacccttaggactctccatggggatctaaatctcggggtgttgactgccctgcaaggtgatttaccctttcatatttgatacctaaatcctttaaaagtggtgaagtcaagagagtcctctatttccattgtttttatccctccttaccatctaagaattttgacttttcctaaaatctcatttaccaagaaattgaggaattaaatatgatgttttatacagcctatgtgcacctatcaccttcctatattgatgtgagagttcgatctcttcaagcttgttcatagttctttcttcaaagccctttcacattcatctatccacctttgtccttttcgctccaactaatttcatttggaaatctaaaacccctcttaaagtaaagacttttgcatagcttgtggctaataagagggttaagatcaatgatatgctttaaaagcgaaggcctctcaaatctctttgtcctcagagtggtgcatcatgtgtaaggaaattagtgaatcaacttatcatttttttccttattgctcagttgatatggtttatggcataatatattcagccttgttggaatagattgggttccaccatgaatggtggtagagatgatgaccattttctttaggccatgtttggaacactaaaatagagaatcaaatgggaaatcaattccattctcattcattaatgtgtttggattgttttttaaaataggaataagaataaaaaaatttatgattatggaaatctaatcccactcttgttaggattttaatttctctcttctatatggtattatgattcacctccattcctatcctatttccattcttattcccacctaccaaatgcactattagtgttttgggggtcacattagaggaaaggttctatgggtattgctggccttagtttgatttggtcaatatgacgggaaagaaatacaaggattttctaagatgttcaagaggatagtagatacagtttgggacttgttttattcttcatcttgctttgtatctctactagttaagccttaaaaggcaccctcttgagccttatgttgctagattagcatcttgtatgcaaggcagggaggttggttgagaagaactctcaagtatcgtcatcattgatcaaaagactagtcaagttgaactttgatggatactctttgggtgacatggggcaatttggaattggttgagttattagatatcatcaaggttcaataatcaaagcctactctaaacttgcaggtaagagttttgctattgaggctgaggtggtaacactattggagggcctcatgcaaactaaagctttgggcttgtctaactttgtggtggagggtgattctattagtcatctaatgggtggctaaaagggaaagagtaaagaggaaagaggtttcacacttcactataaaaaaataaaaaataaaaaatctcatgggtggctaaaaaggaaagaggtccatggaggcttgacaggtgactgccaaatattttatatcattacaaaaatgggatgctccattggtcaggttcatcacgttgttaatcaagtggcatatcgactagctaaaataggagcaaagaagttggtattttttgttggagattaatggcctctttacgttattagtggttgtccaagtattgcttcagttttttgtaacctttttttggctgcttagcttgcaggttccttgttaaggagtctattctcttttgttgatcagagttgtatattgtggaaggacatctcatccttctggatcttttaaattaatagaaaagatctaatgtgtttgcaaataaagaaaaaagtaaaattatgtgtatcatgtgtgttagatgttactaatatgttatgtttttaatcaatattgtcagaatattgactctcaatgcagattaagttatattttcatgtatgctccagcacagctgtttcgagaatttgtttgacaaattataatgaattttagtcagaataagttataagttgccttatgggagttattgtttgctctgttggtgttacttgggtcctcccttcttcggttagagatactcttagtggttggagtggctttaagttgggcaagaagcgtaggaaggtgtggaacgcagccccgttgtgcattttttgggcggtttggaaggaaagaaacatgatagtttttgataatgaagagttatcaattcataggttgaagaattcttttgtttgtaatctttggctgtggactaaatcggttgtaaatgatggtcctcttcctttgatcaatttttttgattggctaggcgctagttgagggctggtattgtatttctttctctttttgtgactattggcgcttcttgtatacatcctgtatgcttgggtcagcctcaaggcacccttttctaatatatttttgttgtgtgtttgcctatcaaaaaaaaaaagttgccttaagagtgatgccacaaaatcctagttgcaagatctgcaactgtgccctttccttagttataactggtggtcttttcctttgttaccttcatgatttggaagtttttgtgcttttcctgtttattttttccttttaagtcgtatcaactttaattttattttgctttttatccaggttaaaagatctaaaagtcacatac

SEQ ID NO: 10603 - DNA, 6517 bp, Vitis vinifera
  Intron number 2 from transcript GSVIVT01026227001 (locus G SVIVG01026227001) derived from phytozome v7.0 (chr-ID chr1 0; pos 14436864 to 14443380 reverse strand)
acgtaaaatatcttctttttttttttttttttgttttttttggtgcaaaagttaatgatgttccaagaatgccaatggaaaatggtcatcagatttttgtgcaatattggaggatctaactgttgcattccaacaaaatctatattctagaccaaatgttataaaattctatgtccattctatcaggatgcactttcagtagatttattaataatcttcatatgcgtgtttatgtattcttctatatagtttggaacttaagtattaagttgctagcttgtgattgtgaaaattaacaagtcatcatatggagataaatgataaaactactcctgttattagtgatatcctgaaagtgctttatcccaactatgtgagggttgaaatttaatttcgtttctctgatttttccatttgcagcattataaatccagaatcatgtatgtaaattcaaaactatttcaagttacctttaagtgatctagcacattcccattcatgccactataccattgaataaataaaagagtttttggccttcatgagattgttttagttgacggttaagattagcttgatttaggggataaggttaattgtttttgagtttatacaatgggttgtaattgttggggcatgatatgcattgtgggtccaaatcctaatagcttaagattttaggaaaattggttgtccaatcacaaatgtgtgatttgtccacattgttgtggtgtatgcctcccatggttagcgtggtttgtggggggaagggggtgggggtgggggtgtgggcgtgggcatgggttggggatggatggtttggtgttgagtatggtatcttgtgggtctaaattctaacttaagcttttaggaaaattggttgtccaacacaatgataatctcttttggagttatttattattgaattgaagattatcatctttatgctttgtttcagtttacaattggttttcttcccttcttattatatgatattcattccattttctttatcttcttattcttcttgtctttgaaatttgttgggtattggaatatgatttaatgtgtgaaacacaagcctctcttcgaaccactacaacaaccccaaaattattcccaaatgcttcattcaatccactcctttccaagaattctatgtgaaactttaaatccaatcccttcagtgtaatgttggattttagagacatcctgcataaatttggtatcagtatcagctgagagatgcagggcctttgagctttgcatacagaaaggtgggtttctccaatgctgagtgacaactaaaaggtggattttgaagaatttttcagggagcatacatttgcataaaaaggctgacaagttacaagatgcttaaattccataattgaatgggagtttggacattattcaagctacactagacaactacatgctatacgttaaaggctctttggttttattgataatcacttttactcttctaactaaaaaacatgattcatattagtcttgtgtccctatttttccaatgctaacatggagattagtttgctcatcccatcagaggaaaaaaggtattagtgctcagtggaacccctagcttatggattgcatcaagctcaattcttatggtgttttggattacccagggcaaatgtgtattatagtcatagattttgggtttattggagggcctatatgagtttgctgccataacattgaggaatctcattgtggaggggggaacttgatgatggacttaccctcagcatcatagggaaggagtggatcttggaggtatgctcaatgaggtagattcttggtgtatggaggtcagagtgatgtttggcatgaaagttgagatcagctaatcatgaagcatatagcttagctaagagggtgaccttctctttctaatgtttgctggcacttcttcctccatgggcttccttggattagccttgtcttggtggttctatttatggtaagcagttgggagtttcatttctattggtgtcttagagtgaagaaagtgtcaaattcaaagagaatcatttgaaagcttattggttaaaggcgataagattgataggaatgttcaatgaagcacaaattgctcatgtctctgtctagtagaagtcatgctgactctcttgctacaattgcttttaaggtcaaaatgattgacatagaaatgcaaaatggagacaaagatgattaggaaaaccatgcttgcgtcttccttgatgtctattgatatttgataaagcttgtccaaccttttcttttttctttttatttattttttttgataaatttgctttcctatccttaaaagatctctcatcttttaacatacattcttttgccctatttctaatagaattctgttttaaaaagaagatcctagattggttgatgtggatcaaggtgctaagttggaagttggtgattcggaagtacttctcaactggttatatggcttaggaaccttctttttatggtattgtttgggcagacaagtggaaaaccttctttatggatgcttaattggaagggtcagccagggttgaaaatgttcttttttatggtctggtggatgtgcctgtgaatacattctgctactattggatcatgggagggcacaaagttgatataacatgataccttgtgttggcgaattacaagcaatgtggtcacctgcattttgtataattggtgtgagggattatgtttgtttatgagtaaagcagcaagtttacctggcaagcatgtctatatccacaacaatgacttgatattattttttatatatctagagggatttcatttatggatttcttgggtttatctgctagttcattttgcatcatgtcaatgcaattcaaactgtttactagatggaataagactttaaaaagaggacctttatgagaactgcaactgaacacattagtaggagtgaaaaataattatgaatgaagacctgtgattcactttgtaagtcccacggtggttacaattcctccaacaatcaaaatacttttccttctacatcaacaaatttaagttagtgtgagtgtagtcttctgggtgtagaactttaatgcagttgaacacttgtaaaatctttgggcaattttcagccctatgtctaattggattgttaattttcaccgagtaggatgacctcactacctatattactcctgagcagaaagggatggacattgttgtgccagaggcagaataaaatagtgttgatatttggcagtgaggtttgataaaagacagcctcgttgagtcttacattctcttcactacttccaaatccatatgatatgaagtgggcaaacatcagtgctctcaaagttcatgagaagtgtttggtgatgtataagttgatacaatgtagtgctaactgtgaaggtgtcccataatttgttgggtttatcacggctacaatcaaaatgctccctttagcctgagctcatatccggatgtggttcacttttttctgatagctatgcctgcctgctgagtgccgcttgaatcaggaaaccactgaaaatcttcatccctgttcctcaatatttgcatacatcccatgtatcttgttatatgtaatttcactgtgtcccaattaataacctgattatgattttttatagtttgttctttttattcattttagtgttatgcctaaagagaaagtaaatatctacatattggaacaaagcatacctatgatgtcttagtacaacattaaattgcaaagatgtcgttcggatatacatctgcatttactattttaaaaagcagaaaatacaagtgtttttctaattatacctttaattttttataaatactagacatgttttgtagttctaattttgttttaatgataaacaaaagcatgtttgatgattacataccaagaaataaaaaaaaaaaaactttttcaacaattttccaactatttatctgtgatttttggcaattttatgatattcacatgtgaggctccagtattattggcttgttaaagaataataagatataggttagttgtggttgttacttttctattttagactttgttttggggatacaaaacttttttggttcctttattgttattattttttgaagttttgctatccaattttaaataaaaagtgaaaacatgtcactctacatgatttttacaactattttaagttttgaaaacaaaaattgaaaaatagaagtgtgaccaacctgcattgttcagtttgaaattaacttttcattagaaattttcagaattgttcttagttatagaaaactgcaatacaaaggttatcacttatcacactatggagtcaaagatcattcatagtctggccatatgtctcaatccattcattctagacttacattagttttctaagcttactttttcctaaagagagttattttgagaggaaccctgaaaaattgctataatctttacctcatctggattcatgattttgattctagatgagaatatgaagtaattttagtctgaaaaaaatgtccaaactaagcttcaagctcactgttagccccctaactcgaaaaatggcactaatggcctcatgggtaggccttgcacccataggagccttatgaaggaagcaaggtggaactggaggttttgagtcaaaggggaactgttgctggttgggctaacacttaggttgatagcactgcaccgtcacgcacccttgcgggaatgggacagcgtgcgcacatgcactgccatgcacagcaagcaggtagtgtgccacttgcatgcacgacaatggctaagacgcaatgtgaggcttatggggatttatttattaatttactaaataaatccattattcttcctcaagtagggttgatgcctctaagaatattcaaaacggcttaaaatgctctttaagggaggggatggtaggtgactcaaggtgggcaccaaggcaaggccttggccgcaccaaggtggcacctaggcattgccatggcacacgaatgacatgctagcatgcacacatgggctccatgacgtgtgggtgcaacttgtgaccgtaatggcacgaggcatcatatagcctttccctcattggcgctggcatgtgggcgctcaaccttgtgcattgaggcagcccatgaagccatgggcacaatgccatggcatgtgctacatgaaggaaggccttgggcatgccatgatggagttgcaaaaagcatgaccaagttagatgggtggttgatacatggcataggggtgcaacccttgtgcatggaaatgacaagccatgggcacaatgccgtggttcattgctgcaaccaagaggggttggacatggcatggggtgtccttgtagcaaccagatcaaggcagacatggtggtgcatggctgacacgagcaaggcataggagggccttgcaacaaatggttcatacattaaactcaatgtgctatagccaccttgacatggcagagagttgggcaccagtttgtggggcaaagcacactgatgtgtcagagaggggctggacatgcgaatgtggctgaggcaagataataaatgcaggctatgtgcacaccaaaaggggtttgatgtgggcccgacccacatgcattgagaccaaagactagactatcatgggcttgacttgtaacatggaccagacacgacctagggctgaggtgatcagagaagggcttgtttggttgagtggctgaggcggttacacttgcacctattggcaaggggtgtcttggatgggcaggttttggcttggcatcaaaagggaatgtcagatagagatcttgctggctgcatgaggcatgaagggacacctctgttggaaggagtctcttcagctaggtgtttttggtggttgcatagccaccaccctaagctcctgatttgaattcaaaattcaaacagatggcagtgtgtataaaagccttttgcattgcagagagacttagagtgttttattagattgtaaacactgtggggtgggttctctgactctgtataagtgttgggacacttagaaacaattttgtaatcttgtagtttggaataaacacaagttgggaaggttcctgtatttggtagttgcctatttacgtttgcttttgctatgacattgagaaggttagctaaggttgagtcttagtactgcacacttagaaaaaaaattgatgccgattttactgggtgtgacactcaccaagatggctatttatttggttttggttttaaaatattcaaaatatttttatctttattttacatgtttttggtggtttcttggcatgtggttgtttttcattatatattggtttttttttccctatataattccaagagcaggttaggcactggctctaatcaagaattttattttgttttgggacatcaaagttgatatttgcaaattgcaggttaaggtgaaggctgctcttaacaggcaatcaaa

SEQ ID NO: 10604 - DNA, 4659 bp, Vitis vinifera
  Intron number 5 from transcript GSVIVT01032023001 (locus G SVIVG01032023001) derived from phytozome v7.0 (chr-ID chr1 3; pos 23459783 to 23464441 reverse strand)
ggcttaaaaagataccccaagcattcggctctgttcaagaaattcctcctataatagatgattgagcttcacaacaatatcatttcaatatataaattcaataagatggagatgatcatctctttgtatccccatttcataatatggttggttttcatatggaactactataattaaatctataatagatctttttgtgtgttgattttacaatatcgcccattttattattgtcctatttttcaaagtaagatcatgttaagtgtataaatgactaaaatgatatttgtactttcaatcctctcatcaaattacaggatactttcatatcctttcatctaattgttttctttgcaatgaattgctaataatagcatacaatatacatcttataaaataaaggcatttatatattattgaacttacattgatagctcttgatatattggcatacaaacaaatttctcttaaataaagaattttgtatctccatttcaaaatagctttgatttttgcataaaactattttaattaaatgcataacgcattcttatgggttgattttacattttgtctctcatctcattattgtcctccctctcaaagtaagatcatctaagagtttaaatgactaaaatgatatttgcaccttcatatcatttcatcaaattgttttcttcacaatgagcggataataacaacataccttattcattttatacaataaaaaacatttatatattatagttattagaaagaaataatataatcatctattagaaaacctgacatcatattgaaataaatttataattacatatatagataacccttgatatatcggtgaacacacaaatttctcttatatagaaaactatgaaacaaattaaactttattaatttgcagaatagctcttgttacattgttgtacacacaactttcacttgaatagagaatatgaaacaaattaaactttttaatttataaaattataagtatagtaatatatatttcttttacaattaatgactaagaagtttgactagatttggcccttttatcttgacttgacctgagcttgatttgagtaatattgaataaaagtgtgaatgcttgatcttggatgaaagatgctacaaacttcatttttggattttcaaacttattcttcaagttttcaaagaattgtaaagtttcttaaattcttgaggcaagactctataatttttttcaaatatagaagtttgaaggtccgagaatgtgttttgaaagttaaagaggtcctaaaggttaagaaattctctttgatattatccttaattttttagagataagtattattattttaatagttgtatttataactatccaaaatttgatattaataattattattatcggtactatatattttaattacttaaattgatttatttatttaatatttcaacataagatgagtcctcctttacatggatcccatataacacatttcataatcttaattatgtgaaaaagtgaatgacacataggaagagttaatgtgtcctcttaattcagttaaaaaaactcttttctcaaactcttatttaaagtccattgatttctcacttgtaaattcctttagtacaccttcaaatgcatcttaacttttttttttttttttttttacattataagctaaatttttttaggattataaatattaaattcattctttatttactcatggcaagggaatagacttcaagttggttgtatatttgaagagattgtgaatatgcatttagaatctagtaattcaagtgtaagaaggttgaagtctttgaccttaaaagtcttaacagcaatgggactcccactcggttaggagtttgaggagagtggacataagtggattgtgaaaccactataaaagaatttgtatatctcttccttttatcttttacttaattattgtcttgtttagcatttcttgttccttttaccattaattggttattttttaaaaagtttttaacacccaattcactctccctcttttgggtgatttactttacttatttaaattggtcattttctaattctttttcctttttcttttcttttcttttttttttttcttttttttttttttttttttttttttttgcttcatttttgtagatgagataatcaaacctaatatagtttggttctcacacttgtagcatatgaagtccatcttctctttacctacattagagtattcctttttttggaagtccttccttagatagaattttcttcctttatatttttcaagtatgatgaacttcttaaactttcttgtgataagtgcaaggtcctcattttctctactagtccttttttatttatttataaatagtgaagctttaagatctaagtttttctttctcttgtctctctcttatggatggccctttattgtgatttcataagttatcaatgacccaatcaatttctccaaaggaagtttagtaaagtccttagcttcatggattagtgtaacctcgaccactcattactgagaaagagatctcaaaatcttcacaatcttctctaattagtaattgcatacaaatttctgaatgttttttttttttttttatagggaaaagaaatggagcccctattaatccaatggtatgttgttggattatgaagtctaaatcaattttgttgcatttcacaagaaatatcatgatcgagctccttactaacctcataaggatcaagctatccagtcaacttgtgatggtttaaagggttagtgcccctttgaatttgttttttatatttgatgaatgaagagtttgttcttattatatatttagcccttttatgatttagagttttgtttttagggagtacggtcacaaagagtaagagtcttcactattgtaattcttctctctcgtttgattagtggattcttgagtgttgatacactctctagagggatcacattgattgtcaaaccacattaaaatctattgtcttttatttatttttgcttgtgtgtgtggtttggcaaaaatatgttacaaaaaaaaatttgttgaaagtttaatatgttggaaaacaactttacaagtacatagagatgtagaatttcaagcttcttttatgctcaagaagttcactatatcggtttatttctttaaataacatgtgtggaaaaataaatttgcaaattgctttaagtccttctatccatcaaagaagattttgtgatatatactttattttaaaaaaaagatgcaaaaatataattatctacatcatcgagaaaggtaagactaaaggacataatttaattattttcattgatcatacttcatgttatagttccaattcattatgtctttaatcaataagttaaagttttttaattatttttatacacttaaaggtcaaaagtactatttgcttaagttaaaattttacttacataaagtaatgcccgggtactagatttatcatgaaaatacataaaacaataaatatttcgagttcatatgatatggtttgaaatatgaaaggatgattttgcattttataaatattttctaatcagcccatgaaaacatgtttttcccaataagaatttgagatagtctccaatacctaaaatatacatttaaatttatttagaaataatctcaatacctaaaatatagatttcaatttatttcgaaatttatttggatcctccttggatatattcccattctaatcatctttcctttgatttcatcagtgccaccccacctgccagtaagtcgctttgctgtcctccgatgtgtgccatgtcatttgccaactttgatttttgccataacataaacaattccataatattgagaaaactggaaataatttctttaaaacagttagaaattaaatgattttctcttcctttttttttttttctaagaaaacttttttagatttctttcctttttttgttcgttttcctttttcttgaaaatacatttgataaaaaaaactatttttaaaaaaatgaaatttatatagtcttgttaaattttgatttttcactattgcaaaaaatgatttaataaaatttaattacaaaaattctacaaaatatatcacatggtatgagatatattattaaaaaaggattattatattatattattttattaatttttcttataattaattaaataagttactctaatataaaaaatatattcttctataataattcataattaaataaattaacaaaatatttataccatacttttaagataatatttatattcaaatatatataaaataatattttatttatattaatatttttatagagataatgattttaaaggctgatgtgtgaaatgtatatgttcatcctcttgtagttttatcacattggggtcaccacatatatagaaaataaaaataaaaaataaaaccttatttcatggtaaaaaaataatcctttgagtttattaatgtcctaaattttgttctatatacaaagggagtgaagtgctgaaccatgaagccacagctcttcatggcaattcaaggctcattgtttctgactctactaatcctcgttagtgtattgacttggactgagccagtggttgctacct

SEQ ID NO: 10605 - DNA, 8790 bp, Vitis vinifera
  Intron number 3 from transcript GSVIVT01028817001 (locus G SVIVG01028817001) derived from phytozome v7.0 (chr-ID chr1 6; pos 18446931 to 18455720 reverse strand)
ggttctctaatttggctcggttcattgcacttgcgcaacaaccatctctccggaaattatccacttccattgaaaaattgctctagtctagtggttctagaccttagtaagaatgaattcactgggacgataccagcatggatggggaacttcaatggaaagttcattgaaatattaccaggggatggtgagattacatatacaccgggtctaatggttcttgtccttcattcaaataagttcaatggaagtattcctcttgaactttgccaccttcattcccttcaaatcctggacttgggaaacaacaatctctccggaaccattcccagatgctttggtaatttcagcagcatgatcaaacaatcgaattcaagttccccctttccttttcataatgaacgttattttgaatcgggatcaaccgacacagcaacactggttatgaaaggagtagagtacgagtacagcaatattcttggcctcctagctggcatggacctctcaagcaataagttatctggtgagatcccagaagaactcacaggtctccatggtttggtattcttgaacctgtctaataaccatctccaagggaagattcctgtgaagattggggccatgacatcaatggagtctcttgatctctccatgaacagactttctggtgttattcctcaaggtatggcaaaaatatcatttttgagccatttaaatttgtcatacaacaatttgcgtacatgagatctgaaggagacaaatttgtcattcaacggaactgaaggagacaaattgataagatcaactgctgtcctcatttcctcaccccaaaaagatcttggcaatttagaatgtgagagcaaacatctgactctctcaagaatggtgcgattcattctctctgcaaccccgttctgttgaggtgtcttttttactgtcttttcgtgcctgatgccatgattagtgcaatactgatcaaatggtccaatatattcaccaccattatccgagcggacacatttcaactgtctaccagtttctctttcaaccttggcctgaaaatgcttaaacacatctagaacttgatctttagttttcagtgtataagcccaaacttttctagagtgatcatcaataaaagtgacaaagtattgagcaccaccaagtgtcctaactttcaaaggaccacacacatcagaatgtatcaaatctagaacatgagattttctaaatgcaatgtttctacggaatgatattctattttgtttaccatggaaacaatgaacacatgttttcaaaggcgtaccttttatccccgctagaagctctttcttggataaaacttgcaatcctttctcactcatatgtccaagccttctatgccataaatcggtggatgagtcattctctaaggtattcacaacacacttgcagatttttgcaaaaatatcagttccgttaaattgagccgaatatccggtacatgcctcacatctctaagcaacaatttgcatccagtatttgtttccaagcaaatgtcacccatgccgacaatttttgacacatcttcatttcccatacggacattcccaaaatcaccttgcgagtaagaagtaaagaaatcagcccgcgaagtaacatgaaatgaagctccagaatcaattacccaatccgtctcttggccaatcaaattaacgctaacatcatcacgaataatcatgagttcaccatcggtaactacagctgtatcattttgctttttctctgaatttttctctttgttctgctccttgaacttgagttttctgcactcccgcttcatgtgccctttcttgtgacaataatagcactcaacatctttctttgaaatcgagcttgaacgacctctagatttatcacggttgtgcgaagccttactcttactcctgcctctccctcgattttctatcacaagtgcctcggagtgagaagaacctgatgattttcttcttgtctcttcattcaacaggctgctagtaacttgactcattgttaccactccatcaggtgtggagttactaactgtgaccaccaaagtttcccagctttcaggaagtgaactaagaagtaacaaagcttgcaactcatcatcaaaggtaattttcatggcggccaattgattcacaatgctcttaatctcattcaaatgctctgcaataggagtaccctccttatatttagaattcacaagctttcgaaataaaaaagctttattcacggccgtctttctatcataaagactctccaatttggtccaaagaccatgtgctgaattttctgtagagacatgatgaaagacactatcatcaatccattgccgaataaaaccgacagcttttcggtctagctttttccactcgtcatctttcatcccttccggtttgccactatcaccctctatgggtccattcaaatctttacaaaacaaaaggtcttccattttagttttccaagtcacccaatttgtgccattgaaactaaccatacgcccaacattgccgtccataattcacacacacaaatataacgaatcggaatcgaattaaccaacagctctgataccagatgttgaaaaaaaactaggctttcccacaagtgtaaatcaatggaagcaatataaatagaataacagaaaataaatgagcacacaagatttacgtggttccctcaaataacttgaggtacgtccacgacgaccggtaggtcagtttcttccactatcaccaaaagagtttacaaagtggccaaaaggcataagccttacaaacacaccaaggtgtaaattacaagaggaaaaatacctcacaaaagtaaaccaaatctccaagaacaaaccgcaagaaaccccaaatatcaagtgaaggaacgttacccacttgaagaacaaacttgctgattgtgtagcaccaaaaaaaaatagagaagaagaaggctgattttctttttattttgtttgaaccaaaaaggtatcccaaaagtcttctttccgaccaagataatgaacccaaggaaaagacaaaaagacttgtagctttttctttccttgaagacttcaaaccaatcttgaatatgccaagagtcatgtgctaaccaaggtgttggccaaaaatagcaaaaccatatttagtaaatttaagagtcccacaaagaagggaaacccaacactcatatcctaactttccttttgtgactattaatttcggttgctcagataaatctaacatggagttttcatgactcaaaaacaccaaaaaaataaatatttggatagaagtgtcagtctaacacatctaatcaagagaaatgttaatcactgcaaacagatctcatgtcattgtatatgtaagagaagcaatctgtgaaataaaattttgagttattgcaaaacccataaaatgtttctttcttcctagatgaaatccgccccaggtggttccttgatttaaaatttttattttctttcctagcctttactcacttttcttggcaaccacagctgaagtatcttcagaggtaggtgagttcagcattttcaagctacttccacaatgataatgaaattcactacctcattgtcgctttatactttcaatattcatatttgtttcaactgctcacatattcagtcttatcatcttgactccattttctagtctttcattcaccatttattatccatttgtggcttatagcttggcatcattaataaaaattatatagcttttgcacttggacttgtcttttttcatgaagttgctgcctcactgcaacctcaagtactttgcgatcttactgtaatttactccattcagtttccacaaagttgattgccatggtttgttgtagcagttccttaaacctttgcaatttatataatcattttatcacccaagggtctcattctgaacgtttgcttgtcaaagacgaaatcctaatgccagataaaaggattataacaatgccaagaactctgaaagtttctttaaaaccagctatgattaataattaacagactcatgtatgccaatcaccttgaagacataaatggttgcaaatttcctggtagacttcacgaaaagtaaagaatcagacatgacatgagaatctaacctaagcataagtttgccatgggaatttagggtggacagctcagctacagccacgtccatacaaaagcatgggtggccttagtatctcctaaagatatgaccctaagaaggccattcgaatgcctaggcttcgatgttatgaacaacaaggatgaacatgaggcactcttaacaaggttgaggctcgctcagagcgtagaggccaaggcactaaacgtatagggacatttgaagcacaaggaataaccatggaaaaaaggatttaagtgcacattgccaattattttttattttatcaaacattaccttaatctttcacattgctaaatattctctagaatcattatccattcgaaaaaggtacatgaagtaatggaaggaaaaataaagacacatttaacagtgagatatgaaatacaattctggataaatttataagcaaatcacaaatgatattgaacctatagcaattgtttcatgacaaaagttctgtagtttattatcaccacattaattaacaactcctttcagttcttgttagaaagaccctacaaccatgtcttaggcatattgagggagaaaaggggccgacttatgtaaacaccattactcaacaggagaaaccaagttccttttgtggctttggccggccggctgaattgaatttaaaactaatccctcaagttcccaggcttttcatggcttgaccttcaacttcaatttctctctttactctaaacttttaattttatgagtctgaacttcgttatcaaatgcattgacaacgggaattccacattggcgtgctgagtaaaatttcatttctttcaacttctgcaagcagttctttaaagccatctcatttcatagcctctgggtcaagctcatgccctcactacctacgggcaaagatcattttccactgtgttgaaggaaatatatatatatatatatatatatttcatttctttcaacttttgcaagcagttctttaaagccatctcatttcatagcctttgggtcaagctcatgccctcactacctatgggcaaagatcattgtccactgtgttgaaggaaatatatatatatatatatatatatatatatatatattgcattgacaacaggaattccacattttgagctttagattccccgttggcgtgctgcttaaaatttcatttctttcaatttctgcatgcagtttttaaaagccatcccattttcatagcttatgggtcaagctcatgcctcaccacctacgggcaaagatcattgtccactgtgtatatacacattggcgtgttgcttaaaatttcatttctttcaatttctgcatgcagttttttaaaagccatctcattttcatagcctatgggtcaagctcatgcctcaccacctacgggcaaagatcattgtccactgtgtctatacacattggcgtgttgcttaaaatttcatttctttcaatttctgcatgcagttttttaaagccatctcattttcaccacctacgggcaaagatcattgtccactgtgtatatacacattggcgtgttgcttaaaatttcatttctttcaatttctgcatgcagttttttaaaagccatctcattttcatagcctatgggtcaagctcgtgccctcactacctacaggccaattgtctgcttctgctgttgggtagcgagaagagtcaatagatgactttttttttttcattatttgttcctaactatgtggaaagttgacccaaaaaattaaaacatataatttggattattatgtatgcaaatagaggaatagatgtcctctaatgagatatacatgtgaagttctatacagatatatatatatatattatatctttgattgccaaattttcttcatggaaatgaagatgaaaatacatctataaaatgcaagcaagttttaatgggcttttaagtagctgtgattaaaggttgcacgatcttctttttgctgctaatggctatacttatcactgttgccaatagcttcttttatttagtgagaaaaaatgatgatcctaaaactacttcgtgtataaggcatattgaatgaggagatacaaatttatgtatcctcggagaaatagaaattacattttcatttgaaaaattgcatttttcttttaattaacttagaaaacccagaagattttgtcatttgcctctttgctagtcaagcacgaccaagcctaattgcaaacagaccatattcccatgacattggtttttactagttgggcaatatggtagaggaaatcacaaagaggacaagaccatatgatcatcttttcttcttttcatggaaaattttgtcacggtcactctcattacttgcaagtcaaccacggtaagagagagtcatccttctactaccaaaaataatccttgatattttaaaatttttcacacggagaaagctaaggtcatgatactgttataggtataacattaatgtgtaacattatatttatgcgtggtacatactacatgtatctctacttttataaagtgatttttactctttaatataaaatgtatgataatttcatcatggtccaatagtagggatgacaatggaataggtttttttgaatacctacccatccctccccaaataggaagagattgggataaagataaatgggttcaagacaagtttgtgaagttttaaaaaccaagatgggtttggggcgagtttaggtacaactttttcccactctaccccaccccaattatatgtaattctaaataaaaaaattattttcgttttttgttttttttcaaaattttttaacatacataaaatattacttttcaaaattataaatatttataatatttctttattgatagataatatttaaaatttttaaaataaaaaataaatgaggcatatggggattattggaatttcctataccaattctacccaaccctatttaattttattattttattttttttagcaaggatgagaatagatataaataaatgggatgagatttggatgagagtgatccatcttgctcctttaccatccttatccaatggtttctagaaactaatgtcttatactttctcatttattgccctctttaaatgtttttttttttttttttttttttttttttgtggggatgagccaaaatagatataaataaatgggatgaggttgggatggagataatccatcctgaactcatctcgttgccatccctatccaatgttttctaaaaactaatgtcttgtactttcttatatatacatgtattaaccatcatttgtatgaaatgtttttttaattatttatgcaatgaacttattctaaaattttaagatgaagtttggttcctaaaacatgctaattaaataaaagagaaaaatataagagaaaatgatttacatatatttgaataacatgaaaaatgataaaaataaaatactaataagattctccttaaataaaaattatttagtttgtaaaaatatcaaagccagagtgaactccaaccgacaagttattggagacaagatcggcattatatatttaataaaatatataattatgtcatctttaatagtattggattttacttaaaattgcagaacatggaaatacttttctaaacttacatcatagcaagtgtaattatgccatttcatgtattttcttttccacgaaacctatccgtatacacagctagtccacactccacagctatccttttttaacacaataaattgacctatcgacatcagaaatttttagaataaggcaacactatagtcttgtcggccatgtctctaatgactataaatattagataatccttgaaacccttcacattgtgtgctctaaaatcatctcgcctaatggagttgtacatgagaggtttagtggttctcttgctctattttcttttcactacaatcacaaagttcggtttttgtgctgggcatagtccaaaggctctttgcagagaagaagaaagagaagctctttagagcttcaaaagaggcattcatgatccttcaaatagactctcttcttgggtcagtgaagagtgttgtaattgggaaggagttcgttgtcacaacacaacaggacatgttctcaagctcaacctccgacgggatctttatccagatcatggttctctgggtggtgagataagtagttctttgttggacttgaagcatcttcgatacttggacttgagctgtaattactttgggttccttaatattccaaaattctttggtgccctctccaatttaagatatcttaacctctctagtgcagattttggtggtgttattcctcatcaactcggaaatttatccaagttgcattatcttgacattgggaattcttatttgaatgctgaggatcttgagtggatttttggtcttaccttcctagagttccttgacatgacaggtgtgaacctaagcaaagcatcaaattggttacaggtaatgaacaagttccattctttatctgtgttgcgcttgtcgacgtgtgggcttcaaactattgaccctctcccacatgtcaatttttcatctctagtcatccttgacctttcaaataattattttatttct

SEQ ID NO: 10606 - DNA, 6510 bp, Vitis vinifera
  Intron number 30 from transcript GSVIVT01014769001 (locus GSVIVG01014769001) derived from phytozome v7.0 (chr-ID chr 19; pos 9470531 to 9477040)
tacaggtatgctattcctgcatgagtttctcatgcatcagatcctttttcacagtgtgaggataatgattttcgacatttaacctgctgttggtttctgtatgtgcaaaattgtatttgaaaaccactccttaaatttgaagatctatttatatcatgtatgtatgtcataaatgttcagttgaagaatagggtttcacgggaataattttctttcattgagattattcttttatagagtttacaacatatacaaatccttcaaattaggaaattaaatcactgattaaaaggaaagaataactcctaacaattactttcctaaaaatacaaagattgacaactaataaataatttacagctttacaaagttatttctttccatatcagtttcggttttccaacactccccctcaagctggcttaaagatatcttccatagccaacttgccaactagaaaatcgaattgcctcttgtgtaatcctttggtgaatacatcagccacttgttcctcagtaggaatataggtcatacagaccaatccgttgtctatcttctctttaatgaaatgtttgtccacttccacatgtttggtgcggtcatggagaaccagattgtgagctactgaaattgctgccttgttgtcacaatacaacttcataggagatgaacttgtcatctttaactcttccagtaatcttcttatccacataatctcacaaataccatgagctacaactctaaactcagcctcaacactacttctagcaaccacgttttgttttttacttcgccacgtaaccaagttgccacctacaaatgaacagtacctagaggtggaccttcgatccactatgcttccaacccaatctgcatcggtgtaggtttcaatttgtaggtgtcctcgtgacttgaacaaaagacctttacctggtgtcccctttagataccttaaaatcctgtaaacaacttcaaaatgctctagtccaggcgcatgcataaactgactaaccatactcactgagaatgctatgtcagggcgtgtatgggattggtaaatcaatctcccaacaagtctctgataacgatcccggtccttcacattcttggcttttgtaggttgcagttttacattaagctctataggtgtttcagcaggcttacatcctaacatacctatctcatcaagaagatcaagaacatacttccgttgatttacaaagataccttctttggacctagcaaactccatcccaagaaagtattttaatgcccccaggtccttaatctcaaattcctcagcaagtttcccctttagcttctctagttcattgcaatcatccccagttaacacaatatcatcaacatacacaattaagatgactattttaccttcatttgaatgtttgtagaacatcgtgtgatcaacttgactttgagtatatacataatgctttattactttgccaaagcgctcaaaccaagctctaggtgactgcttaagtccgtataaggacttcttcaatttgcacactttcccaactccaaaactttcttcaaaacctggtggagaactcatgaacacttcttcctctaggtctccattaagaaagacatttttaatatccaattggtgtaagggccaattggaatttactgcaagggacaaaaaaactctaatcgagtttattttagctacgggggcgaaagtctcttggtagtctatcccataggtttgagtaaaaccctttgccacaagtctgactttgtatctctcaacacttccatctgctttactctttattgtaaacacccatttgcaccctacaactttcttttcccttagtaaatctacaacctcccaagtgccattcttttttcaggcattcatttcctcaaacactgccaatttccaactcggttcatctagtgcttcttgaatatttctaggtaccacaagttttgaaatatttgtagtgaatgctctatagttgtcagaaaggttactataggagatatatttggcaatgggatgtctagtgcaggctcgggtcccctttctaagagcaatagggagatcaaggttaaggtcctgtgcaggaacaattggggctaatcctaaaccgggttcgggtgcagatatttctggacttggaccaaagtgtgatggtaaacttagatcagtaacagaagaagaagaagcatgtatatgagtaggaatagaaggagggttacctgagacatttagagagccatggcccaaggctttcggttgaccatgtgctgggatgatcagctggtctttacttcttctagagacttttttccttgaataaaccacaggctcaagattgtttctatttttttttcattcgtagtatttcttcttctgatagaccaatttcagatttggattcggtagacttagtttccttattttctttttcaagagagatatcaagaattacactaggtaaaggttcaacaatttcccaaaaatttggttacactaatttctccccctgaagtaaatttttggtaaaatatgagacattttccataaagaaaacatccatagttgtgtaaaaacgatttgtaaggggattaaaacatttgtaaccctttttattaggagtatatcctacaaaaacacatttttatgctcttgggtctaacttagatcttgaccttgaaatgataaatggtcaaccttttgaaataacactggaaataaatgttttaaataagagaaactaggatggcctaatctgcaatgtcaaaccattatttgatcacgaacagaaagagaactaatactacttagtccttgagcaattttattactaggtaaattatcctcgaaataatagagaccattgatcatcctagcactgccaatcgccttccctgagctctggtcctgaaaaatacaatgggattcatagaagataacacaacaattagaatctctagataatttgctaacagacaagagattacaagtaagtttaggaacatggtgaacagatttaagatctatttcctcagagatttttattagaccttttcttgcattaggtgagaaattaccatcagctatccgaacctttttatttccaggacacggtgaataggattcaaacatgtttgaggaattggtcatgtggtcagatgctccagaatcgattatccatggagtagatttaaaacaacaagatagagcatataattcattacctgtgtgtgccaaagaaacactagaagtaccggatgtcaagttggatttcagcagcgcaagaagatgctccatttgctcagtggtgaaggggctggtctcagcctcattagcagtaggaataatggctcggcctggcttgtcacctgtttttcctttccaatttgcaagtttcccatggattttccaacagttctcacgagtatggcgaggtttgttgcaaaaatcacaccaaacccgtggtctttcatctgatttacgttgaaacgcagcagctttattatagcctccacccgtggtaaccaaggctgaaccttcaatagcaactccaggtcccttcttgcccaacatcacattcctccgactctcttctcttctaacttctgaaaaaacttcaccaattgaaggcaggggttgtcttccaatgattctcccccttacctcatcaaactcgacattaaggccagccaagaacttgaagatccgattgtcttccatggtcttcttatgatgaagtccatcctcggcagatttccactcataggtgttgaagaggtcaaggtcttgctaggtccgcttcaaggagttgaagtactttgtgacgttgtcctccccttgtcgtatctcaccaagtttgagggttaattcaaagatccgtgattgattccctaaatcagaatacatttgatttacattctcccaaagctcttgtgctgttggatagcacatgtaattagagctaatgtcttcttccatagaattcacaagccatgtcatcaccatggaattctcagcatcccatatagcatagttcggatcatccactgcaggagccttcttttcacccgtcaggtagcccatctttcctcgtcctttgatgtacatccaaactgattgagaccatctcagaaagttgtcaccattcaagcgaattgtggtgatttggacagagtgagattccgaggtggtaggactgatttttgacgaatcagtgataatgggattgttcagagaaggttgaggaatagtagtggactcgtttgaaatatctgacatggtttcagagaacagggattgaaagagaggaagaaaaaggatttcggtaagcaaattgctagctttgataccaagttgaagaatagggtttcacgggaataattttctttcattgagattattcttttatagagtttacaacatatacaaatccttcaaattaggaaactaaatcactgattgaaaggaaagaataactcctaacaattactttcctaaaaatacaaagattgacaactaataaataatttacagctttacaaaattatttctttccatatcagttttggttttccaacatgttcatttatagaggaattctgaggagcacatcccaagtacaggtgaagcacttacaatactcaaaatgaaaaagagaaaaaaataagaagaataaagaaaggaaaaaaagcctctcttttctaacggcaatacacattagtgatgaatctaacaaaaagacctactcccctcagttatagggtcaaccatttccataatgaatggtttcaagaagatcctttagtttccattgtagtaattccacccacctctcaaatgttcttctattaccctctttacaagtacaacacaccaaacaaagtgctgcacttgatgtttttcttgacaaacttgctatggtagctagctggaaccccatgcacatcctgagaagaatctacacaactcaaaagagtataaaaaatcatggaccaaagattgtgggtcatcagccagttgaccaggaggtgattggttgtttccttatccctttttacagacacaaaactactttggaggacccttcctctcctcaccagctgatcagtgctcaggatcctttcccaggtggccatccaaatgaagaatgccactttgaaaggagcaatgctgcctcaaacatcatttccccaaaactaaacttcttcattctccatcaacaccttgaaaaattatttaattgtaattattctctctttagcacatttccatcaaactgcatccaaaaaagagtccatgtcttcgaatttctcatcttggaaattcttgatgaattttgggttctgacagcctcctgtcttagagcatactccgccaccatatcctatccttttttcacaatcctaaatatatccaagaaagttgccttcaagaaggctcctcatggacatcatgccaaaatttcaatcttagctcatctcctatttgtagaatatatgcttagagatcatttcccactctcctaatcctcattagctgcccttcagcctcaagcctccaaagcattcccaaacagtgccttattaagcttctgtcctcatataacctaaactctctcctctcctcctcattctccaaaagcactcatacataccctcattttggagaatataccaccttttgtcaatccctcattaccacacagatgaacaggaaactccattgtggcattgtgtgttttccaaattctggtctcattgagatttggatggtaaggtttatattgagtatgtcagtgagtctgaaagaggttctttgtatcagtgtgaatctccttccttggaagaaatgactaaggtcatgcttgacaactgttttttagaatggttttttgttctctagaacaaaaaatgggaataacatgtttaacaacaagaaaattgttttttgctttctgtttttaaaaataaaaaacaaggtatttttcgagaacattttttagttgtttttaattgttttcacttattttctaaggtttgttttaaaaaataattatataaacatggagaatgattaaacataaaacactagatataaaaattatttttaaaacatatttaaaaacattaaaaagaggttacaaacatttcaatttctcaaatagacttttgttctacaaaatattcaagaacaattttcaaaaattgcttttcaaaattgttttaaaaaacgttcatcaaatagggcctaaatttccttgaaaaaaatgattaaatttcctttgttgaaaaaaatgacttttttagtcacacatatcttgcttccttccttaccttgtaactctatttgatatattattatgattatagatttattttatggatgttaattctagcatgtagttttaagaatatttttgttataatgtggatcaaataatgctgtactcactttttatgacaggcacactttcattctctcaagggtggagaaacaac

SEQ ID NO: 10607 - DNA, 6677 bp, Vitis vinifera
  Intron number 2 from transcript GSVIVT01020166001 (locus G SVIVG01020166001) derived from phytozome v7.0 (chr-ID chr1 ; pos 9511255 to 9517931)
cggttgtagcggtctgtgcacaggtactgcagccttaataattattgctgggtcttgtgttatttccgcagttatgcattattatcctgcactgtgctcggccacattgatgggcttagatggaatcagtttttctctactcggtgggtagcatgaatttgtgattgttcctctttctatttctttttattacttattcatttatttatttattgcacttgggtatgaattcattgtcttgaagtgtttgtgggaaaagaaattagaatggcttcattttcttatgggtttaaagttaaacccatgctaattaagggagcgatttcaaacataacctatttgagaaaatgtgtaactgaagatatgttttgcttaatattataggtatggatgaacaggtcgggtttattctgaaattcgtctcaacttctcaactaacttcttatgaattcatcacaagctcatcctgcatccatttacattggtttcatctatgtagaacagacaatattagaatcctgaaaaattagaatatgcacaagctgatgacagagttataaaattttctatttgaattttatataataacagttataatatattggaagatgaaactcaacagatataatacataaaattgtattatgtatacttcttcttcttcttcttcgtcttctcattgttatcttttcgccacagccatattgttttttctgtatagttagatgttggcaatggtcattggctcattgttgtcttttctctacagccatattgcactcaggagaagtgtccaactagtgtgtatgtttgcatttcctaggaatgtcattaaggtaggagttaggacttgtgtctgggtcaatattatgagtttaattatcttttattttcttataacttactaagttcatcatattataaacctgtttggaagtgattatgtttaaaatgctttttgtttgtagcgctttcatttagtaatgcttctattaagagtgcatttggtactaattttagaaagtgtttttggcatttctagtacttggaaatttttatttttcaagtattaaaaatactaaaaacactttctaaaattactaccaaacgcactctaaaaatattttcaataaaaaacacttagtgtttggatataaatcaaagtttttgataatgtattatattacaaaaatattcccaaatgggctctaagtattactatattggtctttatcaaccattttcttgtaactaaggtctaggcttgtgcttagtttatatatcataggagtttgttaaaggctgttagtttagcctataagctagagttgcaatttacttactacaagaatatcaattgaaattcgggcttatcagatctttctaggagatatggaaagacaacttatcgtacaacccattagtgactacctaattgtgaatcatgacctagcaacaacacttggccttgaagacagaatgctacatctccctaaataattaagcaactaataacccctatgggaaacctatagctgacaagtgttattgttgtagtcaatcgggggattgctccaatgtgtgtccatttaggggatgcttgatatggtggaggctgcgaagaaaaatatgaattcaagtgtaaacaacaagacaaataaaacgtgttaaaggggccaaagtagatgaatgtactatacaaagatttaggctatgagaaagaaggtaatcgtcaatgccacaatatttttagggtaagatgcaatgttttaaaaatcagattgaaccgactggatgaggttcaacttttgactagtcccttttctagttcgccagcatattggattgttttcttagttaaatcggtgaatcagctggttgaaccgactgatcttgcagattggatagttttgtaaagtgatttttggaaaaatcaactatcaagtgattttccatggtgattttctagatcattatatgtgattttcaaaagttgatcaaacacctaatttcacaagacaatactttaatcattaaaaagcacctttaaccctctcgaaaacattcccaaatgggctctaagtattattttactggtctttatcaaccattttcttgtaactagggtctgggcttgtgcttagtttccataccatatgaagtttgttaaaggttgttattttagcctataagctagagttgcagtttgcttaccacaggaatatcaattgaaattcaggcttattagatctttctaggagacgaggatagacaacttatcatacaataaaacctactagcgaccacctaattgtgaatttggacatagaagcaacacttggcccttaagatagaatgctccatctccttaaataattaagcaactaataatccctatggcaaacctataggttgcaagtgttatagctttagtcaattaggggattgctctaatgtgtgcccatttagggaatggatgatatggtggaggctacaaaaaaaaaagaggagtttgagtgtggacaacaaggtaaataaaaggtgttaaaggagccaaagtagatgaatgtattgtacaaagatttaggccatgagaaagaagttaatcgttaatgccacaatatttttaaggcaaaatgcaagacaagactagtcgtgcagggatttacttagacttatggagtggattattaacagacctttgcttatgttgcaacactcaataccataagggttctccaatgtcttgtagcaaatctagactaaccactacaccaattatatattaagaatccttttttaaatggagaattggatgaggaggtgaacatggacctaccattgggctttgaggagatgggaagttctaacaaggtatgtagactcagaaagccactttatagtttggaacaatcagcaagagcatggtttgatagatttaggaaagcaatcaagagccacgatttcacccaagcccaagcagatcataccttattatttaaatattcttaggatggtaagatcactatcctaatagtcgatgttgatgatatcatacttacaggaggtaatatgagtgagaaagaaagattgaagtgaattcttgcaaaagaatttgaggtcaaggaattaggaaagctgaaatacttttttgaaataaaggtcgctaagagcaaacaaggaattttggtctcatagagaaagtacactcttgacctctttgaaggaaattaggagtaaactagtagaagcacccatggagctaaactacaagtttggacaaaaatgaaggagggacacccgtggataaggataggtatcaaaggctagttggtaagcttatctacctagcacatactagactcgacttagctttcgttgtaagtgtgacaagccagtgtatgcatgcaccttgtgaggaacttttagagccaatgaatagaatatcgaggtacttgaagaagattgttttttagatattgaggtaagtgtggcaggctagtgtatgaatatgagaatagtgaaaaatttagaaagactagatacttttttcaacaatgatgatttttcaagtggacatgattaatatagacacaattattagggtgttgatgagcacatgcgaactttggatgtaggatcaagggagcatttttgagtagacgatggatcatatcatagattctaccagtacttcaagtagaaactattatgatccaattctaaggatgcatcccaaggcatattcagatactatgatagatatgataaatcttcaagtaatagtagcattgggtattgaggttttggatactattatcatggtgttgaacccaaacaaccttcaaagttatatttctgattggatcatctagccaatcatttcaactaacaaatttgaactagggacaattcctttcaaccatattcttactgtggaaactatcatcccaatttatacactcgttgtaggaatgatgatgatgatgattttgagcccccatgtcatttaatgtagaattgactatagaattgcatgccttttagtaaaaatttcattgaatttgaaataattttgaatccttaatattatcataaataactttgaatgcatacttttataactatttagacattaataaatatgatgcaagtttgttttattaattttctgagctcatttaaatgcacctttttttttcataattttcacaacttttttataattttttgagctttttaactagcttattgtgcatattgctcaatattgatatgagatattgagattgatacaccttttgacctcctaagttaatgaccaagaccatgaacttgaaccatgttgttaactggcctacaacccttcttttttcctacattatttcctttgcttcttgtgttcatctagtttcatcctttcgcttatggctagaagatcgttttgaccaaaatcattgtgttatatgatcagacatctgtggacataatcatgctgaagtaatgtatagaagtaaaaaggagtgagatttcgtttgattgtggtgtttatgtctttgtttaggtatacagtcattaggactagagagttagagttgttcatctgggtagaggtggctagataaggagaaaaaatttgattccttaaggggaggattttagggtcaccttgtgcatgaaacttcttggtagctgcaaattttctgatctaatttaattgcctgcctgaaattgtagcacgtaaatatacttggcctttagaactcattagaggcaaaagctatatctgacttgccaaatggtagaacactgaactttatgcatgttctcatctccaggttcttgagctatacatgagatatttatggcttgacatggtatgagccgtaaaagtcaataatgcaagcccatcaaaaaaaaaaaaaaggtcaataatgcaaaattctgcagaataactctggacaaggtctcaacatagatgaccaaatggtttgtgctatgagggtgagcgaaaaaacttaagtgcaatgcaggtggagaatgcaaatctagaagctgtcctgataggtatgcttaggtatatatgagggtgttgctgtggattcaggaaagaaaggatggtaagtgatctgacctggaggcaaagtgactgaatactgagtctagatggaagctggtatatatatcagggtttggtatccaacatttttcttgtcctaaatgttccagagttgagagaaggaaaatgttcttaaaattgcgttttctgggaggactcattctcactgctagttcaattataaagtctttgtataggagaaaagaagctgatctttgtgatcaatcaattaatctaagtggttgataatttaattgttagatacactgactgtaaggtttcagttttcaggattgataagtccatattagatgcagaatgcagatgcttggacatacatctaaggactggaaaactcaaattcccttcatttatccattatgaaattgatagttgcttggacttgtctgaagatttcagcctaggcacaattattgataaaatttactctgcattggaaaataactcacattttcttcagatagccacgtgatctaccagtcattgacagttacacaaggtcacattgccttgactatatgtttattcatgttatcatgaaaaatattcccttgtgtcttggagtatctggaacaagtggttaattatagtatcctcctagggatggaattgatactgtatttgtgacatcgatttattggcaggaacataatagaggattgagttgttaaaaggaactcctgttcaaaattccctggacgataatcagtagagaaaaaaaaaaaaacagattttgtatcttccttttgtagttacaggcctacacttgttaaaaatgactttgaccatatgtgggagagaaaaaaaaatgcttgttttttatcttcccagtagttacaatttgaaatcattttttttttttctccccattacatccacattatctcttaaggctataggacaatggggttcaacatcagggcatgaaccttggctcaatccttcaggggtcactgtaatggacaatgatattttaggatacaaaataaacaaacaggtgtgtgggcttgcaacgtggtgttcatcatcatcatcatcatccaaacattatctgattatcaaactgctttgtggtattcttattcgagaatgaagaatgttaaaatgaccaatttagtcttctggttaaccaacctgcttgatctagttcgtgccatcttttttcttctcttttcttaatggaataattcccttcctagttccagttggttagggtttccaaatgctaatttattatgaagatctgtactcatcttccccttcttatctacttgacttgaaaacagtgcaattattgacttgcaaaaagaaatatctagggctcacaagaagacgagcactatcacctagacggtctcgatcaaattgttatgaatttttgtgcctgttttgccatgactcagatcacctgtatgtgtggcgctttaaattcatactctaaatattcaaatttcaaatatgaatccttgaagaacattgttgctaaccagattgtagcgtgaaaaccagatatttagtgaattcttgcacaaggagt

SEQ ID NO: 10608 - DNA, 1306 bp, Vitis vinifera
  Intron number 3 from transcript GSVIVT01038147001 (locus G SVIVG01038147001) derived from phytozome v7.0 (chr-ID chr5 ; pos 23889829 to 23891134)
cttggtgggttcaggtaattctccattttttttcttttctttggtaaatttccttttgttcttggggcagatgctggattcagcagctagaattgtgagttttgtgtggaagaaagttactgtttctgtgatatttcctgggtattttggctcaaaattccacctttttttagaaggaaactttgggatttgtaaaataaattcagtttattatcttctgaagaaagcttcaaaggtgtctgtgttctgtttttggatttaaaaatcaagtatgaagctcaagtttcttcacactcctccgtataaatataatatagtatgtatagggaacttgttttttgtttcctctatatttataactttggtggataacctagactagaggtgtggccttgattccaaaaaacccctggtgtgtgatttttcgggtcattggataatttttcgggtttttgataattaatcctataaccgagaaccgaatcaagaaaaatacaaaagggtctagatattgaggcaatcgcagaacaaaagggtgtagatggacaatccatcaaattattcttttcgggtaatatttgagttgataaataacctagactataggtgtggccttgattccaaaaaagagaaaagaaaaaatccagtaagccttgatgtgcgattttcgggttttcaatgaattcgaaaaaacaaatcaaaaacaatacaaaagggtctagatattgagatgatcacaaaacaaaaggattttagatattgagacaactcatttcattattcttttagtacaacacttgagttggtgaatatcctatagactagaggtgtggccttgattctgggaaaaaaacccattatgctttgttgtgtgatttttcagccttttgattaacccgaaaaccaaatcaagaactatatgaaagggtcttagatattgaggcaattcatctctttattcttatagtatgatacttgatctggtcaataacctagactagagctgtggccttgattcccaacatccttgtgagctttgttgcatggttttgtgggttttcgatcaagctggaaatgttcaatccaaaaaggtccagatattgagatgatcacaataaaaaagggtctagataccgagacagtttatctcattattcttttagtataataatgaagtagagcttcgtgtcaggaaaagttgagaaagatttttgtacgatttctgatattagtcaattttctgtttttgtagttgggtctgaggattcttatttgtttaatctgttttcaggttttccacggtgcg

SEQ ID NO: 10609 - DNA, 1852 bp, Vitis vinifera
  Intron number 13 from transcript GSVIVT01007916001 (locus GSVIVG01007916001) derived from phytozome v7.0 (chr-ID chr 17; pos 7575631 to 7577482 reverse strand)
cttcaggtctattaatcaatactttctgtttaattttggttagtcttaactcttcatctttcaatgaaatgattggagtatgaatagaactttcctctggatttgtttttgaagttcatcttttggattcctggcttagttcgaaaaagggttaacagttgtctagggtctatttggtaattgttttcaaaaatagttcaaaaaaatagtttttgagaacaatttttgaaaactgttctaatgtttctttaataattgcttttacctctaaaaaaaaaaaaactgttttctaatgttttatagaataaatgtttgtttgagacttgaaatgtttctaacctgtttttaatgttattaaatatgttttaaaaatcatttttatatctagtgcttcatttttaatcattttccatgtttatataattattttataaaataacccttaaaacataagtgaaaacaactaaaacaattaaaagatgtaatatgaaaacaccatgttttttgtttttaagaatggaaaatagaaaatagttttttgcttgtcaaatgtgtttctctgttttttgttcttaagaatagaaaactgttcttgaaaatagttgccaaataaggccctaaactttttcttttataagcttaaacattcctgatttcaagatgatttatcaagatttgctccatatctcaagtccgagtattccattttctccaagctgatgccgtcaaccttctcgttatttactctattcttgactagatgatttgaattttggtaagatgcaaacaattcgtataagaatttgtggactatttgtatagtgtagcttagatattgacttagaaagggtaaactttgcaaggaagctctatggttagctattctttatgattcaatatgctggattttcaagctactacttatccataaaataacgagtgtaacttaacaatgatgttatggtgtatgagtttaaatacaagaaatgatagaatcaaacaaatacgtgaataattgagaggaccatctccatccaagcagatatgttttaatcatgtgcaatgaatattggctcacaaacaagtgagaaagagtggtatcttttaaaaacctcgagtgattggctcttttcacagccaactaatctgcctcctgattttgcggtttaggtctatacaagtgaagaaggttccccatttctctggatatatgaatcattctccaataatgattctaagcaactctaatccacctggtaacctgagaaatgtgcatgagtcactctccaccatcagtttcctaatcccaaaggaagctcctctctaaaacctgcaagttagactctagtctagttctacagctattgactatcccaatcctagctggtatgataaggcagaaatagccttctccttatggtagttgaaaataccacttatagctatccaactcaggatacttaatgagcaccaccagccttttaatcgctcattgtgaggacagacccatttataataaagaggaatatgcctctggcatcctgaacaaactgctttctgatccctgctaataaaactcaaggggatagctaacagaactccttggtcctgaatccaaagaaggggtgaaacaatggaatctattcctcaattttcatcctatattcttatatatgaaaatactataacttcttccatctagatgacccatacagtgtccaatacttgatattttaaatgtaagcaaaactgaaatggttcaaaatcaaagttgtgactgatttgtatgtatatgccgctttccacttattttgtaggccgaggatcgagctcataggcgaggtcaaaccaa

SEQ ID NO: 10610 - DNA, 11062 bp, Vitis vinifera
  Intron number 4 from transcript GSVIVT01037219001 (locus G SVIVG01037219001) derived from phytozome v7.0 (chr-ID chr1 8; pos 27835186 to 27846247 reverse strand)
gtataattttacttaaggttcacacacatataagagtgttgttattaaactaacttttttttttcctcgaattttatagggtgtgtaagacttgagaatcttcctggggacattcataagttgaaacaccttttcatacttcattgcagtggctgttcacaactaactagttttccaaaaatcaagcgcagtattggaaaactagagaggcttagtttagataatacagctataaaagagctaccatcatcgattgaacttctagaaggtcttcgcaacttgtatttggataattgtaaaaaccttgaaggtctcccgaacagcatttgtaatttgagatttcttgaagttctaagtcttgaaggctgttcaaaacttgacagattgccggaggacctggagagaatgccatgtctagaggttctttctttaaattcgctcagttgtcaattgccttctttgtcaggtttatctctcttaaggaaactatatttagatcaatgcaatctaacaccaggagtaataaagagtgataactgcttgaacgcattgaaagaattaagtctaagaaactgcaatctaaatggaggagtcttccattgtattttccatctatcctctctggaagtattacatctaagtcggtgcaatccagaggaaggaggaaccctcagtgacatgcttgtgggtattagtcagctctctaaccttagagcccttgacttgagtcactgcaagaaggtttcacaaattccagagcttccttcaagtctgcgactgttagatatgcacagctcaattgggacctcattgccacctatgcattctctggtgaattgcctcaaatcagcaagtgaggtatgattttcttgtgttagcgtacaatgtttgtataaattgtatgtcttcctgtatgttggcatatttagggtagaaattgtcttttccatgcaaattaactagcatagatattgtatgatataaaatgctagttgttttgttagcttcttatgaatttgatggagcaaatggggttggaaatatgatgagttgggaggagctactgcctgccagcccacaagtgtttcctttataaccctatagtaaatggagttgatcatataagaccatttgttttcactggtggagggaattgtaggcaaaactggatttatattcatagtggatttgcaacaacaaaggcacccattggtttttttttttttttcctttctccacttagagattttttttatgttatatcttgtgcaatatttgtgtgctttttggttgagatttcattagggaggtttgtgaccttgtgctaatcactcaatgacattcatgtgcatatgttatttgatcatctaaaagagatctcaagttcatagcatactctcttaaaaactcataaattgtatcaaaacatgtttgctcatgttctcaatacggataaactatattctcttaagatggaaattctccgagaaggaacctctataggtggacctccatacttcaaaggagataattatgctcattccaaggtaaaactgatatacttccttaaaatgaagtctaacagagattggagttctgttcaatttggttgatatcctcatatggtgctaaatagagataggatatatatccactagggtaggtaaaactatgtaaaggtaggataggtgaaggaatgaatttcaaatgatcacaacaaaaatattttttgaatatattattgaaatcatggacattgtgaatgctaactttcaatctatgtaggcctttacttgattccaaggttacctgaaaactgttaagatcttctctgttcgttttagacctaaggtcataacaatagaggaatggaacactgctgattcaattaagctagatgagatagttggctcccttcaattagagatgaccccaattgttcctaagaggaagaaacattaatattgcactaaaagtagatgaacatgcatttaaatcagaataggaataaaaaatgaccaatatttgaaatttataggcttgataaagtttcaaaaagttcaaaaagcttcaagaaacagaggataacctatttgagaccataaacaggggaaaagaaatgtgataaaaagaaaaaaaaaacacaaaaaagatctagttgattcaaggtttctactgtgtggagaaaggtcacttacttgaatgtcagaaggataaggtcatagaagtaatttggtatgattttgatgaagagtgtacaaatttcattgcattaatttgctagaaacatgcataaacataattatgattattatcacatgatgttgatgatatttgtgtcttttagagcacgatatgcttgacgaaattgttgatatacttgtaaccttctatatcacttcgcaatgaaaagaaaaatgttaaatttgaaactgatcttgaatctgaaaattttgaaggttcatctcatgatacaacatatttggaagaaaagttgtaatttgagattgcctaggaagccttgtatgatcagtgccttaagatgaaaattgtgaaagttggatgagaataaaagaagtatgagagaagatttccttgcttgaaaaaaatctcttaccttgaaaatgagcatggtgccttgttaaaaaaattgaatgtcttacaatctgattatgagccacgtaaataagaattgactaaattgaaagaaatctgttctagctccattgctttgtccataaaagaagttgaatgtaagccaaacttagtgcaaagttttagatcctcagaggttaggggtttgtttaggaatttttttgaaaataattcttcaaaaaaccgttattgaaaaaagttttcaaaaatagttggtctaatgtcttctaaaataaaagcctatttaaaaacttagaacatttttaatatattttttgtattttcaaatatttcttaaaaataacttttgtttttagtttatgtttcatcattctttatatttttattattattttcttaaaacaaccctataaaataaatgaaaacaattgaaagcaattaaaatatgttattaggagaaaccttattttcagaacaaattctcaacaaactataatatgtcaaaaagttgccaaacatggttttagtctagaaaataggtttctatttttaagaactgaaaaattaattttaaaaacaattcttgaataggttttaaatcgcccattggaaagaaaatctgggttacggagaacctaaaagccttagttgatcatagggcctaagagctagagaaaaacacgttttggattttgagagtggctactctagttgtatgagagagaacttagatctttcttgaattttgaactcataggagtttggttgtatttgggaatggtaaaagcaacaatgaacttaaagtctttctccatgtttgaacctataaagggaagcttggttgtatttggggatggttgcattatgtataaccaacttgaaagcgaaatgtaccatagaaggtccaaatttacctatactcgaggagttactatatattgagtgattgaaagcaaacttaattaacgcaagttaaatttgtgattgtatgtgctttgttcattttactcaaaatcagtgtctattcaaggatgtgtgttggtaagaaatagaatttttgataatttttgttatgcttttgtacacctctctactttttcctcatcatctatagtgcacatagttgtaaaatgtgaaatctacatccaaagacatgtagcattgtatgatagcgcatttaaactctaatgatttgtctaggattacaaataaagaactaattaaagcaattcccatttaggaaagcctaaaaatcctatttgtcctacctaggacaatgaattcacatgagtgatagaaaaatgatgttctctttttctaggctcttagagatgttacatatggatttaatgggtcctatgcaaggaagaaaatattgcgatatgttggcaatatatcgccaatgtatcatgtatcggagggtatcgatacgatatttcatggagaaatatcgatctgacgaaatttcgagagaaatccaaaaaaatcagcgataacccttcattttgaagttgaggggattcgaaccccaaaccaaaaggtttgaggttcaacccacttgccatccaagctaacttacccttattatatgatatgtactaaacatatatatagttaaacttattatataaggaaaatattaaaaaaaatattttaaagagcaaattaattataattattttataattaaatgcaaaattttcttttaattgattaccaaaaatattaaaattataaaattttcttcatagtgcttttaatatcattaataattaattaaatattaaaaaattgtacatatattataatttattttatattgtttaatacaattgaattaaatgtatcataattttaatattaatatatattttaaaattatacatattataatcaaatatcataatattaaatgtaatttaataataaatgtacacttataaaattcatatttttgtcgatgcatacgatattattatcaaatatgataaatcatattatacatatatcaaattatttaataaaacagtttaaaaatatcattatacttctcattacatttttatgaagtttttcttatatttttacaaattctgatcagttttagacttatcgatatttttttccaaaatatccgtcgatatatctccgatatatccgtaaaatcgaagtatcgatatatccatgattaacgatattttcatcataggtcctatgagagtgcaatgcttagaaagaaagaagtacatcctaaaattcaaagtgttatgctttcaaatgatgaataaaaatgaattttaagtaagaaaaataagaaataatagaggaaatgagtttgtaattctaacttctagagtttttgtgagaaggaaattaaagaagagctttcaacatctaaaactccatagaaaatgaagttattgaaaggaaaaataaagtgctccaagaaatagcacatattatattggatttcaagaacctacctgattattggtgttaaggtaaagcccttgcaagcaagagatgatgtaacaccgttaggcttgagtttccactaatttatccatgttcacattgatattgatttgagtattcatgcatgcagtagtggtattatacataacttaagtacattagcagttatgtgaaagattcaagtcatgggttccttgcaagatttatgatttgttcatagttggttgatgaatttaggcaatccatttgagattatagtgcactaccttctaattagcgagttgacttatcttagtcattcggatgaggtttctaaggtgagtgcattagtatatattattgcacattagacaaaatttacaatgaattatgacattagctattgaggtagtcatgacaaaatctatggttgcagtaattcgtttagtagaagttaccatatgttcgttgtgggttatagtatgtcaatttatcacttaatgggatgatctataacataaggattgtaaagttaatcttaaaagattgaaagtgttcaccttgttatattatggacgccaattcatgaggagctagcttttagtcgttagtaggtcacaaacccatgtattttatattaatgtaatatcataggatattagagtgcaattgattttttgtagaaggatgttaagtcaactttagaattaaattatacaggagccactattttcctaccactcctaatggtccctacttgagttcatacttctatgtgacacattacttaagggatgtataggttatttattcatacatgtgcataagggtgttttggtaaaaatgcaaagttgttttagatcttatgaatgatgtttttggaaaaggataattaattaattggaccttaatagggctaattatttaactaagatccaagtgggctttttttagcgacccctaagcctaagatagactcaagtcacttaagcccatagggaatcctatataaacccatttaagggttaggacttttttattcttcttccatttctttagaatctagagagaggaaccttagcatccacccttctatgaggatttcaccatctacaagtgcctagatccaggaaagagagccattgagcaaaagatctcttggtttttgagatttgcactagcttcttcatagactgaaatcattttggaaacataaagtttgcaggtgtatttttttcatgtatatgcttttgttgggtagatctaaagatccttaagatagtttttgcaaacaccccaacgatcctaggtttagaatggattaatccaaaggctctaacaacttgtcaggttaacccataaacacaacatcttgtacttctaattgagtccacctatacgttagaaccaaaaggacttgctatgatgtttagacaagtaggaagcttaatgtaaaatatagtttttaggaacaatgtcttatccaaacaattctaaaaaattagggatgtttgaatcaaagcatgttgaaagaatttttgttagatactcaacttggcttaaagcctttaagatcttctttaataattaaagagttgtaattgaatcgatcaatgtattgatagatgactaaggaagtaaagaaaataatgtgtttttcttaaggatatttcatcaaacattctagatttaggtgagaaaaaagagttgaatgattgagaatgtgaatgaactcaatgaaaatcaagcaaacatccacatggagcaaaattagagaaattagtgatcatcctatcaacaatgtgattggaaatgttagcgatggggccctctctataagctaaattaaaatggctgaacttagctaggtcacgacaatagaaaagttgtaggaaaatttttacaagagatgggagtggtaagtttgtaaatctatccacctgtagatcaatggttggaagccttctttatgtaatgacatttaggctggataaacctatagaactggagtttatgcgtgataagaatcttcctaagaaatcacaccttggagttgttaatagaatcattatatttgtggttggtacttataaacttggattgtggtattacaccaatatatttgtagacaacatttttcatacaaatgttgaatagggatggaaggtctaaagaacggaagaacacttataggggatgtttctatattttaattgctcagttgcctagcttaataagaagctaacaaaccaagcaattactttcgataaaacgtatgttaaaaggattatggtgagagtgataaatcataattatgccttgtgataacatgagagctattaatgtattaaagatctagttttacattataaaactaagcccattaacataagacactactagttttagttgaataacataccattgagagatattaattgtacagtgaattttgtttgcagtatctttgaactcttacaagagataaaatctacctaactcatggatgaatgtgcgcgagtatagtagtttctttagaaatctaaagatatatattgatttgacaaaattaagactcgcaagatatttgtgttaggataattcaagaactaccttgggtatattaatcagcatatgaaaaatattttacttgttttctaatatttgaatgattgattttagaggagtgtttcaaacacattaaatttttaagtgtaaccttattggctcaatctcataaaagatcaaggataaaaagaacttagcaaaatgctttaatatacgtgagttattctatctaatgttaatcttttaatccatacctaagtagtctagaatcaagtatcattctttattatggtaaaaattcattaatattaatcattccattttacttgaattttgaccattcttctctattgttcaaatactaagtctttttatgtagtaactttgattaagaaaaatcagagaaaaagtcactacaacttttatagtactccgagtatcatcctctaggtctggctatggaatttgtcaatactaggataaatgaatcacttttatttaaatcctaaagtgaaaaacaatatgtgaataaaattttatttagtaaaactaagtaaaagaaactaaattaataacaacatgaatatttatttttaattcaattgattcaagtctgagactttcatgaatccaacttacggtatggaaacacaaactcactaaaaatgctcgggttcaagtctggttgacgtacaaattgtatcaaactttgtcatccttagatgccattaaatttacataagaaattcacacaaataagggaaggggagcacaagattgatttagagccaggagctaagccctttgccatggaggtccaataggatggcactacgtaatttagaagaactaaggaaacaacttaaggagttgcttaacatgggatacatccaacaaactaaagcttcgtatgccacaccaatattattctaaaagaaacataatggatccctttgaatgtgtatagattatcgaagactcaacaaggtgaaagtgaaaaatattgtattatgctttttaacaacttgtttgatcaacttagtaaaggaagggcttgacaaagttagatatgagattaggctactaccaagtcatgattgttggtatgggacaaacctaaaactaggtttccaatattgttcctataaatttcaatgcttgttcaaatttcctttttccacaaacttttttgcaatatgaaattaccttttatttgaattatatatgcaccactctttctctaataaattaaaaaaataaactattgaatgagtagtacttatatgttaaatagtttatactaatattatacaaaatagtcattatttagaaaaaaaaaagttttttttattaaagtacgaaaacgttttatattgctaaaggatgaaaaaataactatatgatatcttattttaaaatgtgagtttaataattgtaattttgaagatataaatgaaatttataaaaatctaataacaatatataaattttgaagcatacatggcattttaaaattttgtgataaaaactttatttattaatttaaaaattgtaatgaatacattaaataagaataaaaaaacttacgaaaagaaaaagaaaaaaattgtttctcattcttgacattgataatttttttttacttttaattttttttctcatttgcatagctgttacaattttttgaggattcatttactaagaattttgatttcccttatattttatttcaaataactagtacattttttcttaaaattttcttctttataattcttaaatcacttcttttttttttaattataaatttatttctttaaagaatgatgtaaataagtgttgataaatttataaagtttgttttgaaatctttaattttttttttgttaagttttaatttattttgataagagtataaaaaaaataatagtttaagatgagtataacgatataaataatgttaaattcaattaaaagtttattatacctccttaaacatcaattaattcatggaagagatgacaaaagtctcttcaaaatgtggtgatgaagtgaaggatcatgagtttaaataatgagaattatagtttaacataacaattattaggaagttaaaatgccttcacatacttttttattcatggatgaaatgaattaaagtttcccttagcaaattctgcaatttcaagtgtgaatttccactgggatttgagggaatgttttatatcattagacgctccaccttgaaacttgcatggaaaaaagccaataagtttgtgctacatgtctctcgccttataggattaagagaaacatgaggagaaatttttctgtgagtttttgaaacttgagcgaactttgtctttaagattctgagagttaagttgaatctacaattttaagatctctgaatctgtatggagaagaagctactgcaagtgaagacgagatctggttattctactcactttcagtttcagtttcccctcacttccagttttcacacttaatcttgtcactcactttcacgttgattgataatccgtcatctaaaagggatattaagtagattcaggagcatagatcaaagaaagttaaaactgggaatcaatttatcaaaaactgacaacaaactatctcataaaaactcacataatgccacagacccacaggatttacattgtccttttgtacaggatttgaaatacaagagcagttcaaacgtagtatttctctctgattcttacttcattggccatggaatctgtattgttgttccgggaagctgtggaattcccaactggataaggaatcagagaaaggaaaataggatcacaatggaccttcctcggaattgttacgaaaataatgacttcttgggaattgctatatgctgtgtttatgctccacttgatgaatgtgaggacataccagaaaatgattttgcacataaatcggagaatgaatctgatgatgaagccctaaatgaatatgacgattttcttgaagctgaatcttcaatctccactgagttagaatgtcaattgtcattgcatgatagatatggattttctacactgtgtgtgcaacatctgagttttcgcactacttgtaaatgctaccatgatggaggtggatcagaacaaatgtgggtgatattctatcccaaggctgctattctggagagctgtcacaccaatccatccatttttcttggggctatatttatgggctgtcgcaatcattttaaggtgctcaagtgtgggcttgaacctatatacgcccaagatccaatagtacagactgaggatgtggaagctagctgcgctgaatgtcagaggaatgtggaacaccgaaagctttgtttaaagtgtcagacaatcagcctaccacccattgagcgtgcctctgaatttgatacctt

SEQ ID NO: 10611 - DNA, 7314 bp, Vitis vinifera
  Intron number 2 from transcript GSVIVT01026721001 (locus G SVIVG01026721001) derived from phytozome v7.0 (chr-ID chr1 5; pos 5540271 to 5547584)
gttagcttgactttgaatatgtccttgaagcttggttacttttccaaatctctcaaaccaagccctgggagactacttaagaccatacaaggacttctttaatctgtaaacctttttttttctagcttttctttgaaacccggtggtaaattcataaacacttattcctccaaattgctatttaagaaagcgtttttcagatctaattggtgtaaaggccaattaaaatgcattgtaagagaaagtaaaatctgaatggaattgatctttgcaataggtgcaaggtctcttggtagtgaattccataggtttgtgtgaaacctttggccacttaacttgctttatatctttcaatgctaccatcgggcttacacttgattgtgaaaacccacttgcatcccactatcttcttctccttaggaaaatcaacaatttcccatgttctatttttcaaaagagcatttatttcttcttgaactgctgatctccactccgagtttcctagtgcttcttgtatagttctagcaatgaataagtgagagatatttgaaatgaaaactttatattgtcctaagagtctttgagaagacaaatatttggcaatgagatgttcagtacaattcctaactcctttttggattgcaataaggatatcaagatcagaaataggtaaaggagtggagtccataggaagattatctgaattttgagaactaggagatgatgattgaccgtgctcaagattgacttgattattctcaatattagaattaaacctgtgcctagtataaacacggagctcagtggacataggttgtagaatttcttccgctatttgtgatgcaattttatttggcatagataaattagtatttcccccttttcactaattaaaacatctattttttgatttattttaggaagaaaaatactaggttttggttgttcttgttgccaaaacatatcttcattagagctctccctctgaagagtggttttgttataaaagggaatatgttcaataaagttgacatccatattaacataaattttcctagtggtaggattaaaacactcatacccttttttattaggagcataacctagaaaaatacatttttttcggttcttggatcaaatttggatcgaagatgagttggcacatggacgaatactgtacaaccaaaattttttgaaggtaaatctaaggtgaggcgtatgtttggaaaagtattcttaagagtttgtaaaggtgttgcatactttagaacccttataggcattctattaatcaaataacttgttaaaattgcatccccccaaaggtgcgtaggaacattcatatgaaacataagagctttacctacttcaagtaaatgttcgtttttacgttctacaattccattttggtgagtgtccctacaagttgattgatgtaaaatacctttctctagcaaaaaatcacctaaacaatcattataaaattttgttccattgtcacgccgaagaatacttattttggtttgaaattggttttcaaccatagaataaaaatcctgaaagagttttgcaaccttatcatcaataaacgtcacaaaccattttttcccggttaaagtagtaatcctagaaggaccccaaacatcattatgtataaaataaaaaagctctgaggcacaatagggttttattttataagaactgcaatggcttttagccaaaaaacaagtttcacaatcaaaagaagtacaatccaatcctttaaataaacctggaaacaaatgttttaaatagaaaaaattaggatgtcctaatgtattatgccatagcattatttgatcatgcatagggattgaacgaacaccagcaataagaccctgagcttgtttattctcattccggttgtcatcaaaattgtagagattgtcgatcaatctagcattgctaaacatcatccccgagttcaaatcttggaattcacaaagagaggcacaaacaacaacatgacaattagaatccttagataaacgacttacggataaaatattacaatagagtttttggacatgtaaaacggattgtaaaacaatcttatcagacaaatgaatagaggcttgtcgagcaatataagataagcttccatctgcaatacgtactttttttatttccagaacaaggtgtataagaaataaacaaatgagataaattagtcatgtggtcagaggcacttgaatctatgatccaaggtgcagataatgaaagagaatatgcacacaaaagactacctgactgagcttgagatgctataggagtaccagaagtcggcagagcaggttttagtagttgtaacagttggtctaattgttctttgcttaatgagggtgtctcaggaacatgtgctttagcagggaaacgattagagtcgccttgcttattagtcttccattcaacgggctttcaatcagttggcttcccatgtaatttccagcaagtttcacgagtgtggcatgatttattacaatgatcacaccaaactcttggcttgtcatccaaacgacgttggttattaggattgcgagaagctgttgctacagtgcccaataaggctgagttttccacaggttcagagagtttcttctctagcataacattcctccagctttcctcacgatgcacttcaaagaacacttcacctacagaagggagaggttgtcgaccaaagattctaccccaaactcaacattaagcccaactaataatttgaatatccgtgaactttctaccatcttcttaaaatagttacaatcatccgtatttttccactgatagtcattgaattagtcaagatcctatcataaacccttaagcacattaaaatatttggtaaccgaattctcaccttgacaaatatcgcccagtttgagttgtaactcatagatttgagattgatttccaaggtctgaatacatctgaataatgttgtcccaaagagctttggaagtaggataacacatataattcgagctaatctcctcctccatggaatttaccagccatgccatgatcatggagttttctacatcccaagtggcatagctatggtccatcttcgttggttctttggtgttatcagtcaaataaccaattttgcctcggcccttaatgtacatttgaacagattgtgaccatctgagaaaattgttctcattaaggaggattgtggtgatctagactgagtgggaattagaattggatgtggataattttgaggaattggaaccaacagtaatggaaggagtagattcggaaatttctaacatggtaaagagatagcaatagaaacgaaaaagaaagaagaatagaattggaaagaatgagaggaaaaagaaagggaatagccaattaacttgactctaataccatgtagaagaggaaaaaaaaaatgtcgtatattaattgaataaggaagggaaacacacttccttttatataaaagctacaacaaatcaaactaaatctacagttgtacacccaaatttctaggaacaaaataaatttaaaatatacaatttatacctaaaaaaataggtaacaaccaaataaaaaaaattccgatatgattgagattctcaacaccatctcattcctaagatatttgggtgtgtgtcctttgtacatgttcacggtccaaacaagggaaaattggacccaagagtaatcaaatgtaattttgtaggatattccacaactcaaaaggggtataaatgttattatccattatccaaaaagttttttgtctcaacagttgttgctttcaacaagagagagtcctattttcctgctcatctttagggggagaattccatcaaggaagacaaggatcaagattcctatctcattgatccctttctcattggccctcttatagtctttggtccagtgtctgatcctgtattcatactcgtaccctagttcttcgtaccctaattctttgaacttgagtcgtcgttgcttcaacttgctcctgagaatcgtattattggcaaagtgtactcaacaaagaaagttgcaattcctaaacttatacaagtctaagaatctgaacaggcttctagaaatgaggtaacagtttctcatccttcctcataaactgagtcagaactttagtataaaaaatctgttgatcaaaatctccctattgccatcaagaagggaacgagggaatacactaaatgccatttgtatccacttccccatgttgtatcattctaaaagttgtctccatcccataagagttctctcacaagtttgaacaatattcatatttctaccactctatccatggctttatcgaataaaaattggagacaagccatgaatgcagaaatgtaggccctatagaagaataaaactttggagatagtagatttgcatgtaggaaaaaaccagtgggatgaaagcgggtttatgctgttaagtataaagcagatgggacattagagaggtacaaggtaagactggtggctaaaggatgcactcagatatatggtgtggactatctagagacatttactatagttgccaaaatgaacacagtcagaattttgttacccttgacaacaaattataattgggatctataataatagttcgatgtaaaaaatgcatttctgaacgaaggtctagaagaagagatttagatggaagtctctcctggatttggcaatgacccaaccacaaagaaggtgcgtaaactaaagaaagctttatataggttgaaacattctccaagggcgtgatttagaaggtttgcaaaagcgatgaaaaacatgggatacaaacaaagtcagagagatcatatgttgttcattaagcatttagatttagggggagttacaactcttttggtatatgtagacaacatcatcataacgggaaatgatgacctaaagaggcaaactttgagacaatacttgaccaaagaattttagattaaagagctaggaaagttgaaatacttcctaagaattgaggttgcacattctaagtagggaatttttatttctctgcaaaaatatgtatcagaccttctcaaggaaacaaggaagttggcatgtaaaccaacaaacacaccaataggttgtaatcataagcttggagaggttgaggaagatattgtggtagatagggagatgtatcaacgtctggtagaaagactcatttatttctctcacacaagactgaatatagcatatgttgtgagtgtgattagttagttcatgcacagtccaaaagaggttcatctacaagctgctaacctagtactacagtatcttaaggggtcttcaagaaagggcatcctatttaaatgaagctcgggattagtacttgaagcatgcacagatgcagattatgttggatctgtggttgatagaagatcaattactgggtattgcacctttcttagtgggaatttggtgacatgagaagtaagaaacaaagtttggtggctaggtccagtgtagaagtagaattttaaggaatgacccaaggagtttatgaactactatggttgaagattattttagaggatttaaagattaaatgggatggacaaatgagactttactgcaacaataaatctgcaatcaatattgcacataatccagtgcaacacgatcgaacaaaacacagaaattaatagacattttatcaaggagaaactagatagtggattgatctgtattctttatgtatctattgaccgtcaattggtagatgtactcataaaaggtttaagccgtacaaaattacaagtaggtgtatccaagctgggaatggaaaacatctattcctcggcttgagggagagtgtggaagaatggaattggggaagttgtgattttgtagaagagaattaggcaatcccatgatcaaagggatttgtcctaattaagttaggaaagtttctaatttaggtgctaggattttttgtatttatatgcgagtctctgtagaaaattttaattcaagaaaaagaatttttcaccttttattcttccatctctcttctacaaaactagttagaaatttaaagatctttaacattcttctattaaataattaatcaagaatagagaaatgttaaactctttggccaacaatgaaggctgaaaccaaactcagacctatgtctgcaatgaaggccatccaatatgttaacaaaggagtcaaaaaataaaaataacacagaatatttgtgagaatatttctgttatttgaggccaagatcaaggttgaggggggaggtagaggtaagacgtaagttgacaggcaatgcacacattgtggcagaagtaatcatatctctgataaatttaaggataagttcagccatcctgtgtaatttaatctggttgtccccttttctaatgatggaatttatgttcctatgggtggtaaataggaaatatattaccttccctttagatgactacaacaaactagtgtaactatattgagagatttcctctcaatccagcatcagtgctcttgttgccaccttggcacatcttgatatgtatgctcttcttacctaacttattttctcttgaaattccttgatctacatctagcaaagttcctccatagttgtccataatccattcaaccttactttcttaaaacctagtgaaatggaactccaagtttatgcccatgatggaaaactaaattccaccctcgcttacttctcctagagttcatagtgctccctagcacaaaaaatgcctctctttgtctctgtctctctctctctctctttcttttccctcttataatttttctttgacatttggaacaatacgatctctatcttttcctatgaaagaaaattctctctctttctccctcctcccctctcctttctcttttactcattcattatttttccttgatattttagaatgatacaatcactttttgatgcctataaaagaaaaaggtcttgtggaatccatgcaaaactttcaataatttaagatattataatggaatcatatgcttccttttctaacatattttgtttttcctcttaccttttttttctcaagtattcctggaaaaccagcaatagtattaccaaattttgtattttcttggtggtgaattattctgaatcctgaatatatgtgtatgattagtttgtcttttgtagtgaaggaaattggacataaataaatatggaagcacttcttgttcttcccatgtacacattatttatattttttcaggaacgttgctggtcctattccgt

SEQ ID NO: 10612 - DNA, 12253 bp, Vitis vinifera
  Intron number 3 from transcript GSVIVT01032240001 (locus G SVIVG01032240001) derived from phytozome v7.0 (chr-ID chr1 1; pos 13683759 to 13696011 reverse strand)
aggtttggctggagttaaggcataaagcgtaagacaaacacttttttctgtaataattttattgtccttttctttattctattgatttttttttaatttttattttatactgtaataaagatgagtgttattaacacgtatataaataggctatttgtatttgtgtgttactgaaactcatcaacaatatcaaacccataccctaacaaccaggaatctagctatgcatcacaccctcactgttattacaaacagtgcctggacaatctgcaccaaatattcattactatattgattagtattgaatttggaagaaaaattggatagtattttatttttaaaaaaatttggtttacatccataacttaaatactaaatttagcaactaaccaatgtacaaaatatcatccgatattctctctaattcaaaccagaaataaaatcaaatttaaacacactagcacttatcccaacgaaacaacctagaataataggactcagtcaagtcttatcttttggttttattttaaattcaaactcctaaaaatctaagacttatccaaactaaacaacctagaataataggactcaatcaagccttatcttttggttttattttaaattcaaatgcctaaagaacctacagtttcaacactacccctcaaattgaggaatagatattaataattcccagtttgcttataagggaatcaatatgctgtcttggtagagcttttgtaagaatgtctacaatttgaagcttggtaggtgtgtactacagtaaaacctctccattctcaattttctccttaatgaaatgtcagtctattttcacatgtttggttctatcatgacgaactggattatgggagatgctgatgcttgcttgattatcacaaaacattttcattggaaactcggttgaaatcttcaactcctccatcacacgttttagccatagcccttcacatacaccaagtgcaatattccaacactcagcttctgcgctacttcgagtcactacaaattgcttcttacttctccaagcaaccaaattaccccatacgtaggtacaatagcccgaggtggaccttctatcattcacggaacctacccaatctgcgtcagaatatacttcgattcctcgtctggtacttttgccaaaaaataacccatttccaagtgtcattttcaagtattgaagaattctatgaactgcattgagatgttcttcaatgggagcgtgcatgaattgactaaccacactaacaagaaaggctatgtttagcctagtatgggataaatagatcaacttcccaacgagcctttggtattgacccttgtcaaccgaagggctttcttcttcgtccctaagcttgccattttgctccataggtgtgttcgctggtctacattcgagcgtaccggtttcctctaaaagatcaaagacatagtttcgttgagagactgatattccactcgaagtttgagccacctccatgccatggaagtacctaagagttcccaagtccttgattttgaattctcgtgagagggcgtttttcagttttatcatttctgcttcattatcacttgtaagaattatgtcatccacatagatgataagaatgactatcttcccatttgatgaatgtttgaaaaacattgtatgatctgattgtccctaattgtatccaactttcttaatagttgaagtaaaacaaccaaactagacccttattgctttaggccatacagagatttctttaacccgcacactcgattctttttttcagcatctttgaatcttggtggaatatccatgtagacttcttcattgagatcatcatttagaaatgcatttttttacgtctaactgatgcagagaccaatcattgttgactgcaatggagagtagaactcgaacggtgttgagtttcacaattggaccaaacttttcctaagaatctactccatacgtttgcataaatcccttagccaccaatcttgccttgtatttgtcaatgttccatcagctttatatttcacattgaaaatccacttgcatttgattgtagattttcccaaaggcaattcagttaattcccaggttccatttttctcaagagctttaatctcctcgtgcatagctgccttccaatttggatgttgtaataccttataaatgtccctgggtatatccactttagaaagattagtagtaagtgctcgaaactgtggagataatctttcatagaaaacaaaatctgcaataggatgtgtggaacacgatctaacccctttctgaaatgcaataggaacatccaaatcatttaatacacctggattagtatcagttactgtgttacctgaattatggtcatgaggatccggattaggttcagttaactgactgtgtgcagagggcatgggagtttctatatccctgacaacttttcttctggaataaacctgaagctttgaggtcaaatttgctagaagattggttgcagaatctggctctggggtcgaatctgctggaaaattaggtgcagaatctagttctagggtcaaatctgctggaagattgggtgcagaatttggtttgaagggaacaacagtggtttcagggctggaataaatgctgttacaggggttgttgaggtggcagattaaaaaactggggctggaagagcaatattagttggaagaccaatatctcaaaattgatctgagctggaattccatgaaatctccccctgaagctcagttttgggaaaattggcttgatgctcaaggaatgttacatccatagaaatataaaaccttattgtaattggtgagtagtaacatttataacctttttgggttgaagaatatcctaggaaaagacatttgagggctcttggatctagttttgttctgttttgagcataagtgttgacaaaaacgctgcaaccaaaagttttggaggaagggatgacactagttgaatgttagggtagcaattttttaggacttcaatgggagtttggtattgtaatatactctagtgggcattctgtttatcaagtataatgcattgagaatggcttcccccaaaaatatttgagaacatttgtcgtggacataagggattgagcaacttctaacagatgatgattttttctttctgaagttccattttgttgtggtgtagcaatgcatgagctttgatgaatgatgccatgttcatgaagatagagtccaaggattgaattgaagtattcagtaccattgtcaatgcgaaaaatttggattttggtttgggattgagtgttaatcatggcgttaaaatttttgaaaatctcttttgtttcatatttttcttttaactaatacacccaacatattcgtgtatgattgttaataaatgagatgaaccacttagagcctgttacgttgcaaatattggatgatccccataaatcattgtgtatgagcgaaaaagtatgaggcccttccccttttagatttgaaaacatgtggttgaaagtggaaggtgttaaggagcttatgaagtcttggtgggagggggttagtttcagtggatcagcaagctttgttttggctgaaaaaataaaagttctgaaggctaagctgaaggagtggaatagagaatcatttggcaggattgagctcagaaaaaatgttgcattggagcaggtacagttctgggatgcaagggagaaaattagcagactgaacttggaagagctggaagctaggaaagaagcgagggaagattataaaaaatgggttttatttgaagaaatcagttggaggcaaaaatctagggaagtgtggctgaaagagggggatagaaatacaggttacttccacaaaatggctaatgcccacaggaggaggaataatgtggacagaatcaagattaatggagcttggtgcatagaggagaatgaaattagggaagggattggcaatgcttttaagttactgatgtccagttcgggggattggcgtccttctatatccgggctgcagttagagactttggatcagtcagatgctagtactttggagagctcgttcacggaagaggaggtgttcaatgcattgttgagttgcaatggggataaagctccggggccagatggactttctatggctttctggcaatttgcttgggatttcgtgaaggcggatgtgttgagtttcttcaaggaattctatgaaaatggaaaatttgttaagagcctaaatgcaacttttttggtcttaattccaaaaaaagtgggagctgaagatttgggggattttaggcctataagcttggtgggaagcttgtataagtggttggccaaggtcttagctaataggctaaaaaaggtggttggaaaggtgatctccaaggcccaaggggcgtttgtggaaggaagacaaatcctagacgcagtgttgatagccaatgaagccattgattcgactctgaaaaataatgagagtgccatcttgtgcaaattggacatagagaaggcctatgataatgtggattggacttttattctcacagttatgcagaaaataggttttggggagaaatggatcagatggataaaatggtgcatctccactgcaagtttttctgtgttggtcaatggaacccctacaggatttttccaaagctcaaagagattgaggcagggtgatcccctttccccttatttatttgtcatagcaatggaggtctttagcgcttttctacaaagggctgtagagggaggttatttatcggggtgtagggtcaaggggaggagtgaagaaggggcccttatatcccatttattgttcgccgatgatactctggtattttgtaagccgtctcaagaccacttgactcatcttagttggttgcttatgtggtttgaggccgcttcgggattgagaataaatttggacaaaagtgaactcattcctgtaggaagagtagagaatatggatgaccttgcttgggagtttggttgcaaagtgggtagcttgccgtccacatatttggggatgcccttgggggcttctttcaaatcaacatcagtttgggatggagtggaggatagattccataaaaggctaggaatgtggaagagacaatacttatccaagggagggaggacgacattaattcgaagcacgttatcgaatttaccaatctatcttatgtctttgttgtgcttaccgagtgtagtcagaaggagactagaaaagattcaaagggatttcctttggggtgggggtaatttggagagaaagcctcatcttgtaagatgggaagtggtgtgcttaagtaagaagaaagggggcttaggggtaaaaaacctatctattctcaacaaggctcttcttgctaaatggaactggcggttcgctaatgagagagaagctttatggaatcaagtgattagagggaaatatggagaagagagagggggttggtcctctcgggaagtgagagaggctcatggcttggggttgtggaaagggataaggatgaactgggaattagtgagcaataggttggtcttcattgttggtaatggaaggagggtgaggttttggagggataaatggtgtggggattctcctttgtgttcgtcctttccgtctctatttgctttgactgttgataaggaagaaagtgtggcagatgtttgggattccttggcggaggggggatgggggggttggaatccttgctttgtaagagctttcaatgattgggaggtagaggaagcgtcaagttttatggagcggttacatcgtagcagagttattgaggatgtggaggacaaggtatcctggactgaaactaagagtggtaaattctcggttaaatctctatacttggccattgaggcggggggttcggctcggtttccttcaagccttatttggaatgtgtatgtgcagcctaatattagtttttttgcatgggaggctacgtggggtaaagcactaaccttggacaaggtgcagaaaagaggatgggctttggcaaatagatgtttcttgtgtcttgagaatgaggagaccatagaccatctccttcttcattgctcaagaacaaaggtcttatgggatcttctttttactgtctttggggtatcttgggtgttgccttgttctattaaggaaacccttctaagttggcatggttcttttgtgggcaaaaagcgtaagaaggtgtggagagcggctcctctgcacattttttggacggtttggaaggcgaggaattgtttggctttcaaggatgatatggtgtcaattcaaagattgaaatactcctttattttttctctttgggcggaaacaaaattgttcatagttgattgccctctaactatagctaattttattgattggatgggcgctaaataggattgtatgttggggctttttgtcttttagttttttgatggagggtgtataggtttgtttaccttgagtcgccttcttggtgtctcttttttaatagaatctcttttacctatcaaaaaaaaaaaatgagcgaaaaagtatgagatttttgataaggttgtgaaacataagaatttcgacaatgtttagacaattgatagaactcataatgaaatgactcttttaagtttttctttttgaataacgatggaagcaactttttcaaatatggaaagcttgggtggtctagcctaaagtgtcaaaccattatttcatgatcactggaatttgtaaaagatgaaagaacattgcagcttgccttctgagtgtgtccttctgaagctttattgtcaaagatatttaaaccctcatgctcctaggcacaatcaatcattttcaccatctccatttcttaaaattcgcaatgattaggaaagaatttagtaacacagttaagatctttagtgactttgtgtatagagagcaggttacacagcttgggaacatgaagaacaaatagcaatctaaagctattcggaagaatgacacttccttgactggccaccagtgagaaagaaccataagctattttaattttataactctcaaaacaaggctgataagagtgaaagagagttatatcactggtcatgtgatcggatgtgtcagagtcgataatccatgggtttgacttcgaaaagcattcaaggctctggagcatttacctttttgggcaacgaaacttgatcctatagtggaggtacttaaaggatcacatgtgaggagtttctaaagtagctttatctgttctggattgaaaggtgttttgttggctgagttattggattgtggtggttcatcatttgtggcacaataacctcaaggttcattttcttgtgttctgttacttttccaaattgggcggcttcctatgaattttccaataggtttctcgagtgtgaccaactcgattacaatgatcacaccacaacctattggatctccttcgtgaatcaaagtgttgagaattcggtcccttggtggctaaggctgatttgttgttgcttggaaaggactgtgatgaggtgtgatccttcatcatgaccttcttttgactatcttcttgccggacttcaaaacacgcctcttagagtgatgggagtggcttggtgctaagaacccttcctcggacttcatcaagattcttgctgagtcctaccaagaatgtgaagatcctttctttttccacaattttctgatatttgtcactagtgcaatccctttccaattctttgaacatgtccagtttttgccaatattgggagagaatgctatagtattgggtcatgttgaggtccccttgctgtaattctagaagttggcttttgatttcaaacacctatgctgcatttttgttgtatgaaaatttctccttggctgcatcctagatttcctttgctgtcttatagaataggaatgtttggcttatgttcgtctacatggaattagtaagccaagacataatcatattgttatcggaaaactaggttttgtaagatgcatcattctttgcctgagctgtcttcacgcctgtgatgtaatcatctttgtctctcccacatatatacatcattactgattgagaccattggagataattcttgccatttaatttgtggactttatggtgaacggaattctcagaaccaccattaccaccggaattgacaacagtagaatcggagatcaccttcgaagagcttgctggaccttcactagtcattgcagttttcaccatgtttaagttcagatcgtgtgctttgataccatattgaatttggaagagaaaccggataacactttatttttttaaaaaaattgttttacattcagaacttaaatactaattttagcaactaaccaacctacaaaatatcattcgatattctctctaattcaaaccagaaataaaatcaaatttaaacacactaggacttatcccaactaaacaacaataataggactcagtcaagccttatcttttggttttattttaaattcaaactcctaaaaatctaagacttatccaaactaaacaacccagaataataggacttaatcaagccttatctcttggttttattttaaattcaaactcctaaaaaatctgcagtttcaacaattggtcatgttacaatttcataataaacatcaaagtatgaagatagcagcatcttctctattcaattttatgcttgctaaaagtttaagatttagctaccattacgtagtgagtttagctctaagatgtcttgaacaatcagtgcatctcaatatctaaatgctgctaacaaactagactgattctggaggtactatctttgatctcaaaggtccacaagtgaaagttggcccaatgtctgggcaatagatagtatgaccacacttgactgagcatttccccttaaatttttagtgttttaggttgttaaagcatgctgcaggcagctggacatctgaggttttagacttatatatactggctggagcacaaagccttctttttcagttaaagagatctactcaccactttttatccatgatcatgcaagtggatttttaaagtatcaagaagatgtttgatatttgaattattcaaaaaaactatttgtatgcaagaaggttgttcatattattaaagtgatttacatttcatatcaaagctattgtaatggctaatgcaatttttttcctctttttttataggcactccttttggtctcctaatatctctgccttgagtaggcagatgaagtaagacgagtgcaactcgtgtgattgttgttccttgtttcaaaatcattttattagacaacattcagttttatagaaacccaagaagaggtgtaatagaatttggcaagaaggaatgttggtttgatggacagcaagaacatgcttcatcaagtactaaatcaagcattgtgtttgtagctgctagaagaaaattggggcagcatgatcatccttcttaagtcaaaggaaatacctcattaaggttaaaaacactagtagttaacaaaaaaccctggtgtgtcaattcaagtacgcccttcctcacaaatctgtagttttcccaaatagattagagattcacataggatttctatttaccctttcatagtaccaaatataacaactcttaactcaacccaagccattaactagtcttaacctaattgaatatataattggaaaaaactgcgaaaatattatcgtgcattaccctaattttacttcttgggtgagatgtcaaatctttaaaatgttggggaacaattaagcatgacttgatagttatatctttaagaggtctcgtaggggagttaaaggtagagtctctggaatcatgctgttctagctattgtttggatggtttgattgggaagaaatgtgagcatctttgatgataagctagacataattgacaaagagggaaaggatcctccttctgacatcttttgtgggtgtcattcactaaatattaaaaagttcacctagatactcctttgatcttcattaagtggttaggggtagaggaagggggcaaatgtgcaatgggatttgaggtttgggtttggttggtgttggtttaaggaagttcgtttagtagggaagaggaaactaattaccccatctccatatattccttctttttggtatagtttaaggtaaagttcaatgagtgtttgttagaaaacttgggttagctatgcattcaatggatgttttaaaatagaggtgagattatcaatattttgtaaggcttgtaggatatgcactggtgatattggcaaacatttttgccttattggaaagcgtaagagtgactaattttatgttgtccctccttgatgaaggatgaaagttcttatcttgattgatggaactgcctaaatgagggaaggggtgaatagatggtctaagtgagatatcccctaaattaaatctttatatctagaattcaattatttcaatagttttatcaatattgttttgaagttaatcaatccaatgcacaagtaaaatcaatcacacaaataaacattggatttaacatggaaaaactttgtactaaatttcctggaaactctggagatgtaaaagaccacgggaggttaaaaaaccgcaaacaaatcccttaactttgaaaagaaagtacatagttttacctaacctagatgcgcttactcccctaagtcttatactggttagcacctacactattccttcttgtctttgatgcagtacctcttgctccttaatggataccttaaacccatgttaaggctataggatcgaacaccttattttctcgccaaaaagttctttcaagatcgttcttgaaaggttgagagatggtgtgctatggcttagggatggctatgctcgtatgcatattttttaactcaatgaaatcatatttttatgctaaaaacctaggatatcattttggaaagcaattgtaaattaattttacaaaaatagccttcacaacacaaagaacatgcttgaaaatatgaagaagagggcctagcatttgaacattagagcgggacttttgaatgctcgagagaacatttgagcgttcttcaagacaatgtttgaatgcactgtaggacgtttgaatgttcctttggaaacatcctaccccttttttgtgctccaaactttgttttttcttggttttccccaaaatgaactcttggtaatcatttcatagtcattccttaaactctaatagcaccaaataatacatacctcacaaaggaatcaattttggaagcgcttgtagttgaatgactttgaaggtaagatgcattggacttggtgtgtaaatggaaaaaaaatgccaacctaaatgaacacatcaacaaaggagactcctaacttattacttattgacttcttcaaggagtagaggccccttgcatcattattgttgagggagattcttgatatttctagttgcatggatgttcaattcagctagagccttgattaaccagtcagctgatggagcttttctagagaggacttaataacctggaaattctaataggatattttggccccttgagcttttgaactgggggctttatgtgcttggttataatttgtctttttagatattggatgttccttttttgcgttttgctttctctatgaaggacatctcatccttcctctatatttcctctttctttccattagaataaaattatgtttgtttcatgtataacaaatgaataggaagaaacctaaaaatgcacacaaagtttcttaagcaaaacactttaaaaaagggaaaaatcacaccctctaggaagagcttgggagctgtaaattgacattaatctctcattgaactcaaaaggcagaggatcagattgaacacaaaaggtagaggattaaaagctttctttagacttataagcctaaatagacttatttttttacttatcagaaaaaaaaaagcctaaatagaatacaattttctgcttattaaatgtccatattattaggttgctttcttgggattggatctttcttatgatttcagttataactttgatgtttgggtttgttccttgccatctatgttgtgaaaattttccttaatactttattcttgtaatcaaaatttttgaactccaattaattacagaatcctattttcatcttctctcttgtttctctgacaggttagaattacgag

SEQ ID NO: 10613 - DNA, 6790 bp, Vitis vinifera
  Intron number 2 from transcript GSVIVT01019905001 (locus G SVIVG01019905001) derived from phytozome v7.0 (chr-ID chr2 ; pos 4381960 to 4388749 reverse strand)
aacccaagacacctggttgaagaagaggctttcaggtatggttgttatggctttcctgtgcactttcatttttcattctcttatgtctcatgctctgtgattgctactctgtttgttgggttgctgtgctttgatgtttattagtttaatatttgaagagtttgctgcgtttttaatgtcttacccccagcaaaattcttccatcttaacccactgattgttaaactcatggataaataatgaaatgggtttaacatattcgttaaaaatgctccctgctctgttcctatttctattcccttgttcctctgttttcccttgaaagagactatcaggctttaagactgtgaatctgggaaggttggttgatggagaatgatgatggtacgaagaggagattgacagctatgaaatcagttttttgggaagcacccaaagtttcgccaggggctattgatttttgttttgatgggaacctgtatggcaattggtgatggaattctcactcctgcaatatcagttctttcagcagtttcgggtgttcaactgaaaatcacagagctccatgagaatcatattgttctaatctcgggtgtcgtgttagtggtgcttttctctcttcagcactatggaacacagagttgccttcatgtttgctccaattgtcacagcatggcttctgtgcattagtgacattgggatatatagcatattgaggtggaatccgcatatattttgtgccctttctccaacttacatgttaaagttccttaaaagcacaggcattgaaggatggatatcattaggaggagtggttctctcaatcacaggtgtggagatgatgtttgctgatttgggaccaataactgaagaatcatccagagagttttggaaacttagatattgaagcccttgatgtttcagagcagactttcaatgatcctagtcatgaagaaaactcagtgcagtcttcacatgatatccaagttatgaaatctggcgatgagcagttggaaaactctcttcccaaagaagagtctctgccgatactgaaagctagggaatctgggcttgcatacattcttgggcattctcatgcaaaggcgaagaaattctcttccattgttaagcaagttgctatcgatattgtgtatgcttttctaagcaggaactgcagaggccctgatgttgttctgaacgtgcctcatacttctttgctagaagtcggtatgatttattatgtctaacttgaacaaactgcacgagcagaatcgcttgctaggctaactgtaacaaggacgcaccaaagaagatgacacagggaaactgggaaggaagctcctagcagttccatcaagaccaaaggattgcgatccacatgtcattgcttagagtatcagttctgcgttggttaagttgtgttacagtagtccagtttccatctatccttatatcgatataagtcgcatcccggtttttgtgcagcagacgctctctggcattagtatcactctcaataatgcccccgctggtgtgaaagatgcaagtgagaagaggatattggttgacatactgatctgggtgacggatgatccggctttggctgatcatttgctgatttttgatgatagaattttttttatactctccatcagtcgcgaatgagggaatggagaaatatattgaaagagaagttagttgatgctaacatcttcgaggaaggtcagaataatttgctgaaacgcttgaggaagaggaagatgaatatgataagagtgtttgttggcaaggttggctgggtaaaggaagatgggatgtcacatgcacatacgtcagagctgatgctttatgcctacaatgagagggcaagctggtcctattgaagagtttgaaagggtattaaggtacttgaagatggcactccaaaaatcttcagtcatgtatcccatacctgtctgacagtcccatcaaatcttaccatgtcatgagcgtataaatgcctattctcgtccactggttccatgtggggtttgggttttggcgtttcaaatggatttgtgatgcatgaatttgaagagttactagcaagactgttgggaggtgcatcgtccgtgttgacgttccgggatgtaagtgcatggggagctgccggagggtggcacagggcctctttggagggactgaattttgattacagatgaagcatattcctctattaatggccttattgccacaagctgttggatattgtctgagatggtaaaaagaagaacatctatttcagatgaactatatatattgtttctcaaggagttccaagctttcggacttcttgaccaccttctacttctcaggagatgatctcaagtggtgacaatgtccaagatttgaaacctatagtgagtggtatatcacagaccattatgtcctgtggttcctgctgcagcaaatgtaagcattctgaacaacctctctcaagcacggcaagtgacgtattctatagccctaagtgggggaacttctataggacttctgtcaatgggtgggacttccatggctatgcatatgccaaatatgatatccaacgaaatggcatcatctgtgcctaccactcaagctgtgttctcatttgggcagtcagctgtctcatcaataactggacctggaacactagcaggcactgcacaggttgcacaaaactcagcttttggttcgttcacttcagcaacttctaatatgtcggtaaactcaaaccttggcatttctcaagcattgagtaatcttcaaggaggtgttggtatgggcccaacagtacctgggatgagccaaggaatcttcctggaggataaatggtatttcgtgaacatgttaagaacgctgttccatcatcatgggatcctgctgccttggcaaggtttattgaaacatttggcaccaatattatagttggtgtgaagatgagcgggaaggatgtaatatatgttagacagcagcatgcttcgcctcttcaacctgctgatgtacagaaaagttgtgaaagagttttgatcattgacaaagaggacactgccatccagggcacccataatagcattcagcattctcgcagagaagcaatagatgagctggtcgagaaggaaactggtgcagcatatgattattatgaatatagtatcaatctttcaaggaatcctagcttgggaattgttagacctagtgaacaaagacatgacaatggagatgaaacaaatgggcagagaaggagcaatcgactgaaggtgtcaaacagagagagtcctaaccatgcatgagtataccaagttcatcaactgaaagtcatcctccatattatccacgccaatccttcatgctaccctcttgcttattaagttgccttccagatgagaatacctcaaaagaccctattttcctcacgttgtaactgagtccttcactttctctctctaaaaccctcgtgctatctctaagactttctctcgctaaaactctccattccatgaaattctagttttttaaactccctagccatatactgtctcgtcaccagtctcgctcctaaggttcagatcacttggcacaacatccgtcagatcggtagtaggctgaactggggcagcaaccatactgctaaagacatcagattcggggttgaggttcgagccttaatgctacagtcaagaatatttgtgcaagccttgtgaaactggttgcaaataccattaataatgtagcaagagatggtaccgtttgtgctacagtccttacccgagcaatgtttactgaatggtgcaaatcggtagctgctggaatgaatgctaagggatctcgaacaaggatatcatggaacgcttctgacctcatctaccagctttgacagccacttccaccagtacctgtgaaatattctgaagctctgggctttggctatactgttctaaacagtagtcatctgtatctatttgggggagaggatccattgaaggaatctctgagatggatcagtttctatagtgctcgaatgaataaagggtttaaaggcgaatgcacaagaaggcagaggaccctccattcagctgaaatctatgatcctaacaggaatggatggaacaagaattgagagatcctttaacctgtcggaatgctgatatagaaggaccctagtttcatggagcattttcctgaagaaaactctagagttgacgtcagcttcaatcaaatatcaaaattctggaagaagcaaagattgggatcagtcttctcctgtgttgacatgtgcatcacataatttgtttgacgattttgatagaagctttaaacctgtagggcccatgcagttctagatagtattgcgtaaagaagatattttctccttggccaaccatacttaatagagaatgatttgattgaagatgagattgctacctttttatggtgctatgggttcagctgagtacagtatgattgattttcttgaaggcaattggcaatgggctgattccacttccaaagttgatgattgaggcagtgatcctgcaaaagtagattcatatgacaaggatgatgcagattgagatggtcaatattcaagtgggaggaaattgaggtttgaaaataaggaaatgcatgttgaagcaagagaaaggaaatcattagggagtagcatgaaaccttttgggcatggatctgggcactatggttggataccttcagatgtcgctttagtcagttctgtcacttctgtgtttagcaaagtggcttcaacaagctcatggaatgctgccaacatcttctctgtccccatctccgtggttattattgttcatctccttccacttatgcatggagtggatggtcacctctagcatggccactttttgagtcatgtccccccttcaaattctttccctttgacttcaaaataagaatttcttaaccccgttttcaaaggattttccaacttctatttttttttagataccaacatcccatttttaataaaatttgttcaccattttccttctagcgagccactttcgaattttctttgattttcaaaatattttaaaataagtgtgaatttatttttcgtaattcttgatgatagaatttacgaaattgattcactcaaaaatagattgggctatggtgggggcccgacattaaataaatttcctttaaaataaaaatggaattgaatgaaatctcatgcatgatattgatacttctttatatgatttggtgacatgagtgacatattttgtattcattactttgcactaaccctctctcttgatagcgcatgatggcttgttgcctaggtacgcacccactctcactctggtcattatttatgcatgttctgattctcatatgtgcatgattagttccggatattaattgactttctcattaattatcatgtcaattttattttattagtagagacccgactttagggacttagagggatgctacggtctttatcgtaccttcccgataaataacttgatctccaaacccgatttagtttttcatagaccacatttttcaaaataaagagtcacacttagggtttttttttcttattttgtttaccttttaaaaataaaacaaaaataagtggcgactccaagtcattttctaataaataaaatcatttttgaaataaaattgaactcgttattgagtggaaaacgcatgaactaaaatgcggagtccatatactcttttgtaaaaaaaagtaatattgcaatatattaaaagtaccatgaaagtgtgttaaaagtaacacactttattgttactttttttcattaaaaaaatggtacttttttcataaaagagtaatacatttttcataaaggaacgatacttttttttttttaatgatacacaatgtcaatatacaaaaaatttaatttttaataaaattaatataaccaattcaatataatttttttttataaaaaatataaataaaaaatttaaaattttaataaagcaaaatgttagaattacaaccaaattttcatcttctttaattaaaaatattaaacgttggaaaattttatgttctaaatcttaaaatttgtttatcatgtatttacttttatattaaatttattattattaattatttattatatattattattttatgttttaaaatgtccataaataattaaaattaataaatataaaaatatgaaatattaaaaaaaattgaaattgaaaagatttcatcaagctaacatattttaaaaaacaaaagcaaaaagaagatggatatactaaagaggaggggaaaaataaaaatgaaaaaacattaaggtgattgtcatgtgtcaaagttatatttttttaaaataataatagtaatgatatctcatttgtcttatcaaaataataataaaatgaaaggtaaaaaaaaatttggtagttggcgggaggtaagagaagaggacttaagggtaagtttggaatattgattaattcgactatttgagtgtatgtattgagaattgttttcgtcaaaattctaaaaaattaaatttttttttaaatggtgtatcattagattcattacaacatgactcccaaaattatatgtggtgcaggtcagggcctatcaattctttgtctaaactttcctgtataccatcggccacgacacggtagctaggcctccacctcacttatcttttatctttttcatttttttttttcttataaaggacaagtggattgctgtggagacgtgggaggctag

SEQ ID NO: 10614 - DNA, 1413 bp, Vitis vinifera
  Intron number 2 from transcript GSVIVT01021847001 (locus G SVIVG01021847001) derived from phytozome v7.0 (chr-ID chr1 4; pos 6591343 to 6592755 reverse strand)
gagcttctcaggcttgtctccttcggtcagaacaggtcccatccgattttctctcctttgtttagtttgtttcccgagaaagttgcaactagaaaagaaactcaatgtttcaagtttatatttctattaattggtcccggttcactcagcattttagaatttttatgttgaattctgtggttttggaaacctaaaggatatgaaaagattcaaaattgtaattgtggtatttctaaatgattgaaatcaactgtgggataaaatattttcttctttttatcaattttgtcgcgatggtggtttttctcacataatctgtagctaaagaaatgatttcacttggaagaggagatctttcctgggtttttggtgattggattcgggacttatataggaggtttcattcaactatatgatcaattgtaataaggaatcagttaatgagcctgacactctggggaagcccataggatcttatgcttagtgggacgtgagtttgcttattcatggccacaaggatcagaaggcacagacgatctattgaatgattcaaaaaatttcgtagaaagtatgaagcctttgtatccaatggaatggttggagggcatgaagggggaaataaactccccattaaaaaaacgaagttcaggagcttgtgaacttactcaaagataggaatgctataggatgtaattaggtgttatagaaatgtgagtctgaaggtaccttaggtaaacaggctagttattataactataataatgggaaagactgtagtaatatgtaatcattgttaactatagtaacatccagtacgatttagcttgttggacctctctgtttatgtttcaaatagttggtgagtaagaccatgattttgtcattacatgttgatgacctattcttggcaagattccaagaaattacatgggtatgctgaatcttaacaatttatattttagtgttaagtgcttagaggggttggatggaaaatataaggctttctccatacctacaatcaaaggatgccagtttgataagcccacacccaaagaatgatcaggatgtaaataggtatggtagtttaatgtatgcaatgacttcaacatgaccagacaatttgcttcttagttggattatgatctggtcttaatccaatatccaacaggatcatttgaagcccaagaaaaggatgtttaggaatcttcatgttaccaaaacaatgaacttgtgttttgagcaaagaaaccttttaagggaaaggatgcccaattatagcttttgcagaagaccctgatcattatgtcaggaagcagtaatgcctgttgtttggtgctagtgctggtgctgtttttggtcaagtaagtagatgaatattaattctatttcttactgtattacagattggattca

SEQ ID NO: 10615 - DNA, 3783 bp, Vitis vinifera
  Intron number 1 from transcript GSVIVT01036553001 (locus G SVIVG01036553001) derived from phytozome v7.0 (chr-ID chr1 4; pos 23391118 to 23394900)
gagtcttgtggaattgtttaagaagtttgtgcttacataagtatgaggttgtagctgttaaattttaactatcttgatgggggtatagtcctatcttgtgtaaaggccatgaactggtttactggctagaagcatgtgcttatgtaagccagaattctagtttaggtgggaaatcattcttatatgctctgcttgcttcctttccacaatagttctatcttcttttaccgtgcagtttgtcacatgaaaataaaaagacctattaaatttcatttgccttaaattttctttcctcacattagtttttcaggaagaatttccagtgggacagggcatgtgcatcttttatacaaaagtcatgaaattgagaaagaaaaaaggggtgacgggtaatttgaatgtggtgctcataaaaatcaaacccttctgttaatccatttgtttgtatggtgtatgcatttagaagtacttttaagatgtaagaaaaactaaggaactaattattattagtttataacaaatcttcctcgtaattttgtcaggatccgcgatcattaattgattgctctttttagtttggtttcattagaaaatgttattctcaaggaatgctggtatcaaattatgtggcttgggcagttttaaaattaatgaaagactaaaggttatgttgtttggagatgaaaggaaaaaacgaagaatcttgtcattcaacatggactgaggggtgtcaattcatagtgtatggtgtgctctttttttcctagaaaagagcaatactatattgttgaatttcggtacccaaatctatacagattaacctcccaaatcttcttttctctaatttaaaaacaaagtgatcattattatcttattaattttaaacatgtccttgccacattattgtatatgattcttgggggcttacgcaaaaggggatagaagtttcacaagtgcgtgaaaagcatagttcaataatttctcttcctttatgattgatatttcctttctgcttcagaaaatagaaaagtgacatttaacacgcctatctaaatgatcatgcactgttgtttcttcttcttcttcttattgtcttttcttttggcatttttggccatggtgcctaaagttttcataaaagtctcaaatcagcaagattttcaatttatttgattgatatagtgttggctgttagtcataaaagtttggttgaggacaggcaagagtcaagactgataccttctgcaaactcatcaacatttaaaactatgtgtgatatttttgttgggcttataaaactagagcatcttgtaggaatgtgttcttggtattttaaaatattcactttttgacctgaaattctgaacagtgaaaactaagaggtaacctggttttggttagtgatcgcctgaaatatactgttctatgaataatgatcagaaatatatccatacaaataacagatatgctgaaaatttgtaagcatttgggaggttttcacatgctgatgttgctgaaagggccttgttttttggtcaaatcttaagctaaattcaagataccaggaagttcacttggattggttaatagattttgccttatgaagtggtatcaagatcctttcaattgttcaacttcttctttccttttgttctttttaacttcattctgtgggtggattctctaattcctgcatttatttccactggatcctacccactttgtatacatgattgggtggtctctccactcaaaatttagcatgactggaaccatcaaacaagacatccttttataaaactaaaaccatgctgaaaattttgaacttgccactagtacattggtaaacaggacctattgaactccacaccataaattgtagacgagcagttgtccttttctattcacaggtgatagaagcttttaagaatggggttggagtaacatgctcagaagatgaactagtaaattgaaaccagagttatttaacttttggtaatttattcttgttatacataagaaaaggatggactcattaagtttgtacacttgcttaaacaaagtggatatgttggactcagactagtagttgggaggacagggttttctttttctttcatatatgcatgtaggtagatccaaacactaatgtttcgttttttaagatttgacacattgtaaaagattatcatttgatggtagacagttatggttaccactgcccttaactttaagagggtgtttttggatatcatcttataacaatgcatctttaatgtgtcttgggcaacatgggcttttctgactagaagacaaaaaaaaaaaaaaaaggcaacttaggctttttccaccattgttatgaattttgtgacttatgatggttttgtcctatcagaacaacccccttgatcttaaatcttttttcttgacaactcttaagagccattttttattttttatttaaaaatagataattaaatactcataataattaatatattaagatttcaaaaaaaaatttagaaataataaataaaatcttttttttcaaaatgtacttaacattcatatattgctttcttttttttcaagttgcaactattatattaatttattttttaataatttaatgttttattattatttttttattttgaaatttttatttttgatatttaattaaataataattgtataagacatattttatatatatattttttttattaatttaactagcttattattattttttattttttattttgtagtttatattaatttattgttcaataattattatttttattttgaaattttttttttaagatttaattaactaacaattgtataagacatatacaaatttttgtagttatattttttattttctctgtttgttttccataccaaattactaaaaaacttatttatacacatataaaaatgtcaaatataattttttttttatatgtttaaacatatacaagataattatactaaatgtgtaaaacatttttatattttttgttaacatccataaaaactcgcaaatatattcacaatagcgagatttgtataacctactacaaaaatacaaatcccttatacattttaacccctttggagccattatgagccccatctgccccaaatgtaatcgtccttttaatacttttagtatggatttcctttatttccagcatggtgacattacccatgttattttacttcaagaagtgcaccgttcatcctttcttatatttcaaatcaaagaatttgataaagaaaatcttggaaggagagaaaatgagggaaaattttcagatttgagaggaaagagaaaaagtagaatagcagtaattaacaggatccatcatgagttttgctgacttttgtcagatacaaggagagattctttgcttaaaatttgagctgctgctacaacgtctccaaacgtactgttttagcatctcaacggctcatattcaaaatgcggtggttaaatttgaaggggagaaaaagatagagcactatgagtcatgtgactgaccaaaaagaggcataggatgctcaaataaaggctggaagacctaacaatgtcgtggcccgtgggagccaccacgcatgctaatcagaggataagaaccgaaaggctttttaagtcaagagtcagagatgcccttgtagccctctatttaaacgagaagcaagatgagcccccctcatctagggtttcaagggcggcagccgtgtaggagaaagtaaagggagagtgagaga

SEQ ID NO: 10616 - DNA, 12041 bp, Vitis vinifera
  Intron number 1 from transcript GSVIVT01003434001 (locus G SVIVG01003434001) derived from phytozome v7.0 (chr-ID chr7 ; pos 14986491 to 14998531)
ggcgggagattcttcatcaaattcacacccaacaggtattttattttattacctaaaaaaaaaaaaaacaggtattttattttattttattaattatttatttttatgaaaaattatatatgcttttctcttcaatcataggaactagcaaattggtgatcaaggtcatgttcagaaataatttttagaaaaactattagatagtaaatttttgtcagttggtatgcaaggtaagatgacctattaagcttagcattagattattttgattaaccgatactagaaataaaagtatgtacttgggtttgttgaaattaaaatagggtaattgcttatttattggttttgggggatgggcttcgcggtaatgatgctttgatcaatgagggtagtagcgttaggtcaatggggagggtttgtgggaggttctaggttcaagtcccaatggggacaaaaatttacctaaaaaaaaaaggtgcaaaagtctcttatggctgaggcacaagccgcaacactaggcatgcatttgagtcaagtgaaactgatgcatatcaattttatataatgtgatctaatctaatgagtaagaaaaatttaagattccaaacatttaaaagaagcattaaacacaaaagtaataaaattaaatgaatttcaatatacaattagaaatttcaagagtaaaagtgcttaaaaaggaaatcctatcaaaaaaaaaaaaagtgcttaaaaaggaaaaataaagtaaacgaggcgtgcctcttcaacaaggcgcatgtcttggcaagcaaggcaatataactaggtggtggttgattagcgcttctttttaatatattttttttctttatctataaaagaaaacctagggagtggttgtgccttgggccctagtgtgctttaagagcgccttttaaaaccatgtaactgtatcatgatgaactttttagattacgtatcttcaataaccaaggattccaattatctaatcagtaggtattgttgacaactcttggtgacaaccatttcaagtttaaagaaaggggcttctatgagactatgtctatatttgtatccatatcaataaaatgaagccttttaagggattgatattattaatgtaaaatgaggcctaggaattcacaatcttgtggccctaaacaaagccttgctctggaagtggagttggagacttgtagaagaaagggaacccatttggaaacaaataatcatcgggaagttcgaaatagaggatggggggtggtgttcaagaggagtaagagaagcttatgatgtgggggtgtggaaagctataaaaaatgaataagaggacataagatgtagatcccgctttatggtagggaatgagagaagggttaaattttggaaagacttgtggtgtgaggacctaaccttgaaagaagcttttcctaacttatttcgtttggcaattaataaagatggttgggtgtcaaaagtatgggaggagggccgggatttgagtagctggagtcctcacttttcaagacatcttaatgattggaagatgggagaaggggagtctttgtttcgaaaactacaacccttggttgtgaggagaagtggaagatattatgagttgaagagacagtaagaatgacaaatttttagttaggtccctttatcgtttctatacgaggacttctagagaccctttcccatggagtttggatgtctggggctctagtaagggtgagtttttttgcttgagaggcatcttagagctgaatttttgactatcgaccagctgaaaaagaggggttggaatatcctaaataggtgctacttgtgcaaagaagaagaggaaattactgatcacctactcctgttttgtgacaaggttaggatgttgtgaaatttgattttctcccttttcgatgtgcagtgggttatgcattctttagttagaaggaatttgttaagatgacatggttcttttgtggataaaaaagggagaaggcatggagggtttcccccttatgtttaatgtagactttatggaaggaaagtaatggaagagctttcaatgatgtcgagtggtccaaccaaacaattaaatctcctttcttgtatacttttgtgaattggggtagggtgtatatagaggatcatactttatctataattgattttatagattggttgtttgtcaagtaagaggaagacctttttttggtctacttactattttggtttttttggacgttgtttgtatatttcttgtgtactattttcactaggcgcttctaatgcaatccctttatttacctatcattttttttttcatttgttcatcttgttctacctccatggaaagtagtattgttatgtccttgattgttgcgtcttgaaaatagatagtaaagccgccggtgtacttagggagcgcccccttttttggcgtgttctaatatgatttcgtctcttggtttatcaaaaaaagaaaatagatagtaaagcttatgctgcataggaccttttgtttttataatgcttctttttgtggtattatttgacctttttgaccatttttttttcttttttccattttcatgatttagaagaaggattgtacaagtccatttaatggttgtagaaggatgtagtggttttggcaacgtctttgtataatggagaataagattttcaaggtgtgttatggctaatagttctttcaagagagtttcaattgagttgccaggccttactttccattattggtctaaggattggtggtctttgatttggagaaaactaagggaggattcttgaggttgactagtgcaataaaattcagatatttgttagagatcagggataaggtatccaatggatgataatttctaagtgtagttgatgttttagatggagcctggagatttacagttttttaacataaagtaagatggatggttactatccaagtgaactcgcatagttgtagaaaaggcttatgaaagaagtgcttctttggaggcttccaaaagcaatttttgggatgatgcttattgtgatttgttgtctgaatctcaaaagagccttagtatttgtttgaagattcataggccacaaggttctacttttgttttgccttttccctcactagtttgttgagggcttgaaagtcaaggtttggagggtgactagttataggaattatgacacaacatggatgagttcttcttgatgggaatgaaggaattgaagccaaaagccaataaccaagtaatctaagcatggccttctaaaaccatccttcttgtagttcgccatctaatggagcttttgatttaaagttaagactttttcaattttacttccaaaaccttgtacctacattttcttttcattctaatcctaccattttcttatgttccttcttagtccattgaggtttctagcgtattatgtaattgtattgatggtctaaagtttataatggtaaagtctatagaatctattgtgcccttttgcaggatttatgagaatgagtcctttgaggtctacctaagaaaggaaagagaggaaaagaaggaatatttttatgatttaggtttttcaaagtcataatttgtaattagttggttatttgagtcttgttttgaatttgtaaagtttttctttttcttttcccttttattgcaagtttcttcttaaaggaagtttttgtatttcaagctttttattttctaaagcatgttcttgatttacgaaactacctaaagggtaagtgaatgggtagtccaatttttatggtccaaatccaattttccaattctttaattttgaaatttattaatctcaattatagatgaattcaagaatatgagaatataaagaaatcaataatccataagataagcatgatatatgtgggaaccactaacagaaaacttcgtaggcataaaatcatctgtgtagtgaattgtaaatcaaatttgctaactttaaaaagagtgtacgtagttctacccaactctcacccacacctcccccactagattttcactcttcaaacagctaacctctgagcttcacctagccaattccagaagcttattctaggacctttttggtcccttgtcaacaaccgaagccaaatcaaattactctttgaattcaaagaaacacagaaggccccccaatagagactctctcacacttttcttagtaacccaacttcattcaatccacttctttagttaaggaagccacgggtctaagttagaaaccttccctcactttcccactgaacaatactctaaacaagtcaccctttcttgcaccctctgtgcctttaactgaacctacacctcttctattgagaccttttaaggtttcaaaatcgcctcagcaaaagaccctttgtaatagcaaaccactttactcctttccaaagaggtttgcttgttaaagaccgcctttggccctctgactgaactaaaggagccacccacaatagatggagcttacttgctagagtggactaccctcccaacaagcctttgcctttagggaagataatagtaaaccttttatcctccatatcatagtctgagcacaaaatgaacctttttgcctggttagcacacttttctaacttaaacaacctcccatttattcttgccccgaatataaatcacaaaataatagaaatagatttttagagacaccaacacctcctattgcaaatatttctgcaaatgagttcttattttctcacctgtcggctttcacaaagtgagtgtgtagaaaaatcctacaaaacttacataatggcctttcaagggaattagtgtgaccatttcactagaatgttgaagtgttccataaatgctcaaaataaggtataatgccaaatggcaaaactttccctaggaaatctcttatctccatttccctaaaggagcgtgattcctcagagaaaccttcctttacctaaaacctttatacaccataggcttacacactagatcccaactattaagatgatctcttttaccctccctaatccttgactaaagaaaatctctttgcaattttttaattcttgatgccattgatgttgaaagcttgaaaagggataataaacaactaggaatgtaggacaagcaagattggattagagttattcttttgcttaaagacataaacactttttccactcaaccaatctcctcgaaattgtgtcaatcattgggtcccaaaacgttcttgcctttgggtttcccccaatagaaggctcaaataagttagaggttagtttgagattttacaatctagcatcgaagccaaactagagatttcgttctgactcatgttgatgccatagagagtattcttttctaagttgattttaagccttgaggtgtgcccaaaaattagcaagatcagtttgaggttttataggcttgtcatagaagctcaaataagttagaggttagtttgagattttacaatctagcatcgaagccaaactagagatttcgttctgactcatgttgatgccatagagagtattcttttctaagttgattttaagccttgaggtgtgcccaaaaattagcaagatcagtttgaggttttataggcttgtcatagaagctctaaagaaagtgatggtgtcatattcaaaaattataaatgagacactctagtcctactcttgcccataaagaagtcctacaacaaacctccctccttcgctctcaacgacatcctacttaaaccacaagctataatggagaacaagaatgggggttgaggaaaaaagggttcgaatttgaagaagattgtactatgagagaaggaaagagccaacctcttctctttcaattatacaaaatggattatgataatttaatgtagttggactctaatgtggagttgaatgaatcatttttctaatcgaggtaaggccagataggtaagaggataacaagttataaattctgtctcaatgatggagttttaccattatcctccttaaatcctaaaagcatagaagctcttgcctactttgtttaatcatagacaaccatcctaaggttgtcctacatcacaaatagtgtcttcactcttcagtaaaagttataacactaaaagttcataagagggattttctttggtgaggagttaggaaagggaagagagaccacttcattgcataagaccttagtgtgccaacataaagggaaaggaagtttgggtaggtaggatcttctcgaggaatagaactctcttagtaaagtggttgtggagtctctagggagagtgatgctttatgatataggttcatcttgaatatctatagatcacacttcaatgacatggacattcatgatgttgtagatggttttattgctgcccttggaaggctatagaaaaggcatttgatttttcttattttatttgcttttataagtattctggtataaaactctttttccaatcagcttggcagggggattgtacaaactgcttgccaaagttttggcaaacaagttgaagacagtagtggggaaggtcaaaggtggtttttgttaatcatgttatgcctttattaaaggtagacaaattttggatgttgtgcttattgttagtgaggccatagattctagactaaagagcaatattcctggtctccttctaaaaatggacattgagaaggcttatgatcatctcaactgggattttttactgtcagttatgtctaaaatgggatttgggcaaatgtggataagttagattaattgatgcatttccacaactagcttttcagttctcattaatggaactatgttggactttttccatagctctaggggttagacaaggtgacctgttatccccctacctgttcattttggtcatggaggctcttagccggttactgtctagaagggagggaagtgttgcatattttgtttgctgatgatactttgatattttgtgaggccaatagcgatcaattgagatatttgagttgcgtctttatgtggtttgaacctctttttgggttgaaagtgaatatggataaaagtgagattattcctgtagggggcgggggtagagactttggaggatgttgtttcaatgatggggtgtagagtagggaagtttcccacgccttacttaggtcttcccttggatgccacttttaaatctcctaaagtgtgggatgcaatggaaaagagattcagaaaaagattaacaatgtggaagagacaatatctctctaagggtgggaggcttaccttaatcaaaaacaccttgtcaagtctttagatctattttatgtcccttctcgttattcctagaaaggtgtgtgttagacaaggattttttatggggaggtggtgcccttgaaaaaaaccccatttggtgaattggaatttagtttgtgtggataagaaggagggtggcctaggaatctgtagttttgtggccctaaacaaagccttgctcggaaagtggatttggagatttgcaatagaaggagagcccctttagaaacaagttatcattgggaagtatggagtagaggatgggggctggtgttcgagaggagtaagagaaggttatggtgtaggggtgtggaaagccatcaaaaatgaacgggaggaattaagatgtacccttcatggtagggaatgagagaagggttaagttttggaaagatttgtggtgtgatgagttaaccttgaaagaagttttccctaacttatttcgtttggcagttaataaagatggttaggtatcaaacttgggaagagagtgggtatttgggtagttggagtcctcgtttttcaagacatctttacgattgggagttgagggaagtggaggctttgtttagcaaattacaacccttgattgtgagaaaagaagtggaggacgttatgaaccggagagatagtaagaacggaaaattcttagttaagtccctttattgcttctacacgagggcttttagagaacctttccaatgaagtatcatttggaagtcctgagctcctgtgacaatgagtttttttgcttgggaggcgtcttggagcagaactttgactttaaactagctgaaaaggaggggttggaatatcctgaataggtgctacttgtgcaaaaaaaaggagaaaactaccgatcacctactcctgttttgtggcaaggctagaatgttgtggattttgattttttccttttttggtgtgtagtgggttttgcaatcctcagtttgaaggaatcttctaggatgacacgactatttcgtgggtaaaaaaagggagaaggcatggatgattgcccctttgtgtttaatttgggctttatggaaggaaatgaatggaaaagctttcaatgatgttgagcggtccgaccaagcagttaaatattttttttttgtgtagttttgtgagttgggttagggtgtatatagaagatcacagtttgtccttgattgatttcatagattggttgtttgtcaagtaaggggatggctttttttgtctcctcactgcctaggtttttttgggtgttgttcgtatatttcgtgtgtacttttttcgctgtcttttggcacttctaatgcaaaccctttatttacttataaaaaaaaaaaaaaaaaactcattttccaagaggatacttggtaggtgattcaacttcttaggtggtgcttgtttttttggctttttgattaaaacaatttattttcagaatttaggttgtttgtttttttactttttcataacttattataaactttttactaaatagaaaaagctaaaatatgtaactttttctaaatagaaaaaataacatattgttttttctttactttttaatgcttaataaaaataaaatacttcaaaaacaaacaatctaatatttaacattattaaacattaaggttctatttagaattaagtaaaaaaacaaacaccaccttagtcatcaatttctagatctctttagggcaacaaggacgagatgctctcttatttcatcctagtctttttttttttttttatatatataggaaaccacacatgaatatattgatagaaaaagaagtacaataggaggatgaggaatcctcccgccaatggtaaaactaaacaacacaaaaaaaataacaagacactacaccgtcccattggaactacacactgctagccaatctagttgtaatacgttaaaggggatgcccttaaaacccgtggaacaaaaaacccaaaaagaagcaaggaaatgaatggagtcccaaagattctctgaatttctagctttgtcctcaaatatcctaacatttctttcccgccacacaacccaaattaaagctatgcacgcgttttgccacaaaactaaccctctcttggacttgccaaaacctttataattgatgaacatcatgtctgaaatgtttttcggaggaacccaatccatcttggctagctgaaatagtctgtgccacaaccccaacgtcacagaacaatgaaggaagagatgatctgctgattctccgtgctccatacacaacttacaaatgtcagggctaagagctttgtggggtctcctcaattgtagcaagtcattggtatttaccttcttgtgtgccacaagccagacaaaggccttaactttgaaagggacttgagatttccatacaaacttagtggggaaaaatggagatgaatcaggcatttgggacaaggttgtaaagaaagacttgactgtaaacaatcctgaagacaataaggaccaagatctcgcatctgaaacggaagtggataaattcatacaatcaagagagcgcatgaggtgttctagatcttctatctcataatcgattagattacgacggaaattaaagttccatgagaaagggcgagttgaactgagaattgaagatacaggaatatttttatccattactactctaaatagtcttggatattggtctttgaagatctggtccccccaccacaaattttcccaaaagcgaattctttccccatttcctacgacaaaccgagtatatttggaaaaatcctgaaagacttgtgcaatggccttccaaggacaacaatgtgaccatcttactaaagtgttggcatcccaaccatttgagtgtgtcctgtagatgctaagaatgacctcatgcgacagagttgtactctccctaggaaacctccacaaccatttcatcctagtcttttcatctttctccttgtgatacttttaattaggaaatttaggagctcattgttctctttaatccatatgaattaatggtctcctcttcccagatgtgtgctaacctctttaggttttcataattagcttttttgtcagtcttttcagtttctgacaatcttatcacctttggtcttgctaaattcacttgggattctaaagttcttaagatcaaagcttttggtaagtagctaacaagaggatcaatgttaatgaaattctactagggagaaggtcttactaagacttcagctcaaattttatgtttggagatcagggtggcaattgggtcatcttgttatgcattgttcagtagcttggggactttggtataggctgttcaatcttgttaggattgatttggttccttcccagaagtgtggaagaaatgttgataatttcctttaggggtttcagaggcatcttagaggcaggattatttggcatttacctagtctattttttatttgattcatgtggaaagagagaaatgcctagagcttttagtttaaaagggaggttattagcgaccctatacagttttggtttttctcctctgctgtcttgtgtgtggatgttttttagcaatacctttgtgggaactcctttgaatctaatattgctagatcaaaaccatgtttgatgttcaagaagtttagttaggtagacactttctgtttgcattctgtctctagtgggttcagtaaaatttttttgatgaatgtcctttaggtaacccaacttgggatagaaggtgttcttggaaatcattttgatataatattgagaacttattctaaacctgtcatagagagtttttccattcagggagaactactagctcttatggagggtttgcactaggcaatggccaagtgtttatctaaccaatatgttggtgattcagttgtgatcatttcatgggcacatctaaaagggaaaaaggtttgtggaaggttgatgggtaactctgccaaattttagatataacctgagagttgagatgctcattttcttgggtactgcatttagctaatgaaattgcaaatcttttagccaaatgaggagcaaagcaaatactttcttttgtgggggaatttgcactaccataagtgtgtatagtgattactgggcttgcacattgctttggtcatttcttctgcagtaaaacttgtttcttttttttgatgattggtgcattcatgtttttttggttttattatcagcttttattcattttggaagggttctcatctttctttgtatttaataattcaatgcaatgaattgttgtttcttatttaagctgtgatgtatgctagatgaatgagtcacagttcttttgcttcctaatttgtaagagtttgaggatccttgcatggctgatatttttcatccatctatgcctctcctacctctgactacttgcattcttatgtcctctagtgtcacttcttatctgaaaagatagtgaagcatgctctaggaaggatagcttttgtatgatgcttctttcatttataatcatgttgcaatttctgttatatctggaaaattttatttatttattattttctttatttaagttcaattttgaatgtttcattattagcattaagttcaatttggacttttcattactattattaaggtcaatttgaacttttcattgttagtagatgtctgagttgcttttctgtttaactttgctctttttgtttcttctgactaccatttgacagatt

SEQ ID NO: 10617 - DNA, 13705 bp, Vitis vinifera
  Intron number 3 from transcript GSVIVT01028445001 (locus G SVIVG01028445001) derived from phytozome v7.0 (chr-ID chr7 ; pos 7684516 to 7698220 reverse strand)
atttagttgccttctgttttcctggaggcatcaaggtttaatgcttccacttccttgtgatactatgatcatttacaattctagattacatttattgtgttttctgtcgtatttctgctatacaaattaaaataaaatgggagcttctacttcttatgcacacaatgtttgaaattttttgttcttttcctgaaatttaagtcaaaattaggatttcggccaccttgaaaaggagattgtgggaattattttattgtcaaataattgttaaaatattggataatatcgtctaaacatcaacattatatcaatgtcaaattataaacatgtgatttcatcattttgttatgatatattgcagatatttacgtaattttcccttgattttgatgatttttgtgcaattttctccttaaaaattgttagttttttgggctgaaaaatggtgcgcataagtagagtcgaatccatgccttttacaaaataagaagagactatgataccatgccaaatttgaactaatacatattttttccccaaaatatatgatgaaaaacaatttcctgtattctttacattctgttttacaatatatatatatacacaaagaatgacttacaagatgccttaaattaggctacctataaaaagagaatccttaaaatcaagcaatctgattgcaagagtcctatatggaatttacccaaggttcctatatggaatttacttagattcttggtacaagaatcatgggtcagattttacaataaaggaaaaatatgtaggagaaattagatatatatggaagaaaattaattattaatttcttggcctattcttctcactcccccctcaagatggtgagaaaatgttttgcattctcaacttatctaagattgtataaaaagttgaacttggtaggtccttagttaatatatctgccaactgtttagaagagggaggggacatatagaatgcaaatcaattcgttgttaagtttttctttgattaaatgccgatctatctccacatgcttggtttgatcatgatgaacaaagttatgagatatatttataggagtttggttatcacaatataactttatgggtcctttcaaactgatgccaaggttagtgagaatgatctttatctagagtagttcacaaatcccttgagctatggccctaaacttagcttctgcactagatctagcctccattggttgctttttgcttcttcaggtaactagatttcctcttaagaaggttcaatatctagtagttaaccttccatcgacaattgatccagtctaatcagcatcactataagtttccaattccatatttcctatcttctgaaataagattcacttgcctagtgtaaactttaggtaacataggattctatatattgcctccatgtgagattcatgtagtgaatgcatgaatgggcttaccatagctacaacatatgcaatgtttggtcaagtgtgagataaataaattaattttcttgccaatatttgatagaggttgcggtctaccatgttatcctctatttttcctttgaatttatgattttgctcaatcagagtctctactagtttgcatccaaacattcgtgtttcccttagcaaatcaaggatatatttttgttgggaaataaatattcccccttttgaacgagccacttcaatcctaaggaaatattttagactccttagatccttcatttcaaattcattagatagataagtttttaggctttgaatttccccctcatcatttccaataataataatgttattcgcataaactatcaagggaatcaatttacaagaggagttttgtttgataaacaatgtgtggtccccttggttttgatggtagtttatttttatcattgattttgtaaatctcgcaaaccatgctcttggagattgtttaagtccataaagagacttcttaagtttgtagactttgttctcctaagccttgtcaccaaaccctagtggagtgtccatgtatacctcttgttctaattcaccatataagaaagcattcttcacatcaaattgctgcaagggctaattaagattagcggctaaagataatagaatacaaatagtgttcatttttgcttctggtgcaaaggtctcttggtagtcaataccctaagtttggatgaatcccttatctaccaatctagacttataccttcctattatctcatcagccttgtatttaattgtgaaaatccacttataacctactattttcttccctttgtgaagctcagccatattccaagtctcatttttttttcaaggcttgcatctcctcattaattgctttcctccaattctcatctctaaatgcctcttggattgtgcttggaatttcaatgaaagacatttgggtagtaaaggctcggtatgtagatgataaatgatgtaataaggtaaaatttgaaataggatgctgagtgcattttctagtgcttttcctcaatgtggtgtgccaatacaaatcattataaacactagaatgagtattttcattacctaattcaagattagatgatgggatatgagaggatactatagattttccttccttgaatacacttttagtttggaggtatttgttggcagcatgtgttccatttctttgagctgattctcaagttcattggctggaatttcggtgagcaaattttctacaattaactcttcattggaaatctattggaatttcttatgttcactagctgattcattagaggaatccaaggctggaacatttgaaacaatagggagtgttggtgcaaaatctaaaaattctggggctgaaacatcttggacagtaggggaacttgatgtgtttgaggtagagacatttgacacattaatcggttgtggatggacacccctaccattctcatcattcctaggaaaaattcttgacagcttattttccattcctccaatctccccttgaagataagtgtgtgtgaaatatggttaactctcaaagaaggtaacatccgtggtgatatatgacctttttatgggtggctggtagcatttatatcccttttgattggaagaatatccagggaagacacgcctaagagctcttgtgtcaagtttgtctctagattgcttgggaatgtgaatgaaagatacaagcccaaatattttggaaggaggtgttctaatacccttaaagttaggaaaagactttgaaagtgcatcaacaaggtatttaaagtctaagacttgagaagacattcaatttattaaaaatgtagcattcaaaacggcttccccccaacatgtttttgagacattcatttgaaaaagtaaagacttagtaacttccaagagatgtccgtttttcctctctgctaccccattttgttgtggggtgtctgcacatgaagattgatgtacaataccttcattttggagataggtgacaagattatggttgaagtattccctcccattatctgatcttaaggtatgaattttggttccaaattgaaaaatggaattaacttccgatttggattttaaaagataaacccaagtagtatgagtgtagtcatcaacgaaggtaacaaaccatctaaaacccaaaatgtttggaattgtagagggtccccaaacttcagtatgcattaaactaaaaggagaggttgcctttttatttcttattggaaatggcacacgatgatgttttgtaagctcacaaacctcataatgaggatcatgggatttagttttaccaaaaaaatgtgggaaacattttttccaagatgaagaaaggtgggtgtcccaactgttagccatatttgataaaccttttagggattgtaggtggtaataagagcttgtgggatagaatcaccaatctttcaatgtgtattgaggtagtagagtccacctttcttctcaccatgcctaatcatcctccccgttatctagtcatgaaaaacacaatgggaaggggtaaatgttacaaaataattcaatctttagtgattttactgacagaaaaaagattacacaacaagtttggaacatgtaacacattttgcaaagtcaaagaagtagtgatagaggctatcccttgaccaattatggaagaaaaagtgtcatcaacaacctttacttttggcctacttgaaatattgaataattgggaaaaaaaaaatggagtgattggtcatatggttagtagcatcagaatcattgatccaaatgcttgataaacaatccttgaaggcacttaaagctttgatattacgtgtttggacgaaaaagcatgaggtagtttttgcagtgggaatttcaacatgtgtgttaagttggtcaagaagtgttttcagcttttcatttttttgataagtaaagcaagatatattaatgaagaggcagaaagttacaagtatacagggggtatactaagcaacaaccccctctcaaagccaaaaaaacaacaaagctcaccaccccttagttggacgccaaccattccagaaaccctataagggacacacgctcctcactaatatacaatctagcccagctccacaaactacaaacaaaagaattgttaagcttttggatatctaacactccccccctaaaagctagcctatttctttcctttcaaaccgtccaaaaaatacacaacggaatgaatttccatatctttttccttttctttcccacaaaagggcctctctagctagttaagacctcctttacagtttctggaaagactcactgcacacctgatgacccaagaacaatatcccacagaactctgactactatacaatgaataagaatatgatttacagtttcttcttcacaaccacatagaaaacaacaattaggaaactgccatcctcttttctgaagtctatcaagagtgagcaccctcccccatgtagactcccaagcatagaatgcaaccttggttggtactgaatccacccaaatgcatctagaaggaaaaacaatatcattgggtctggccaccaatctataggcttctttgaccctaaatttgccattccttcctcccttccaacagactgaatcttcctccatagaaggcttgtaatccctcagaacatgcaacaagttccctatcatatccatctctcaatcattaaagtccctcaaaaatcttagattccaccccccttgaccaaaattttgatcccacatctcctccaccgtcgcattcctatgagcagccatagcaaataggtgggggaagatttgggacagccttgtacccttacaccaaacatcagtccaaaaattgattttgcttcccttcccaactatgaaccccatgttatcccaacaccaatcagtttccttccatatttccttccacacccccacgccgaaagccccataagccctctttgctctccaaccatgaccctcttgcccatatttcgctgttatcacttgcttccaaagatcatctttatcataagcaaatctccagatccatttaccaagcaaagctttgttcaagagcactagcttccttaagcctagtcctcccttgctcttatcctcacaaatcgcctcccacttgattagatgagctttcctttccgcacttccccctccccaaagaaaatctctttgaactttatctaatctcctagccactgacttaggcattcggaacaaagacatgtgatagattggcatgctagccaaaacgcttcttatgagagtgattctccccccttttgagatatattgccgtttccaccgcgctagtctcctcctcactttctcttccaccccatcccaaactgaagtggctttattaggagcccctaatggcaagcccaagtaatgagaaggaagagaacccaccctacatcctaattccactgccatctcctcaatctcctccaccacaccaactgggataatttcacttttgtccaagttaatccttaagcctaaagctgcttcaaaccacaaaagaatctaactcaaatgtgttaggtgctctttgttagcctcacagaacacgattgtatcatcaacaaagaagagatgggagatttttagattgtgtctcctatcaccctcaatactgcaacctgaaaggtagcccctcgcaaccgccctcctaattagggcatctagcacttccattcccaagacgaagaggtaaggagataatggatccccttgacgaagccctttagaactcgtgaagaatccagcaggaaccccattaactagaactgaaaacttggttgaagatatacaactccacatccaccccaaccactttgagccaaatcccattttgtgtagagtctttaacaagaactgccaattgatgctgtcatacgctttctcaatatccaacttgcaaatgagccctttctcttttcttttctgccatgagtctatcacctcattcgcaattaaagaagcatcaaggatttgtcttcccatcacaaatgcattttgagttggggctaccactttgtttaacactctcttgagtctattagctaacactttagccatcgatttgtatagcccccccaggagactaatgggtctaaaatctcccaaattagctgctccccctttcctaggaatcagaaccaggaaagtgttattgagacttttgagaaaggagctttgctcatgaaactccttaaacatctccaagatctcccctttcacaaaatcccaacaactttgccaaaacgccatagtaaagccatccggcccaggggctttatccccactcatctccattaaagctgaatgaatctcattttcagagaacggaatctcaagactctctgcttcttgctggctaatttgatctaattggattctctcaatatccgccttccaccccaagtcttctgagagcctctgttgataagcatttgcaatcccctcccttacctcctgttcctctaccagccaaaccccatcaattttaattctatccaaagagttgttgttgcggtgagcattcgccatccgatgaaaaaatcctgtatttttatccccttccttaagccatacctcccttgagagttgtctccaatgactttcttccaaaaggacccattttttatatctttcctttgcttccttttttaattctgtctcttccaaagacaatcttctttcgctttccacacggtcccaataatccacttgctgcagggctgcgcttttgttaccttccagattttcaaagacctctctattccaaactttcagtttctgtttgagctccttcatctttgctgccaatctatagctagcagtgcctctgacctcaatttccctccaccaactccggataaggtctagaaaaccctcaacttttaaccacatattttcgaacctaaagggagatggccctttccttagcccgcctccttctagcagaatgggaaagtggtccgacacaggacgaggcaaccttctttgaatcaccccactgaacttatctagccagctaggagacaccaagaacctgtccaatcttgcccaggactggttattcaggcccccgctccaagtaaacactcccccttgcaacgggagatctaccagccctaaatcatcaataatatgagcaaacctcctcatggtcggggttattctcccttggcggcttctttctctttgatggagggtactattaaagtcaccccctaggcaccaaggctcgtcccagattcctcttacagccccaagctcttcccacaagcaatctcttttctctttggtgaatgggccatagacacccgtaaatacccaaacagccccattttccacattcttgaatctacacgaaagggagtactgtccctcctcccaatccacaatttccagcgaccttttatcccagcaaatcaacagtcctcctgccgccccatccgcatccaaagccctccaatctaagaatttttgtctcctgaatacacagtaagtcaactttttgattccttataaatgtcttgataattttcctcttggacctgtcatttgccccgctcacattccaacttaacagctttagcttcattaatctactgtaagctgatcccctttgccctgtaaaaggcttttttgcttacaccctttctcataattaactgagcactccagtctcttcaattccctttcaaattttgacttctccatcaattctttgctatgaattctctcccgtctctttcttattttgatcaagaagttcaaaatttccttttccaacccttctatcgaaaaccccaaaaaatgactgaacttggccaaactgctttcttcccatctatcctctttctcaattctgacttcttgaagttctgtcctctctgaattccactccacccccctagccaaatttgagtccttattgaattctaccaagtcccaacatccattgtcatccattccgggaccaacttcattactttcctttagtaccccagagtgatcgaaaggctcccccaccggagtccgatcaaaagaatacaagatgagatgagaagacccataacccctttccctctctatccttagaccagaatcatacctcatggcttcctctgccagcgccttgtctgttgctgaaagtatggctttctcccttgtcttccttgcttcctctgactcccatatgactaggtgttctccctctaaagagctcccgttgctatcaattctgcagtccagaagacttcttttctccaggggtcttttacctttgttttgggccatggactgacttgatctggcctcttccaactcagccattgggcctctcccaacatgagcccatctcttgggctggctagtctctggtccatcaggaatggtcatcctttcctttaatgttgggcccctcactgcactcagcccacatgagctcttctctaccccccttatcattgactcctgggcctgatctactttttctttccagcctaagttattctcctgccagcccagcctcctatctgaatttatcaactcctcgggccgttcaaagtgggccgtgggctgaattgaactggccccatttatcaagcaaccttccccgtcaaaaacccagctcttggacgacccagcctctagccccgccccttcttccatcactccctttagctttagacccgaatgtttcggcccacagacccttctctcataacccatgggcgttgattgttgggcctggtcaactatcccctcccagcccataaccctcttctggctccctgtcccctcctctgacgataacagcgccttggtcttttcaatggccgattccacctccacgcgcgagccggagcgtgagatgttgtcatccctgacctccccccatcttcgactatcaaccctaagcttcctgactgacggcctgagctcccaccagagggcgagggtgaaaacttcctcctcgatcccaatctctagcgtactcggtttgtctccgccgtccgacctaaccagaatcctagcccattggagctcttccagtttctccgtcttcgaatcgatgtcgacgaaaccaccgcattcatcccccacccttctcaacacagtcgggttccacaacgacactggtagtccaaagattctaacccaaatctcgttactttcttcctcctcctccctgcatccactccatgggctccatttcttgaaactcagccttatctctcccatcattttttcacctgatagggaaacccaatgagcttcttccaaatattcaaattccaacaagattctgcttctctccaatttttctagccctaggcgtcctttcaatccccaagagctcgccagaaatctccccaatttttccaaatcttcttcatctccaaacctagggttccaactcccgacaacacaatgctccaatttttccaaatttctttggaattcctctctccataccttcacctgaactggattaataactctacagatcggtctcttcaccacttccgcgaacgttctcttcagatccatgtttccacctaccttttcttcttgcatatggttcttctattgattgacctacgcagaatctgtagattttccgccattgcattccatccatttttttctcctctaccttttggaatgaagatacagtattgttttcattccaaatcagttacccctagccggaggaagcatcccgctttatttacacttcgcagcagagagaaggatctcccctgttccttccaatccttcacccatctgtctttcttctcgtcccttatacagtggtttaggccctccattaaaaaccctaaactctccacttccattctgacccaagacgagactccccctttgctttcttttataaatatttggggttttcctctcaaacaccttggattcaactgtgaacctgctcccccttcgcctccttcgagacccctccttatcttcatctccctcgccagcgtaatctcgcctttttccttcctcacgagctcgctcgctgccgcgctcactctctctctctcgcactctctctcgctcttttcatgatgctccttgctgagtaaaataggttcttgttcagtggcagggatattttcaagagggagatcaatggtggcaacttgatgcacctgtccagatcttgtgacaggttttcctctactgctcccccctttacctcctaactgaggcttgccatggagtttccagcaagattcacatgtatgttttggttgtgacaataattacaccaaagtgaatctttatcatccggttttcttccttctacttcggatcccatcgacttgaaatttccagcagtagttagtgttgaattttctggagtatagcctcctagcatcataacacgacgactttattctccaatcacaaaggcacaaacctcccggaggggtggaagaggttctttccccaatgtttgtactcttacttgctctaattcaagattaagaccaaccaagaattgaaatactctctcttgctccattatcttcttcaatctagtagtgtcttcagcaattaccatttctatgtgctggtaatgatctaattccagtcgtaggcttcacaatttattgtaatattcagtcacagaccaagtgggtatttagtaaaccaacttaataacttaaagtgatttaacaacttaatttaagtcattaagtaaattaaatatgtttgataaaataacttaatgatacgacttaaagtaaaaaataaaaacaattaacttatttttaagttcacatcttcattttacctttttatctccatttgccctagttacttccatgatcttctttgctactccataacctctgttgttacttgtcctccttttaccctagttataatttatgaggataaatatgtcaatttgatgatttagaagaagttttaagttaattttatcaaacaaccttaatacttaaagtaagaattaagtaataagttttaagtcaacaacttaagtataatttaacttaaagttaatttaagtcattaagtaataagtattaagttttaccaaacacctttcaactcatatacttgtgctattattccaatcttggaataagtttgattgatagcatcctaaatctctttggcggtggagagaaacaagtatatttggctaatcttcggctgcatggagtgtagtagccaagacatcaccatgaaattttcctcatctcgtaactcatatcatggatcattgggattaggttctaatttgacacctataatataagccatcctctctttactttcaatgaaaagtttggctgattgggaccattgtaggaatttctgaccattgagtttttgagtggtgatttggagtgtaaggctgtcattatgaggggtagataaatgtggtaaggtttggagtgtagaggaggggttagagggtaaggttgtttgagaggatggtgtcttttcactagtttcagacattttagggaaaagacaacaaggtttctatttttgttttggagcaaacaagagatgaacttaagggaattataatgggaactaagggaccaaaaataaaggctagttaaaaggagggaacaaactacaataatgaaagttgtatggaattgagcaatgaaacatagagtgtaaagaatgcgagagatttgtatgtaattgagcaatgaaagctctatggatcttagcaaagtcaaacttcctgctctgataccacgatgaaaaataagctctcgtattctttacattctattttacaatataatatatgtatgtatgtatacatacacacaaagaatgactgataagatcccttaaattaggctatctataaaaaaagaatccttaaaattaaacaatttgattgcaagagtcctatatggaatttacccaaggttcctatatggaatttgcctaaattttggtaaaagaatcataggtaagcttttacaagaaaggaaatatatattggagaaatcagatatatatggaggaaaattaattattgatttcttggcctattcttctaacaatttatgtcagatcatgagagcctttttgattttactaatgatttcggcaatgcataaaaaattaattaaaaaaaatttataccataaaaataataaataaataaatcttaatcatcatgaatctcctcactatagcaattaagttcaagtgaagtataaaattataaacaaaatcaaacattttttaaaaatttattatgttataaaggaaaagaaaataatacgtatattatcatttttcttatttcctaaatgatattcaaactacatagaccattaaacataacataaggtatttttaaatattgaaattcaacaatctccatattagtatttggtatttattttcaaaatcatatttgttattagtacctcattcttttgttgaaaaatatcactaatttcatcatacatatatattctcttgaaaaaactagtttggtatatgcattattgcttgtttttatcatttctcaaagtttcatccaaatttttctaatttttatggaaatttccatcaatattcccgtaaatctagccattgatattgatattttcaacattgcctatacatatattcttttagatttaaaattttagaaattcctagtttttaaagcttgcttataactactaatttttccttgtttttaatattcaaaacaagtatttttgtgttttacatttgcttctttatttatgcaacactttccttgtaagtcttttcttaactatgctaatgtttttcttgtaaattttttcttttcgtttttttttttcttgagaaacgataatataatatattaaataaggattaaaaggtcctaaggaaggagaaaaaatcctcccaaaacaaagaactaaacggttgggacctccaaaatattaattaaagctatacaccataaggaaagtacatacaacaacctctccttgtaagcccacaccttacacaccgacaaccaatcaagttttctttactatgctttgcaggatagctcatttgttttgtaccttttatttctttttataattcagtttaatgtttgtttcttatagaaaaaagacaaataagccccctttaatttag

SEQ ID NO: 10618 - DNA, 13512 bp, Vitis vinifera
  Intron number 12 from transcript GSVIVT01015960001 (locus GSVIVG01015960001) derived from phytozome v7.0 (chr-ID chr 9; pos 16223965 to 16237476 reverse strand)
agcatacacgtgttctttgtacacataatattcaggttattcctctgaaccctttggtatttttgagacatttttgtacgctagtaagatccacacaacaatttaaaattttcagtttgaggcagcaggacaatgagtaagttttctataggaatcattcagtcttaaaatataatgtttgatgcagtgtagcagagtagaaataaaacatatcttaatttattggatagtactattttgtaatagtgcttacaacattttcttatataaaaaattacagtatcctacaattgcatttatagcgtggttcatatgaccggtgaaaaagagagatcctaatctcatgtttgctaaatgaagccatagtcccaactaccattttttttttggtcagggggaaaggtttggatgcaaaaatatccttacccttttttgtatctagatccatgcactttcttagatccttgaaacttatttctttttttatttgaaactatacttgaaactatattaactaatagaaagattcacaaagaaggacgagaggtgctttagaaaagaacgtgcaaaaacactagtagtgatgcaacttagtgcatgaagaattttgtgtagcatcggaaatccttgtgcaatttgaattagtttcctattgttctaatttcctatatttaatatatttacatttttttttatgttcttagattttctatttaatatataggcaactaggtcttttatgagtagaactgttttcctattatttctaggtttaagaagattttaaatgttatttatgttttgaagattattatttagtttcattatatatttttatttaatagctttaatttacctaaagtttctccttgtttctaatcatttttcttacttctgaatttggttattattgtgaacgaagtagatcatcctttgatgtaggacaaccctaggatggttgcctacactcaagggtaggtgggctagggttttatttctagggtgtaaggagaggaacaaggaataaattttatggtagagaaaattataagataagaaatagattgaaagaagaaacaatgaagaaaagatagaaaaccttagagtctcactaaggccttctaggagtctcacctagaagaaaatcaatggagtctcaccattgagggttgcaaccttgcaatgaaagaaagtataatattattatcaaattctttcctttgatttacattgattagcctattctctaagaaatccaaaatctactaagactctaataacctattttaactcaaattctaattatattataactcaattagctaatcctaattagactccaacaaataccaatccctattcaattctaattaatattaatcctacttaaagtttacttaggtcttccctgtcttccttgaataaactttaaaaggctttcccccatcaattctccctgatttgaaagaactcggctccgacgagttagatgcttgatacaattcatagagatcggggttaatcttctgaaaatctgttgtcgtaatccatgtattctcagaatgtggtttgcctcgccattttaccaaatttttttggtatccgccttgtcgagtagacacaagttgatcatcaagaacatactcgatctcaggacgtgggctaagagtaggtggtaattgaagatccaactcttcacttacatcattgtgatggccatggtagatatacagatcttccacattaaatattggactaaaatgcaagtttgaagggagctctaacaaataaacattctcacccaaccgctttagtacccaaaatggacccactttcttaccttgaagcttttgatatgtgctcggatgaaatctttctggtcgtaaacgaaccatcactagatcaccttcttgaaactgaatatatcttcgatgtgcatttgctgcctctttatagttctcattgctgattttgattttttctcataccttttcatgtatatctcgtatatgacgtgcaaatgcatcaccatcttggctggtgcggacaaaagtaggtgttgaaatttggcattcaaagttagggttttaatttaggaaagtattttaggaataaaaaaggagagatcatttaggatatttccttaggattcagtttcctaatttttggagagaatcaagctagattgatattttcttattcagtcattttgtgtatatatatgtgtatggtgtgtaccaaatatgaatcaataaaaaggaattcagaaattcttcatggtatcagagccagttttctgaaaccctaatcccttctggccgcctcttattcaggccatcattcattccggccaagtctctctgaccatctctcaatccgaccatctctctctctggccatctctcattccggccatcagtccctgttcttagagacaagggagaaaacgcttttcggtcggttgaatcgtcgtcagaaaaacattcatcgccggggacttttccggcgaacttttccggcgacgtattttttttcccacactgcaaggagcacctggaggagatctccaattcttcccaaagcaccggagccagaaaaccacccacgggccggcgactgcatctcacgcactggcgcgtgagctactttccggcgacgcgcttcctcctccagcctcgcctgacgccgactagccacccttcatacctgttctgccatccgagccctgcacgtgcctcttttggggttcttttgcctccgcgggctctccgaacagttttccggcgtcctccggctatttttttctcaaccccaatccctgcatgtgccttgggaagtgttcttctacctttccagtggtgccacggttgtttttcttttccattaggccggtatctctgattttctctctctaaccatattcggctgtcttccttatctccatgacaaaatacggaatggcatcatcacaagtatccagcgtcacggcatcagaatcagggggcagttctgaaattccaaaccttggtggcagtgattcctctcctattctcatcacatgacacaaattaaatgaccataactatttacagtggtcacaatctgtgttgctgttcatttgcggtaaaggaaaggatgagtacctcactggagaagtagccatgccagaaactacagaaccgggtttcaggaagtggaagattgaaaacagcatgatcatgtcatggcttatcaattccatgaacaatgacataggtggaaattttttactgtttaggactgcaaaggacatctaggattcagccaaagaaacttactcaagttttgaaaatacttcagaactttttcaggttgaatcagccctacatgacttccgccaaggagagcagtcagttactcagtattacaacacactcacaaggtattggcagcaacttgacttattcgagacttactcatggaaatgtttggatgatgcagcaacatacaggaaaattgtggaacaaaggagactgttcaagtttttcctaagactaaacagggaattggatgatgttagaggccgaatcatgggcattaaacccctgccaagtctcaaggaggctttttcagaggttaggcgtgaagaaagtagaaagaaagtgatgatgggatccaaagagcaacctgccccaactttggatgcctctgcccttgctactcgatcatttaatagtagtggtggagatcgtcagaaacgggataggccttggtgtgattattgtaagaaactaggccattataaggaggcttgctggaagcttcatggcaaaccggctgattggaaaccaaagccacggtctgacagagatggcagagcacacgtggctgccaactctgagagcacatctgttcccgagccaagtccattcaacaaagagcagatggagatgctacagaaactattaagccaagttggcagtggcagtactaccgggatagccttcactgctaattgaagaggaatgaagccgtggatagtggacacatgtgcttctgatcacatgacaggagatgctgccattcttcaaaattacaagccaagtaatggtcattcatccgtccatattgctgatggttcaaagtcaaaaattgtcgggacaggttccataaaacttactaaagacttgtatcttgactctgtccttcatgttccaaacttggattgtaatcttttgtccattagcaaattggcccgtgatctccaatgtgttactaaattttatccaaactcgtgtgtttttcaggacttgaaatcggggaagatgattggcagtgctgaactgtgttccgggctctaactcctcccatgtggccaattctcaaaccaagtctctcaagcaagttgcgtacagtctcagagtatgttagagtctttcaattctgtgtcaaattctaaggtcaataaagatagtgagattataatgttacactatcgccttgatcttcctagctttgtttaccttacaaaattgtttcccaaattatttatcaataaaaatccagcatcttatcattgtgaaatttgtcagtttgcaaagcatactcgaacagtatatcctcaaatcccatacaaaccttcgactattttctctttagtacatagtgatgtgtggggtccctcacggataaaaaatatttctggcactcgatggtttgtgacattcgttgatgatcatacacgggtgacatgggttttccttatgaaagaaaagtcagaggtctggcacatttttcaaatcttcaatcttatggttcaaaatcaattcaattccaaaattcaagtcctcaagtcagataatgcaaaggaatattttactagtagtctcagtacttatcttcaaaatcacggcattatccacataagttcttgcgttgacaccccacaacaaaatggggtggctaaacgcaggaatagacatctcttggaggttgcccggtgccttatgttttcctctaatgttccaaactatttctggggggaagccattctcacaactacctatttgattaatcgtatgccatccagagtgcttacctttcaatccccacgtcaacttctcttaaaaaaattccctcacacccatgcagcctcttctgatttaccactcaaagtatttggttgcacgacattcgttcatgtgtatcctcaaaatcgtagcaaatttgctcctcgagccaataagtgcattttcctagggtattctccaacccaaaaagagtacaaatgctattctccaaccaacaaaagattttacactactatggacgtctttttctttgaacatgtcttcttctatcccaaatctcatgttcagggggagtgcatgaatgaacatcaagtttgggagtctcttcttaaggctgtacctttttctccctcagagtcaccaaatcctttccaatccgcgcccactgagttgtccacacccatgccgtcatcagtccagccagcccagcccacaaatgttccttcttccgtgaccatccagtctcccatgcctattcaacctatagccccacaacttgctaatgagaacttacaagtttatatcaggaggaggaaaagacaggaattagagtacggatcacagccaacatgtggccaatatattgactccatttcaagtctacctgaagagaacataggtgaggatagggctggagaggtgttaattcccagcattgatgattctactctgccgattgcattgagaaagggtgttaggagatgtacagatcatccaattgggaattatgttacgtatgaagggctatcaccatcttacagagcatttgctacttcatcacagagaaggtgactagtgagacgattaaattgaactacgttcctaccaagcaccaaactgcagacatcctcaccaaagctttacctagacctaacttcgaagacttaacttacaagctgggattatatgatatatattctccagcttgagggggagtgttgaaatttggcattcaaagttagagttttaatttaggaaagtattttaggaataaaaaaggagagatcatttaggatatttccttaggattcagtttcctaattttaggagagaatcaagctagattgatattttcttattcagtcattttgtgtatatatatgtgtatggtgtgtaccgaatatgaatcaataaaaaggaattctaaaattcttcagtaggtaatggtataagatcaacaggttgtttaggtttcagcccatatgccacttctaaaggtgagtacccagtagtacgattagtggagctattgaaagaaaattcggcttgtggtaagccattatcccaatttctcaactgatctctcacaatgcatctcaaaagattaccaagactgcgattgacaacttctgtttgtccatcagtttgaggatgaaaagaacttgaaaattttaattgagtacctagcttggcccacaaggttttccaaaaatagctcataaacttgacatcatgatcagaaacaatggattgtggtaatccatgcaatcgaactacttctttaaagaataaggcagcaacataagaagcatccgaagccttcttacatgggataaaatgtgccattttggaaaatctattaaccacaacaaatatagaatcaaagccccgttgtgtccttggtaatccaagtacaaaatccatgctcaagtcttcccaaggtttggaaggaactggtaatggcgtatataaccccgtattttgctttgaaccttttcctacttgacatgctcgacattgtttgataaccttccaaacatccttctttaaactaggccaaaagaagcgatcttccaccaaagcaatggtcttatctcgtccaaaatgtccacccattccgcctccatgaagttcccatatgacatgatcacatagagaagtccttggtaatcataaacgatttttataaaacaagtacctttctaaaatctggaaatcaatacatgttacttttgaaccactcaaaagagaggaataaacatctccaaaatcagcatcattgtcatagcaatgctttaattcttcaaatccaattgtagtggttgacatgtttactaagagaagggccttcctactaagggcatcagctactttattttcaattcctacacaatgctttaaattaaaggtaaacagttgaagaaaactactccattttgctgtcgagagttaaacttcttttgagaattaagatatcgcaaggcttcatgatctgaatacaaaacaaattccttgtaattgagataatgttgccaatgcctacttgcttgcaccaccgcatagaattcaagatcatatgtggagtattttttctttgccccattgagcttctcactaaagaaagccacaagatgtccctcttggctaagaactactccaattcccacatgggaagcatcacaagccacctcacatactttctcaaagtctggtaggcgtaggataggagggttcaccatcttggatttgatttcttcaaatgccttgttggccgccttggtccaaataaataaaccaagtttcatgcattcagtaattagggccataatagagctgaaatttcgaataaatcgtcgatagaatgtagccattccatggaagcttcgcacctcatggatatttgttggtactggccaatcaacaatagctttgatcttctccggatctgtttcaacacaacaaagccaagaaatacaacactagggctcatgaaagtacattttttcaaattaatgtaaaacttttcagccttaagagtgcacattacttgctttaagtgttcctcatgatcttcacaagatcgactatagataagaatatcatcaaaatagacaacaacaaaccgtccaataaaaggttttaatacctgcgtcataatccgcatgaaggtacttggagcattggttagtccaaacaacatgactaaccactcatacaatccatccttagttttgaaagatgtcttccattcatcccctggtctaatacgtatttgatgatatccacttcttagatcaatctttgagaagattactgatctaaccatcatatctagcatgtcatcaagtcttggaattggaaatcgatacttgattgtgattttgttcattgcacgactatccacacacatccgccatgatccatccttctttggtgttagtagggcaggaactccataaggacttaggctttcacgaataaatcctttagtaagtaattcatcaacttgccttttcaattcagcatgctctgttggattcattctgtaggctggtaaatttggtaatgatgcaccgggaatcaaatcaatggcatgttgtacgtcacgcataggagggagttgattaggtaactctgtaggccagaagtcagaaaagtcatcaaggattttacgtacgtttgctggatattccttatcttgttctttagattcttccacttttcgagccattaaagcaaaaataactttagtttccttgctctcattttcaaattgacacatactaagtaccttttttggttgtgcattctcatctgacttcttaattggagagacttctttcattggacgaaggatcttcttacatccgttgtgtatgagagcatatgtattttcatagccgtcatgttgaactcttctatcaaagagccaaggtcttccaagtaaaatatgacttactttaatgggtaagacctcacaccatatagactcttcaaagtccttaccaaaaatgaatgttactaaacaacgaaaacttaccgagatagaggtgtcattaacccatgctactatgaatggatttggatgtctctctgttttaaggtttagcttctcaacaagttcttgtgaagctatattcaaactgctacctccatcaatgatcatggtgcataatctcccttggcataaaatacgtgtttggaaaatgctattacgtcaccaatcttcttctccttttacttttggaacggttaataaaggtcgtactacaagactatgtccttccgtcataccatcatagaagtcacattcttcactaacttcatcttcattgtaggtctctttttcctttgggtaaccttccaattcagattatggttcttcaacacaaaagtgtaaacctttggttgggcatacaacagcataatgaccatgcccaccacacttaaagcataaaggagtcacgtctacttttctatctccattactcattgatttttacccttattaccattcttataagccacattcgaagtttgttgagtgttgcccccaccatttacatgattagaagttctgaagtttgatatacttaaaggtttgcttgttgtcctgttggagaaagtgctcccaatttgtgaacttggacgcttggaaacccgaaattttaggccttcttctattttgagggctagttgataaacatcatctacggtataagtgtgtgcaactatcatctcaagttgaatctccattcgaagtccagctttgtagcgggctgcaagttgagcatcactttcccgcacttgatttcgaatgcttaattcatggaattcttctgtatattcttcaacggacttggtaccttgtttaagggaaaacaattttgtatacataagttgttcataatcagttgggagaaagtgctccttcatcttcaacttcatctcgtcccatgtgtcaataggcggttggccagttctatgaacttgattctcaatattatgtcaccatagacgtgctgctcctttcaactttgccttcacaaaacgaacttttctattttcgggcattgcataccaatcaaagtaatcttccattgacataatccaatcaagaaaagttgttggatttagttttccataaattcagcaacttcaagacgtaccttttttgtcacatcatcatctagctcaaaaagtttggcccttctttgattccccatcataaaattgtcttgttctttgcgtgatcgacttggcaattgtctaaattgatgacttgcgatctcctcttcaattggtcatttttcttggctcttctctaatagcttcatgatctcatcaagtttgctatttagttgtattatagcatcttgatgggattgttgtgtggctgaaatttcctccaagcgtattgtagcggcatcttgattgctagaagtttttttggaactcatgcttgcataagttgctccactcctttaagccaagaactttggctctgataccaaaattgatgtaggacaaccctaagatggttgcctacactcaagggtaggtgggctagggttttatttctagggtgtaaggagaggaacaaggaataaattttatggtagagaaaaatataaaataagaaatagagagaaagaagaaacaatgaagaaaagatggaaaaccttagagtctcactaaggccttctaggagtctcacctagaagaaaatcaatggagtctcaccattgagggttgcaaccttgcaatgaaagaaagtataatattattcatcaaattctttcatttgatttacattgattagcctatttataggcttctctaagaaatccaaaatctactaggactctaataacctattataactcaaattctaattatattataactcaactagctaatcctaattagactccaacaaataccaatccctattcaattctaattaatattaatcttacttaaagtttacttaggtcttccctgtcttccttgaataaactttaaaaggctttcccccatcactttgccccatcatcctctcttggtatatgcatcaaatttggtgttagagctttggttttagcttactatatgatcaatcatgccaccacaataataattgagaagtggatgttgtcaagtgcctgctttaagtaaagcattattgtaacactctttagaccaagtagagtttctttaaagacaagtcaagatattggccatatcattaacttaatgcattatgaacctgctagttaattgcccactggtgatcttaatcttcactggaaaatgatgtgtagtaattggattttagtggaaaatctttcctatattctgcaccattaaagatcacctattgaacgggctaaatgacaatagaaaagaaatattaagattatgtttcctaaattttgtgcaagtcctaatactaaggatttttttcaattggattaacatcatagatagcatatttggatatcatgaaatacctaatgtgagagaatataagttaggatcaagtttgttatgtttcaattttattaatattttgtttttaaaatttgaaatatagctgttgtaggtgattaggaagctatatctctctgtaattttggttcctattttctatggatttagtttagcctagattctatcttgttgctaggtatttttctataattgtactggtcattcattcaaataatgcaatagagctattttatttgttttccagtcactgtttaaatggtattagagcggtacctttggccctagggtttaatggctaaaacaaccatggttgggacaagtagaggagaggacttgtctatagtctacttgagccaatcccaataaacatcacataacaattgatgaccatattgcagggagaagagaatgtttccctccaacttacagtctacaagttgaacggtaaaaattaaacttgtaatggtcttagtcagtcaaatgggttattcaacggagaggaaagcttggacacctgatggagccactaaaggaccagaggaggatgaccttgccttttcaaggatgggatgcaaaaaattcaatagtggttatgtggttgataacttgattaattccatagagactgaagttagccaaagatacctttttttgttgattgcaaaagatgtttgagatgctacaaaatgacctactcagatttggggaattctgaaaaagtatttgagatcaatcaaagctatgagatacaaaacaagggagctgatccatgactcaatactgtaatgcattgaagaacttatggcaacagcttgattcattttataaggctgattaggggtgtgccaagtgtagtgtgaagcagaaaaaaattattgaaaagaaaagtgtgtttaatggtgtaccaagtgttgtgggaagcagagaaaaatgattgaaaaggaaagagtgttttgagtttcttactagtctcaataaagacctagatgaagtaaatgggccgaaatcaacagttgtgaagtgagatatctccatctacttgaaataaatgggccaaaatcaactaaaaatcaaacatgtttccaaattttgctgcattctatctaatgatgaaatgtattaaattaacaatggcaagctaaaactggatgatgatggccttcttttctttactgttctctctctctctgtgtttaatattttggcattatatcagaaattagatgtttacatcatattcaaaagaaagaagagttattggtcaatggaaatttctagtcaatttaattttctttttttttttgttccctttcttgtgtctccactttttgttaatcatctagtggcaaagttgttaatgtgtaatgtccgtcaattccatgtgattttttatttattgaattgattgttaaagcaagaattaagaatagtgatatagtgaagagggtttatctattgaataactgttgcaattttcaattcagttggttctgttttggaaatttcagtatctataattcttctgggtggtttggattgttcttcatgaacttaatatgatggaaacacatgcatgagccagaaattaagtttgaactctgtcctcaaaaacttcttacacgttgcaatatggttacataacatatgatggaagtggaattggaatattgttatctggtcttttgatgttgttgtagttattggcacctttataattgtttcttaattcagtgaatttggtcttggaatcaacttatgtctagatactactgttcaagcatagcattatttgaaagtgagccatagcttgtgttgggctactagttaacccaaaagcttaagatttagatgacgaactaacaatgtttatcaaacagctaatacttaggctaatagttgacaacctgtctcacttgtgaccttatctcgcatgtgggtttaatatatagaataaatgataagcttcaaaccccaggcctcttggaaaccaaggttctggtactgtgttaagctatcagctacccccagaacttaagtagttaaataatgggaaaaaaaatgtatagcaagttgagtgatactttggtcttagcagctcaagtgagcaatgtttatgatcttgaatgctgttttaacttatgactttcacaaactagtggtcttccaaacaaagttgagaattattcagtatttctacatcattcaggca

SEQ ID NO: 10619 - DNA, 7146 bp, Vitis vinifera
  Intron number 3 from transcript GSVIVT01029788001 (locus G SVIVG01029788001) derived from phytozome v7.0 (chr-ID chr1 2; pos 14696714 to 14703859)
gttgaggtaatttcttgttcccgtaccttttaaatatttttttttctttagttgcattatttttaaagttacatgtatgaggtaaatgtttccatttttgctacaaatcattggtgtgttttcaaataggcacttcatctgcttgggttggtctgtgtttcagttatcaattgcttatcgtatgtttcatgttaaaggttattggatataagggacttttgggaactttattttgtcaacttgactatgttgtctttgagtaaaaccttatttaacagacttgtttggtccatctgtcattttcctaaactaacgtcttagttatatcactgccatgcggaggacgattggctaagctttgtgttcatcctatctgttaacttttaaagcttgatggaaggatttgtgctagaaatcgtactggcctggaccgttctaggtccttggcttctcacactggcctttctctctctccccatgtatttatgtatgtatgtctgtatatgtgtatttgattgtgtgagttactatgtttctctcctatggagaaaaaaatgcttacctgttctctgagtgaagatattctgcgtgatagtattagtgaaactatttcacttgagagctggaatatttcccatgactgaaaatttgttttgctgaggtgaaatgagcttttgggaaagttaacattcagtgatatcagctagctttgatgcaattctatagtcacatgtccaaattgactgctattaaggttttaggcagctacatttttcatggggcaattaggaaaatggaaatggcttaaaggtgcagctggtttaaagctatgaaaatagttatttggagtgcaaagcattagtgaaaccagaattttcgtagtttgaagtacagtattatagcaaaccaatagctgtcaatttgagctgcattacactatcacttaagttcacttattgctattacaaaattttatagatgatttctactgtattgtaagagtacttgctataagaaaatgtaaaaactgtaagaattatgcctagaatacttaggcatcactcctatgtctgagttgcatcaatcagatgttcactcatgtcatttgttatggaaaaaatttaccataatccatgtaggctacaatttgtctcctaattttctatctagagaatgacgccaaaactgaagcttcaaatgtagaaacttcaatttgtaaaatcaaaattagaattactaaatgccacaaaaaaggaccattgattcaactaaatccatctgccacattggagaactcatggactgcacataaaatatggaattcccagaatcacaggacttcatgaaacttagaagcttctattaaaataaaaccagctgcaacatacaagaaggtgatatagacttgtataacttgtttttctacacttggatagtccattttagttaattggtgcacttctatacgataccattgtttcctttgctgcagaggatccatctgagttatgttggatgtagtctaactttgcttctgagcaggataggtgcttaggtgaacatggataagctattgttgatgttgatgtgtggagtggaggcagtaggattcccctttgagctaggatgtgggacaagttctcctctagcaacctaattgggcctagcttagggttaatctttcaaatctaaggttgttgagattccatcatggaaagatttgataaaagattggctagttggagaaactttttctgtccaaggagggtaggtttgtgcaagcatgtgttctgggggaagggagaaaatggcaggattactttagcaatgagtgttgttcagtttccatgcatatttcatgttgaccctcatgattttggtattggcacggaagagattatagagaatatccaaagggagatcctgatgggttgtgtatgtgtggatgaactgggtacgccttccctgttaaactattgtctatgcattagaaagcttttcttgtggtatggctgttggagcttgtgaaggaagggcagtttcaaaaggaaatggtgctgggttggatttatgaagagcattaggaggggatagaggatattttatagtcatgttgtgttcaaccttgggaaaggttggagggtcctcttttggcttgatagttggtgtaaggatgtggccttggtgcctgagatttattaaagtggtttactgttgggagttggtgttgttggtgctttctctctctctcccttgcttttttctttttttccctttttttttttttttggagttttgttttttgtgaaattcttctatctaaagccagtgggttgaggggaagttttatctccttggaaatggttttgtgcacaaaagcccccttgaatgtggctttgtttatgaaaacaacagtgaagggcaagaacttaagaattggccaactaactgtgtggagaagggcttaactggtgttgtatgttggaatgatgagaagattacggatcagtatttgttgcatagttctctagcaatgtagctttggctcctcattgggtgtgtttttctttttcccttttttcctttttatagcagagggctctactgtaatgtgggctatgctgaggatggtttactcgaggatgataaggggagataaactatatttggagagttagcaaggaaagttctgtgagttggcatatactgccagtgtaaaaaaacccatggtgtcatgtggtgcatcaacaaagagacgaacaagaaattagaacaattttgaggatcaggaccctcatctgtagaagttgaaagatatttgctgaaatcttttttggggtatggttgatgcttagattgtgttttctgttgatgttccctgtcatacaaacttttgatgtaatacctcagtgaatatggggtttgaacccacagggaaaaagatgatttccaagttgagatcagaaatggggcatataagcttggatgataaaggcgaatgcacttaaaggaattggtagagaatggtgaacattgctaggctgtctaactaactaagatgaatgtataagcaagctctgaggtcagaaatccactgagattcccaccctcaaattattcctcccttcttaactatctgtttttggcctaaggttaaggtaggatcaaggactcggaccagttgcttttggcctaaagtccaatcctcaatcctattcatacaaaggtagtgttcagctctagagactccattgaacttggagctcagatctactcccaaggtagcttgacttgtggccttctctttgaactttgaactttttaagccaatgggggaaccaatctgtggtatggatcaccccagattcattcctccttaagcctttacaaaaattagttaagtattgctgaagttaaaacaaatacataaattggatgaaagcagacgaaaatagaactcatcattgagctggaaatgaattgaaacttgtattgcaaattaaactgaagtaaaattgtgctatattagacacttaaaagataacacaaaaactgccatgaaaactacaatggaaactgaaactctcttgcttttcctaaatatagcagaacttaaaaattgcccctcctaactactgctctctacctcccaatttctgaaaacttctccctcccttaaaaccagacaattgctctctactctcatgatggtgaattgctctctgtctctccctactgttgtgtgctgtgttccctgtcccctgtcgtgtttcctgggttatgctcccttctttgcttagaattccctttttggtttatgttttgtcctttcatcctcagattcagtcacgtccctatatctgtaataacctctagctggtgtgaaatgagaaggggctaaaataatcaactttgcaactctaatgcgccacgtggttacctagggttggtgcgccctaaagttccattgccatgtgtcagctcagggattgcccacatgccttggaaatggagcccttaaaagtgcgcacaggtggcctacaggtttgctcaagtactttgcccaggtggcttctgcaagttcatggtgccaatggtgttgtggaatcttgtgcagggagtttgcccaggtggcttcaagttgcataggggttcctgcacaagtttgagaattgctcaggcttggcctaggcaaagtcatattgcccaaacttgcacagagctgcttaggcatttcctaagaaattttcctgtgcatgttccccttcttcccccaaaacttgagtgtttcagtagctttcaacctttgtatcttccccacagccttgctaaagcttcaaatactccattccataaaaaagtaagcttcaaaaaaatttagcatgatttcacttgaaaacatacaaaataaacataaaattatcaaatgcaattaggtaaggtgttaatagcaagagttagtgatggatgagttttaaacacctcaaacccaccatcataggttccttagagccgattaaaatgttagtttgggtccttatcagggcacacagttattttagtagatctttcttgcttgccatgggtgagttgtcttgtagttgaccttatcgtttaaatttcttctcctttctatttatggttttccctgatggtgatcttcttatacctcatatttactttggttttgcctcctttctttgaaaactgttccatcgcttagacaaattggacatactatggcaattatgctccatgctaataatcttggtgccatagatataatggaaattatgcttatagttgctgtattctcttgctaacataacatattgtgttcatcagttgagccagctttaaactaatgacctaacattctcttttggcctgtatcaggatgaaattgatttctgcaatcattagatctctcttatagtaaattgcgttgccttttcccttcctttggcagttaataaattgaccatttaggggatttccatttgaaaacagaactcatgtagctataattatttgagccctaccagctgcaagtggatcttgctaacaatttctgcctcctgccattcattggtaattaaaatgaccttgattacatcaaatctgcttcaaccatagtttatattaacaagaatccaatcttttaagttcttatgctgtgtcgatttttttcctaactatggcaatgacactgaaacttctagaaatacttctgttgatgattcattttcattatattaaggtatgttttattatgtcattgagcacatttctgtgtgtgaatttagaatattaaaatgtaacaaataaattagaaaaaatcccagcaaaccttgtaaaacaatctttaggaaacctctgcagcactccattattcagtcccaagacatctataaagcaggagagaaaactgaagcagcttagatatttttgctggaagcttttaggctccataactttttctagggcatcaatttttgtggagacttatggcttcaagttgcaacacagagaagattaatcctggcttaaatctctacaagggaatgaagtgttaataatatacacagatggtgaaaaataacacagtactgttctatggatcttcctcatacaatgaatgacatgagcacaactgttacattttgtgtagctgtgagaacttccttgttttattccattttgtccctgatttagtacttcactaccatgatgagaaagaaagatgaaagttgttaaggagaataattggaaagagaatttttagcccctgattgatcaatttctggaggacataaagaacaatgaaacattattgttgaatgtattctactgaaagtatacagcataaaacatattaatgaaacattattgctcaaaaaagattctcacattgaattactagtgggtgggcattgagccttcaaacaccattattatcaatgaagtcatactagttaagagatggtcctggtgatccccagtggcttgacaagccttggtttgaatgacttgaatcatggcatgaaaaactccagatcataggaagaatctaatagaaatatggctgtctgcaacctgaccaaggagcttctttgaccttgggcaggggtgagaaatcccaaggaaggatcagtcttgtctacgacccccttggacagatggtgaaacagggggaaagaatttagtggttttggtttagtttaacaaggataaatttgatttgcacagcaccatcattcaggaactggaatgacaccatcccacaaaggatgactggataagaatggggactgacacagcaccaggtactaaaatggtctttaacaggaaggaaaactgattccagggaaactagtctcggcaccccctaagttctcattgctcttgatgactcctttgttgcttgtgggctcagggcttcctctaaccaaaccatccatccaccttgtgacttcatgcatcataaaccttgagttgtttaaacttccatgcagctggtttcaggtgatacatggtctatggccatgtggattgtagagatgaaacaagctagaaacattcatgatgaatatgttcaatctgacattccactcaccaactcaaccgtttagcctcataatttttatatttttaaaataaaaatgggcatgcgaagttacgataatgccctcatcttcttttcaatccaaactctgaacccaagtctgtcttcttccccttacaaattggtataaatattccatcatcaaatacttgaagtggacttcctatcatcttttggaggagtccattaaatgatgcatgctgaattatttgagaatgaaaatttctgaggtagcagcgtggaaaagcctaaggtctgggttccatttaaatgcaaataaactaattgattgaagaaacaaaaaggcaaaaacaaaaatgataaaagaaaaaaaggtagaaaagaagacatcagaagacaaatacaaaaaaattaagaggataggaggaaagaaaattgagaatagtctaaagaatttggaaggccttacacataaatatactgtaaggctttatacttaaacatgctgtctttggtctgatggagtggtaaattttttttctgtttgttggatacaggca

SEQ ID NO: 10620 - DNA, 1683 bp, Vitis vinifera
  Intron number 23 from transcript GSVIVT01020162001 (locus GSVIVG01020162001) derived from phytozome v7.0 (chr-ID chr 1; pos 9632105 to 9633787)
gaaaaaggtgagcatccttcatgcattggtagctacttgtagaatcattccatttttttgtgaggttataatttgatgttaataggtcttgtttagagtgatttattactctcttttttaaaattaaaaaagaaaaaagaaaatcaaaatcttctattaacacgtaacttttattagtgggatacttagtccatgtaatgtgatggaataggttgaaaatagaaaataacaatgctaaaagtgtaaacaagttttaaatgataagtgacaatgtttatttgtataaagaataaaatcatttaaaaacagagctacctctggttaataaatctttctttgtttattaataagaaattgaaatcagataatttcactttctattttcagaactaaaaattatactataaagaaagggcgcatggtcagattagaaacaaggaaagtagctgacactgtttttgggtgcatgaatatgaagccgttctataaaagacattgggggaacatggcatttgatatgttgactaaattagatcagctgtaccaatttcatcatgatttgatgatttttattcataaggtttgaggcttagttatttggagactgaaagcgcaagggaaatcgcttttcagaggatgttagctgatggagagatgtctgatctttaatgtgacagaatgagtttcccttgcttgtattgtatggatttccttttgagtagtagtgataaactcaaattggttgggagaatagtacacgtggtttgtgcaagaatcaagggacaaattagaggatggacatggcactgctttgataagaaaaagcaacaattagaagaggccctaggatttatgttactctgatttgtgacttgagagtgcgtgtttaattatgttattttgaaatttcgtttaactgttaaaatataaaaattatcatgataatctaagttttttatatcttttatatattaataataataaaatataagaaaaatataaacctataaatgaaatttaaaatatttttaaataaaaaattgtaaatatatcattatttcttttattttattaaatacatttgagttagataaattagtctaaaatttgtttttaagttctgcatattattatcgaacatcactaattgtgtcatatatatatattgtttttaataaaaacaatcttttttttggagttttccctaatatttctgagttttgaccaatatctacctcactgatattttttgccaaaattttcgttgatattttccgatatatcccgatgtatccataaaatcccaccactgatatttccatgaaaaccgacatttttatccttgattagaagtagtccactactagtttccctactaaatcatcatgagttccctactaaatcttgagtggtattctagtttcaaggtttgtttccttggatgttcagttttatatataaatatatagatttatctttccaattttcaagtagaagactctactttgtcctcctgcataactgcatttatgaatgttcttcttaagctctctaatttttgctatggtttcttcatgtcaatatgaatgtttcttttaatacattttttccttcacatcatttaatgcgctaaaaatagcttttttcttgttgattagtttgaacttggatagggttttcgca

SEQ ID NO: 10621 - DNA, 19084 bp, Vitis vinifera
  Intron number 10 from transcript GSVIVT01029079001 (locus GSVIVG01029079001) derived from phytozome v7.0 (chr-ID chr 5; pos 12023815 to 12042898 reverse strand)
ttgtactttttgccactggtaaatccataccttattttaattgtagagctttccaataacgtgttatatcattcttgcatcagagatgaacagcatttttgtatttagtttggtccctggtagcctggttggaacatcttttcctacatgaaacaacacttttaccttgctctgaaggagctaactgtctggcaactgcatcattctcacccagtgtcccagatgtttggtataaaataggtccatatcatgatttgaattaggatgttaatgggtctctgttttctcataaaatgaggtcctgttatggtttcatttagttaaacaatctcttttatggaaccaaatcctcaaaatatgtttgatactctcttggagttcaaggtagtacgccccttaaaattttggatcaatttgtatcatctggccattggttgttggtggcactgcatctcttaggaacttttatctactgttggtatgggattgttgggccttgttgagtggcctgctccatatttcacatatggtggcacctggaaaatctcattccttttgtgggctctccaaaataatgaagaataaaaaaatgtagaagtttggaagaaatgattatgaactcctccatgtaataggagttccaacttcttgtttcctcattctcaaattggtttttaaattttgaatatggtttattgacattgctggttgatacccttgtttccattaagtttctggaggttcccaaatctgcaaggaaatgttttctgattaagttagttggtttgttccagtggaacttgggtggaagtgaagagagtaattgtagagaggatgaatgaggtttcaaggggtggtagaagctggtttgcattggaggctaaatcttttgggcttttggttgaggtaaagggaggagagttgaatgggtgcatttgggagagatgcagaggggtcacgtcctggatcaactttggagatgcaagcttacattgtttgttgggtggagttgaggcctgttgcaaggagaatggagataggaagtaggctcctgcctgggaggagaggggaaggaaatataggctggaatgacgtgcaaacaaggctggaagattccttctctgctctgttcggggcttagagttgaaaagattttgcattatttttctagaagggaagggactattagggggctggaacaccctggcggagaaattcataggtcttggagtggaaccgtttgaaggggctaagcctccaatcaccccagtagctcagacaagggagaagggggcagtttttgggtcgtttttagaggatgcaaagtcaaaatctaaaaggtcaggagattcagtgtggttggaagtgggggtaagagagatgcagggaaggatggaacaacttaatcgttgcttggtggggtaattccttggctcctattctagagttggactttcttgggaggtgggtgaattgtcagtggttcctaaagggcagatacgagaattgcaatgttaggtagagggctattcttgtttgagtttgagtctttgtgggaggctgagcgggtccatgctctaggaagaaagagggttcaggaaaatttcttgtgtttggagaagtggacccgaaggtggggtgtttaggaaggattttcatgctaatgaggcttgggttatggtgttgggtctcccacttcatttgtggagttgtgaggtgttcaaaaagattggagatggttgcggaggttttattacagaggatgaggatacaattggtatgattgagctgcaatgggccagaatcttggtaaagctggatgaaagaagcttgcctagttcagcccatgttgcagtggggtcaggatgtttttctattcttttgtgatgggaatttccaccatggtttgtggtggtgtcgtcgtgtgggaaacatgtgaatggtgtttcagtggatagggaagaaggtgagggaagttcacgcgctacctgcagtggaaggtcaaaggaaagatcagtataggtggaagcacagtgcggggtacaggacgtgtcacctccaggtgatttcttgaaggatggtgcaactttttctgttgcctgttctgcaaggacgcaggctgtggggactgtgaagcctagcgaggaggggaggttagggggcaacggtttgactaagggcagtaacgtgtcaagctgaagcaatatgggagttttggaaagcgagtccgatgatttggaaggcagggcgggcggtgagggtagggatgacaatgggacaggttttttcaagtacccgcccctaattggacgagtttgagaatttttttaaaacttggggtgggttcgagtattgccttatccagccccgtcccaccccacctcgattatatataaaattaaattaaattaatttttattttactatttttaatatatagataataataaaatattttttaataaaatcaattataaaaaaatgtaataatttaattatttaaaattaatttaaaaaaaattaaaaaaatttcaaaaaaaaagttaaatggcgcggggcgggacgggtatgagaatttctcatacccaccccgtcctgtttaattttttaaatgggacgggggtaaaaattattttgaataaatgaggcgggattgggatgggggtaacccatcccaaacccaccttgttgccatccttgggtgagggaagtggcttaggtgggctgggttgtttggagtcttagctgttgattgggctggactcacttaagactggaggtaggaagataggggattttgggcccttttatctgacaagccttgcaatgggttgtgagggataaggtggaaaggagtttgggccttttgaagtgggctttgaaggaggggggggttactttttaaataaccaaaagtctccagttggggctcttttagctagggctccaaagagagctgagttggggattgaaggagaggagctgagagatggtatcctcgatggggccctaatgggactagtggagacgttgacttcgaaggaggcttttagggcggtggccaccgaaaaagccctcttgtttgaagctttaaggtatggagatctctctcttctctaggggtgtcggtgattctcttcttcttctactcctttttgttttgaccagaccttggagatgggtgggtcttttggcttgggaagggtggaagacgttgatagagaagagagcatggtgcaaagtgctgatgctgtcagggcttttggtgattgggagtgactcgctggattggacgaccaacggggggagaaggtggaagtttttgtctttgatagaagtgggcgaaaggagtgaaaggctggtggtgaaggggctaccgcaggaagaggggggggaccggaggaggctaggaagctagctgtatggcgaagtttagcagattgcttggattcccaatagaaggttttaaagaggaaattctgaatatgctccaaaagataaataacataagagaaaagggcaaatagagagtccgccctatgtctactaggtttgagagggagttgaagaagctggagtgctcgatcaattataacgaaggaaaaaaaaggaacgggttgactagagtaggggacaaagagttgtgccttacatgaagctgaaaattttgtcctggaatgtaagagtgaatgatgtcaacaagaggaaattaattaaggctttaatcaggtctcaaagggtggatttggtgtgtttacaagagactaaaattcaagatattttttttggggtggtgcgtagcttaggagtgggaagatttctagagcggggtgcagtgaatgctaggggtgtgactagaggcgtggtagttttctgggataacagagtattggagtttgttgggatggaggtgggtcagttctcaatttcttgcttctttaaaaattttgatgatggtttcgtgtagatcttcataggagtttataggatagttctcagttctcaaagggtggattggtgtgtttacaggagactaaaatgcaatatttgttttttggggcggtgtgtagcttaggagtgggaagatttctagagtgaggtgcagtgaatgctaggggtgctgatggaggtgggtcagttctcaatttcttgctgctttaaaaattgtgatgatggttttgtgtggatcttcacaggagtttatgggcctactgttaagaagagtagagaatttttttgggaggagtttggggctatccgggggttatggaatgacccttggtgcttaggaggggaatgtgattagattcccttgcgaagtagtgggagtgggatggtgtctttagctatgaggagtgtgaaaagagagaaaagggagaatccctaatttttgttattgaaaaactgttaataatacacattggacttgggtatatatatacatgttagtgggacccacaatacaataaggaaagaaaaggaaaaggaaaagtaaataacctaaatacctatacactatctaacactccctctcaagttggagcatatatgttatatgaaccaagcttgttacaaatgtatttaattctaggacctctgagagatttagtaaaaatatttgttagttgatcatttgaattgacaaaactactcgccacacatcctgatgcaatcttctctctaatgaattgatagtcaacttcaatgtgtttggtcctttcatggaagactggattggatgcaatatgcaaagcagcttggttgtcatagatgagtttcatctgttcatcctttccaaatctcaactcccgaagaagatgtttcagccatatgagtttacatgttgccagagccatagctcgatactcggcttcagcactagatctggccactacatcttgtttcttactcttccaggatattaggttacctccaataaaaacacaatacccggaagtggaacgtctatctgtgggtgagccagcccaatctgcatctgtgtaaccaacaacctgggtatgacctctgttctcgtataacataccttggcctggtgtgcttttgatatatcgaagaatgcggattacagcattccaatggctatcacatggtgattgtaggaattgactaacaacactttcaggaaaagaaatgtctggacgagtaatggtgaagtagtttagtttgcctacaagtcgtcgatatctcccaagatctcctaaaggctccccctgtcctggtgtaagtttgacatttggatccataggagtgtctaccagtttacagtctaacatatcggtttcttccaaggtgtctaaagcatacttcctttgggaaagaaccacaccggaactggattgagctatctcaatccctaagaaatacttgagtttccccaagtctttagtctgaaagtgggtgaaaaggtgttgttttagtttctgaatatcattctgatcactgcttgtaatgacgatgtcgtccacataaactaccagatatatacactgtcccgaagagttatgatgatagaaaacggaatggtctgctatactgcggaacatgccaaactcttgaacaacagaactaaaacggctaaaccatgctcgagaagattgtttcaagccatatagagaacggcgtaacctgcacactaaaccagactccccctgagcaacaaaaccaggtggttgctccatataaacttcctcagcaagattcccatgaaggaaagcatttttaatatctaactaataaagaggccaagaacacatagcagccatggagagcaatagacgaacagaagctatcttggcaacaggagagaaagtgtcaccataatcagaaccataaacctgagtatagcctttagcaactaagcgggccttaaggcgatcaacctgaccatcaggaccaaccttaattgtgtagacccaacgacaaccaactgtagatttaccagagggtaaaacaacaagatcccaagtgccattggagtgtaaagcagtcatttcatctaccattgcctgtagccagcctggatgggaaagagcctcagaggtgctcttgggaagagaaacagaagatatagcagaaacaaatgcagaataaggtgaagataatcgatggtaactcaaaaaattgtaaatgggatgaggattacgagtagatcgattacctttttgaagagcaatgggtaagtcagtagaaggaggcagagtcgaggcaggagaagccgaagggataggaagtgagtcagcaggtacctcggccaaagaaggaggaatagcgacacgatgacggcgatgataaacccgaagtgggcgagaaggcactacatcgagtggggagataatgggaaggggtaagacttcagaaacaagaagagactcagaggtggagaagaacggtgagtcctcaaagaaagtgacatcagcggagagaaagtagcgatgagtctcagaggaataacaatgataacccttttgaagtctggaatatcctaagaagatccattttgtggctttggcagagagtttttcctgtccaggagtgagaatatgaacaaagcaagtacaaccaaaaacacgaagaggaaggaaataaagtggttggtcaggaaaaagaagggaataaggaatctgatcgtgtaatacagatgagggcatatgattaattaaataacatgctgtaagaacaacatctccccaaaaacgaaaaggaacattactatggagaaggagagtacgaactgtctcaacaaaatgtcgattcttacgttcagctaccccattttgttgaggagtatgaacacaaaaagactgatgaatgatcccatgttgggacaaaaatgaagtaaatggtgcagaaaaatattccttggcattgtcactgcgcaacatacgaatagaaatattgaactgggtttggatttcagcataaaatttctggaaaatagagaataactcagctcgatttttcattaaaaataaccaagtacatcgagaatagtcatcaatgaaagtgacaaaatactaaaatcttaaagtagatgcggtccgacaaggaccccaaacatcagtgtggacaagttcaaaaggaaactttgctcgattattcaaacgctttgggaacgagacacgagtatttttcccaagctgacaggactcacacgcaagcgacgaaaacgatgaaaaacaagggaccattttctggaacttgaatagactagggtggcccaggcgactgtggatgaggaggggagtatcagtggaaatgcaaactacaggagttgaaggcgaggtgaggtgatagaggccttgagactcacgtcctatgccaatcgtctttcccatactccggtcctgcaaggtcacaaatttatcaaagaaagtgatagaacaattaagagtacgtgttattttgctgatggaaataagattaaaaggacactcaggggcataaaggacagaatggagaggtagggaagggagagaatgagcgaaaccaaaacctttagccatggtttgggaaccattagctaaagtaacaataggtaaggcggaggtagtagtaatagaagagaaaagatccttattaccagatatgtgattaaaagcgccagaatctaaaatccaaggtccaagagaagatgtgtgggtaagacaagtagaagcattaccagtctgagcaacagaaacaatagaagcttacttggtggcctgatagcagagatagtcatcatactcactgtcagtgagggaaataccctgagatgtggaggaactgggaggctgaggcgactgaggatcagatgactgggccacgtgggcagtgcggggaggccgcccatgtaactgataacaccgatcacgagtgtggccaagcttattgcaataggtgcaatgaggacgttggcctctacctcggttaccattgcgtcctcctcgagagttagtttgagaaactaacacaaaagaatctgaagtgttatcagatgacaaagtctgagtggaggagatacggaggaggtgagcaaacacatcatccaaggatggaacggaggaactgccaagaatctgatcgcagacggtcttgagatctggacggaggccaataagcataagaaccatgaagaacttgtcaatctgtgttcgttgatccccaacatcagtagtaagaggcatcacgatcaagaattcctccttaagagaggcaatctggccaatataagtaaataaatctatgtcttgttgtctgacattgacaatagaagaagccaccttataaagacgttggatatcattcgtgtgtagccctttcacctaatttcaaaatttaaatcatgttttgtaggctcgaagatgaagcagaatcttaggatcaactgattgccataacacactacataactgtgcatctatcttcctccattgtactctgtcaacctcagggatatccgcctcctgcgtaacaaggtgatcctcataaccttgacccataaaccaaagctccacagaggcaaatcaggacaaaaaattttcactgccaaccaatttctccaaagtaatcataggagatccagatatgacagaggaaaaagtggaactttagtagccatatctacttatttggagaacgaaatatgtttggattgaagagagccctaatacgacttcagatcgtggctgaaagaagaaaagccaaggatccgcgactgtaagaaaccaaatagtaaagaaaaacaaatgtggcactactgaaagggtagaagaacacttcctaagacatgtgcaaggctcggggtggagaggaagtcaccggaggtcgccggaaaagctgtttagaggtctaacggagacaaaaaccccccaaaaaatgcactttcagggcttggatggaacaagcacagatggagggtggctagagggcgttaggcaaggctagaggtggaagcgcgtggccggaaagtgctccacgcgctggcgcgtggccggaaagtgctccacgcgctggcgcgtgaggttcaggccgccggagaagaaatgcgcatggccggcgtgtggctgagaatatccctccgatgctttgagaaaacttgaagatctcctccttgcgcacctgatggtatggtcagtgtcggaaaaggacttcatcggaaaaaggttgccggaaaagtcgtcggcggtgagggttttctgacggcggtgagggttttctaacggtgatacggttgatcggaaagctttagaagatgggaaaggtgactgtaatgaaacacggtcactgaaagatttcccataatggattcacgggtaaaccggaaataattagggtttttttctccctaggctctaataccatgtgaaaagagagaaaagggagaatctctaatttttgttattgaaaaactgttaataatacacattggacttgggtatatatatacttgttagtgggacccacaatacaataaggaaagaaaaggaaaaggaaaagtaaataacctaaataactatacactatctaacaaggaggtttttagaggtgattgatgatttggatttgagaaatcttcccctacagggaggactgtttacttggagttgtggactcaataaccagtccatgtttagactggatccttttttggtcactgaggattgggagagtcattttagtggggtggttcagtaccccctccttagactagtgtctgatcacttccctattttgctagatggaggaggggtgaggagaggaccaaccccttttcattttgagaatatgtggttaaaggaggaagggttcaaatatttgttgaaaagttggtggcaaggttttaattttaacagttcctatagttttgtcctgacaaaaaagctgaaggctcttaagactaacttgaaattatggaacaaggatgtttttgggaagattgtggttaataagtcgttggccttagaaaaagtctctttttgggatgagcaggagaaatcaagagagttaactctggaagaagtggacgctagaaaggaggcaagggaggattataagaaatgggttctcatggaggaagtctcttggagacaaaagtcaagagaagtttggttgaaggaaggagaaaaaaacatagactacttccacaggatgacaaatgcccacaaaaggagaaattggttggctaagattaaaattaatggctcttggttttcaaaggaaaatgagattaaggagggcgtggctagggccttttagaatttgttgacggaaccgggagattggtgccctagcttggaagggttggaagttgaaagaatcgaggctgaggatgctacaagattggaggaagctttcaacgaatgggaggtcttctctgccctgcttgagctaaatggggacaaggctcctgggccggacggtttctccattgctttctggtagtttagctgggagtttgtgaaggaggagattatgggcttttttagagatttccatgagcgggggagatttgttagggtcctgaatgctacattcttggttttaatcccaaaaaaaggaggtgtagatgaccttagagactttagacctatcagcttggtggggggtctttacaaactgttggctaaagtgttagctagcaggctgaagagggtggtcaatagggtggtgtcttcggcccaaaacacgtttgttgaaggaagacaaattcttaatgctatgttgatagctaatgaggctattgattctatgtttaaaaggaatgagagtggggtatcatgtaagttggacatataaaaggcatatgaccacctaaattggaattttttgctgactgtgatgtaaaaaatgggcttcagggagaagtgggcaagttggataagatggtgcattcctttgcatcgttttcggtcttggttaatggcactctattaggtttctttcaaagtactaggggattgaggtaggggatcctttatcgccctatctctttgtgattgggatggaggccctaagctaccttattaatagagttgtgggtgggggattcttattaggctgtagggttagggaaaggggaggagatggggttaaagttacccattttccgttcgatgatgatactatggtgttttgtggggcttccacagagtagatggtctttttgagctggatattaatgtggtttgaagtcatttcaaggctgaaaatcaacttggacaagagtgaaatcctttgggtaggaagggttgagaatatagaggatttgacccttgaacttggctgtaaggtgggggcactgccttcctcttacttggggctccccttagggttactcataaatcagtggcggtttgggatgggttggaggagagatttcggaagaagcatgccatgtgaaaaaggcaatttatttctaaaggagggaggatcaccctcatttagagcactttgtcaagtatgtccatatattttatgtcccttttgcatatgccacgagtggttagattgagattagagaaaattcaaagggactttctttggggtgggggagggttggagaagaagcctcatcttgtaaggtgggaggttgtttgttatgataaaaggaagggtggtttgggtgttagaaacctatctaatctcaatagagccttattgggtaaatggagttggcactttgcggaagaaaaggggactctatggaaaaaaagtgattagtaggaagtatggggtagaagtaggggggtggtgtacccaagaagtaaggaaggggtatagtgtggggttttggaaagaaataaggaaggaatgacctttaatgaagagcaatttcgttttcaccatgggggatggtagaagagtgagattttgggaggataggtggtgtggtgacgacacattaagcctttcctccctttgttgtttgcattggtggcataaaaaaaggagtgggtggcagaggtgtgggatgcttcgggggaggaggggggctggaatccacgtttttctaggtcatttaataattgggagatggatatggtggagagattccttgtcaccttacaagggaagaaggtggacactaacatggaggatagggttcagtggaaagaagccaaggatggtatgttttatgttaaatccttttataacattttagagggcagcagtatagtcccgtttccgaacagcattattcggagctcttgtgctccctctaaggttggtttttttttcttgggaagcttcatggggtaaagttttaaccttggatcaactaaagaagaggagatggtcactcccgaatagatgtttcctttgttgtgctgctgaagagactattgatgaccttctaattcattgcaccaaggctaaggttttgtgggacttattgtttaccctatttagtgtgctgtgggttcttcctttgtcagttaaagaggtccttcttgggtggcatggtttgttagtgggcaagaagagaagaaaggtttggagagcagcccctttgtgtctcttttggacggtttggaaggaaagaaatgggattggttttgaaaataaggagttctcgatttaaagattgaaatattctttcgttagtaatttttggtcttgggttaagccgtgtatagatgaagggcctacttctttaatcaacttttttgattggttggactctagatgagggcgggtgtgttttttgaacccctctctcttttgttttttgcctttaggcacctattgtatacttcctgtatgctttgggttggccattaggcatcctcttcttattaatatatactatgcctttgcctataaaaaaaaaaaaaagagtttctagaggttcctgtaccccctcttcaagaaaaatttgtcatctacggggaaaaaaaatccaagtaaaaaatcgtctgaaatctaatttatataatgttagatatctaatttcttttgacctacatagatttcacaatctttattcactaattctgggaagtggctgttcagtctcgtctttgattttttacagctcacatctaatttgagctcaagaaacttggtgttctatgctcatgatctatagtgttaaaattgggcaattggaatccattcctgatgcatggtttcaagaagaatatcagctagttgcctgttcgtggagatgtatggagtacgaatcaggctactatctaatttctttttaatgaagttttgatccacttttaacatgctttgtttgatcatgttggattggattgtggggtaatgttaattgctaacttattattgcagtatggtttcatagttccttcctattgaatcttgagatcttcaaggattatctttagccatcatagttcacaaatcccatgcgccattgatacgaaattagcttttgcacttgattgagtaacaactaattatatgtgtgtgtttgtatttttttagtcaaaaacaaaaaatgtactaaacatggataaagaatcctccctaaaatatagcaaactgatcaaaaagtatgtttgaagcctctaaaatactaagaaaacctatataacagtaaagttctatataagaatattcaagatgcaattcattactccaattttagagtaacttctccttccgagcaagacctgcttaatactcctctccttgctaacccaaacctttcgagatatacactgaatcctagtcgagctggaccacattgaagtgaatgccctttgatgaaaactgaaaagctattatagctactatccaagtagactacaaccaagttacttcaaacaacattagagctaagatttcttaaggaaaaatctagaaaaacctttgcataagttgaaaatcatcaaaagttcttagaataagtaggttcttcccttttataatgataagcctcaataactttctgatgatttccaagacacaattagtagcctctatatattcatttactatagttctagtaaaaaaataaaaaataaaaaactgaccttttgacttctaatttaataacaaacttttaccatgcaaacctttgatattttcaaacttgccataaattgtctattaatgactacatcattctctcctccttaaaagaagctcatactcgagtttggtgttgatggaaacctcttttacgttctcaccaatgtacaaatataaatctgaaatgttgaatgttgattctattaccatatgttttggtagatcaaccatataagcattctccccaatcttcttgatggttttgtagggtcctatctttcttttactagcttggaatgagagtcagctggaaatctttccttgcatagatacaccatcaccatgtcgccttcttgaaagctttggttgcgcttcttctaatctgcatatttcttatgctttgcattcgacttctcaatctccaatctgatttctttatgcagttttttcatcaagtctgccatgttttcaccctttaagctatttcttcccatttttggtaaaggagctaaatcatgaagatgcattggctgcctcccataaacaagttcaaaaggacttttgcttgtagtttgcttcttggaatagttatatcaaaagaagtacaatccaatcctttaaatagacctagaaacaaatgttttaaatagaataaactaggatgtcctaatctgttatgccatagcattatttgttcatgcacaaagattgaatgatcactaccaataaaaccctgagcttgtttattttcaaaccggttgtcatcaaaatagtagagatcattgatcaatctagcactgccaatcatcgtcctcaagttcaaatcctggaattcacaaagagaggtgcaaaaaacaacacgaaaattagaatccttagataaacaacttacaaataagagattacaagagagttttaggacatgtaaaacgaattgtaaaacaatcttatcagacaaacgaatagagccttgcccagcaatagaagacaagcttccatctgcaatacgtacttttttatttccagaacaaggtgtataagagataaattagtcatgtggttagaggcacttgaatctatgatccgaggtgcagataatgaaagagaatatgcacatgaaagactacttgactgagctagagatgctataagagtactaggagtcggcggagcagctgtagcaattggtctaattgttctttgctcaatgagggtgtctcagcagcatgtgctttagcagggaaacgattagagtcaccttgcttattagtcttccatccaacgggcttccaatcagttggcttctcatgtaatttccagcaggtttcacgagtgtggtgtggtttattacaatgatcacaccaaactcttggcttgtcattcggacgacgctggttattaggcttgtgagaagctgttgctgcaatgccaagtaaggctgagttttccatagatctagagagcttcttcccaagcataatattccttcgactttcctcacaatgcacttcagcgaacacttcacctagaggagaggttgccaaccaacgattctaccccgaacttcatcaaactcaacattaagcctagctaaaaatttgaatatccgtgagctttctaccatcttaaaatagttacaatcatccaaatttttccactcatagtcattgaataagttaagatcctgccataaacccctaagcacattaaaatatttggtaaccgaattctcaccttgacaaatatcaccctgtttgagttgtaattcatagattttggactgatttccaaggtctgaatacatcttaataatgttgtcccaaagagctttggcagtaagataacacatataattcaagctaatctcctcctccatggaatttaccatccatgccatgatcatggagttttttgcatcccaagtggcataactagggttcgtcttcgctggttctttggtgtcactagtcaaataaccaattttgcctcaacccgtaatgcacatccgaacagattgtgatcgtttgagaaaattgttctcattaaggcagattgtggtgatttggacagagtgggaatgagaattggatgtgggtaattttgaggaattggaaccaatagtaatggaaggagtagattcagaaaattttgacatggtaaagagatagcaatcgaaaatggaaagagaagaagaacaaaattggaaagaatgagaggaaaaagaaagggaatagccaattaacttggctctgataccatgtagaaaaggctaaaaaaaaatgttgtatattaattgaataaggaagggtaacatacttccttttatagaaaagttacaacaaatcaaactaaatctacaactgtacacaaatttctaggaacaaaataaatttaaaatatacaacttatccctaaaaaaagaaacaaattatccctaaaaaataagtaacaaccatatcagaaaaattttgatatgattgagattctcaacaagttttcatcacccttatggagctgggctagattatatattggagaggcgcgtctatcccttataggtttcttggagtggtcagcttccaattaagggatggtgaggctctattggctttctcttttgttttgagaggtgctagttgctttgtatacccccgtatgctttgtagcttttcgcctctgttttaatacaattatgatttacttatcaaaaaaaaaaaaaaatgctatggtgcaagaggtccaaaaggaatgagatcccaaagtctttgaagtacctaccttcgagctagttgatcggaatagtttgtagcataacctcaaagccaacagacaatgtacgagaagatgatcgaccatgtttccactctccatacacaaaaagcaaatgctaggactaagagctttgtaggatcttctcaactgtagcatgtcattagtgtttacattcttgtgtgccactagccaagtgaagactttcttcttagatgagacttcagatatgcataaaaagatttttggatggaaacgaattggatctgatggattagacaagactaaaaagaatgacttatttgtaaataatattaaagaagataatgatcaagctcttgcatctaggatggatggagacaaatacaaacaagtgagagatgacatgagtcttttaagggcttctactgctaagtaagagaggttatgacataaattaaggttccaatacaaagggaaagagaagctaagaatttatgagataggaaaatttattaagacaattctgaacccccaccacaaatctttccataaatggattcttgatcgaacacccaccacaaaatgcatgtctagaaaaatcctgaaagactttgcaatggccttttaggagcagcgatgtgaccacctgaatataatgttggcatcaaacccattagagtgtgtactatatgcttaagataacttgatgccaaggagcataacatttccgagaaaacctccatagccacttccctaaaagggcatgattccttagagaaatgttcctaaacctcaaacccccttccaactttgatttacatgctaggtcccaactaatttgatggtctctcttatgctccctagtccttgattaaaaaaaaaatccctttgcatttatttttaatgtcattgaagaaggtatctttaaaaggtagaggaaatagctagggatgtgagacaagcatgatgggatgagagttatccttccacctaatgatagagaggcctttttccatttatccaatctttgcgaaattctctcaatcatgaattccaataagcacttgccttttggttcccctctaatttgagacccagatagggtagaggctaatcagagaccttgcattaaagcaacaaggttagcctagtgatctaatcctagcctatgttgataccaaagagagtattcatgtcaagattgattttaagtcttgatatgtacccaaaaatgaacagcattagcttgagattttgcaaatcttccaaacaagccttagaaaaaaagatggtgtcatctgcaaattaaatatggaacactctagtcctattcttacccataaggaagccttctaataacctactctcctttgctctcaataacatcctacttaagacattaactacaatggtgaagggccacttaagacattaggggatctccttgtcttagcctctagttgctttaaccccacctttagcgtttctgtttactaagattgcaaaattgtttgtagacaaacaaccccttatctaagtcctccacctagaactgaaccctttccctttgagtacattgtctatagatttaaaattataataattaatatgataacataaaaaattatatttcaataatataaaaatatggagataaattataataattaatataaaaattcaaaatttttgcataaattatattttatcaacttgtggtgtattggaagatttttattacaaaatcaataaaaaaatttaaaattttaaactaatcaaagtttaatgatattatgatataatattttcttaaagatttttcttaacatcctattgaaataaaagacttataacaataggatcttcattgtacatttagcggtaacatcaaagtaacataatatgtagcatcttattcaaatagagaagatataataaataaattttctaactataattaaccatatggtataataaataacttatcttactatgcttatgtttagtgttaatttgtttttcattaattccatatttgaatacttgcacccatcagctgaatgcccatgttctaagactttaggataaaaaggattcaacacctaaagcacatacccgcacctgcacttgacactcatacctaccatgtaacatagctttgatcataatctttaatataggcatgtgcttgttagtgttagagcttataatgttttttttttttttctaagttttaattttaatttttatagttctatttaccagaaaaaaaaaaattcttttattggttgtaggtcgggcgcctaacacaaaaaggttgaacttggaa

SEQ ID NO: 10622 - DNA, 4076 bp, Vitis vinifera
  Intron number 1 from transcript GSVIVT01035587001 (locus G SVIVG01035587001) derived from phytozome v7.0 (chr-ID chr4 ; pos 2543657 to 2547732 reverse strand)
gccctttcttccatcctcgaaacccaagaatccaggtacccctctcctcgtctttcttctttttctatttccccaacatatttacttactacatccgttccttgtttcggttattttatctgggtcgttctcggttttcatggcgccactggaaatatactgtccaatattctatttttcttctctttttccttgttcaccttccaattggacccaattggagtcccagtagtttaattatcattcggtgtttgttttgcaatttggtttcccttctgtttgtttcccgcggagctaccggaattcaaaatgatgatagaatcccacttctatatggtcaattaatgggtcatattagcttcgattgaatggggtttttccctttctgggttcctgatgccttcttttcagttcggggttcacatttgattgttaatttatggattccacgtgcttgaggatagagtttattgttcgaagacttgttgaatattattagattgtgattgagtttggtcttttgcttatggaaacaacataaaaagtagttcgtttataagacttgatttaaatttatttatgaattggtattgagtatatcagctacgtgaagacactatcattaatttctcgtcatataattatcatgcaacaatgtctatattaatgtgcctatttgttgtatactttttaattctttctcatgcacttcagctatataaagtattgttgttgttgttgttgggttttttttttttaaatttttttttaattttttttaattttttttaattttttttatttttttttaatttctatttctaaacatatgttatttatcatttttgaattttcatacatccctggatttaaggaattttctcctttgttttcttgtgttctgccatatccttccacacttgcatgtatacacttttttgtatgtattttcatttagcataggcattcatattaataccctgctattgattatttatttattttttctctataagattcacacttttatgtttgttccttgtttccatttttttttttttttgaattttcttgagtccactatcttctcctgattgtctggaataaatggttgtttattttctaacagtgcttaaataatgcggaagatattctctaaagaatgtcctattgattacgaagtattgtgttcttaagtcaaaatttgacctttttttttgtttgaaaaaaggtgaaattattcaaattgtgtatcttctttatgtggttaatcattttgtgtttatggcatgtgtcatgtagtgtatcatatataggatgataaatgagctaagcatcagaatgggaattaaccaagcaagctaacatggatacattcaatgtaaatctaaatcctcattaaactcatgcaacatccattacaaccaaacctgattttctggctatgttattgaatatgttttgtgctcatctgtgtgttttatcccagttttttagtgaagttttcataacatgtccacatgcgtgtatgcacaggtgcctgtgtgaatataatactaatttagatgtataattcatctgcttttcagattgaaatgacttctcgaatcctaactttagaacttgacctcaaatcatttcttactttatttgattttttaagtacacatagaagaataccgctagtttcaaagcctaggtctggttcaactccaatccacttatctgccacacgagcaaggtgctaagggccaaactacctgaccattaaatgggttttcatttaagatcaaagataatcctctgtggttctagttagtttttttatcactcttataattctagttatgaaaattgtagttctgaaatttttcatagagtagtctagacaaaaccaatataattttggcagcatttaatccttcttttctggctctggtgtcatgtgggtcctcctttgttccttgggaaggtgtttctagctttgtttgttcaaagataaacatggagggcagcacccttttgcttggtgtggtgcattttggaagaacagaatagggtttgggaagggaatgaaatgctggggagggagttgaaagagatttcccaccattcctagcactcttggactgccaaatctggtttgattatgatttggatccttccccctctttattgatattctaggtcctcaatgtttttctgttccctttttccttttattttctagcttctttggcacttgagggtttctctgtatttggggcctttattatggtgacattttttttttaatcagaaaaaagattggtaagatcttaaaatgaaattgcaaataagttgatggttttataaatcttggaaaaagaataattgagtttccatttttacctcctaaggtttagctaattggtcttcatagacaggttgtttaatctttaaaaaatgttagtgtaagagtgttgcttgaacttcgttctcttagtttggggttgcttgaattttgctcttgggttggttgagagttttttgttgcagatttgctcagagggtggattgtgttcagtctaggactgggtgtttctgtgttttgggagctgtgggttaaagagggcctgctgggagtagcccagttttctgggggtttagggggttggtttttgttagggtgattggtatttgttgttctctcttctttttttgcttgccttatgacattatttgtatactttgtgtgtactttgttgcatcattttccaagtggtttttatatattttctaaatttacctatataaaaaaaagtgtccccttcagttttgtgactgctcttcttgtatgttgcacaaaattgtgctgctattttagcattcttacggatattgcatgctttctgcaaacatctcctggagggtggttttgtctatcctcctaactttctttttttttcctggaactgtttttctttttaacatgtaaattataattttgaaaagccccatttttttaggttagggattatgtggatttagtttatgtatagaattaagatttagtagctgagttcaagggcccttggaatgtagttacgaaagtttgccatagcctttggatgattgtgggatcatggaagtttggtgaaatgagctcttggttgactgtagagtttagtgttagttatggggtggctgtttggttaggcgtcttattacggaggataggtgtttggaaaggcgtcttattaaaaaaggtagttgtctggaaaggcatcttgctagaagcagagaaccttctcccccttgttagggactttttcccccacaagctcattgtttgctttgtattgggtgttttggttctttgaactgtgtatagctgcagtttaagactctgctggggcttctgctgctacactttgttgctggtctctttgcacacactttctgtatgcaggtcccctcatttccttcaatcaaatctttttacatgttagaataaaactattgacatatggtgcattgaggttgagcaagttttaaatagagaaagaaatgggttaattatagaaatggtcatgtacttttatgggcctttagtgtgggtgtatgtactaagagcattttttctgcaagaatcaccttgaaagcattgactgtatccccaaaaggaggcacttgtgagtaaaccaattattttaggcaagaagagataaaattatgggttttggaggtttttccatgtagaaacttgagatcatattctgtgacttccattggctttatttgtgaatgcaaatatttggttttgcagaatatgttgattgatgggatatatgtctttaattaatctgttgaggattcctagttagactgctgctagaagttttactttcttgtcaatgttcaacttgatcattcttttcactgcaagaatgttcaattgtttatggggatctgtataagagtctactgagatatttttctgtgccaatcatggcttgtactcatcttctttttgcttggtttagaaaatttctaaattttgtttaatgtttaatttttgaattaagtgcaggtac

SEQ ID NO: 10623 - DNA, 4968 bp, Vitis vinifera
  Intron number 17 from transcript GSVIVT01037357001 (locus GSVIVG01037357001) derived from phytozome v7.0 (chr-ID chr 6; pos 15221878 to 15226845)
catcttcttgcttctcgtgaatctaattctggaaggcatgtttgttcgatatttaagcttctgcatgttactaacctaacacacatgtatatccggtcactaatgctgatatttaattattaaaacacctgagcattaattatattcatgatgtctttgctaatgatttgggttcaattattgatgcaaaatagttgaacagaaactgcttagttatcattgactaggatgatatttttacaagtgaaaaagttttaaattagacactacagtaagaactatgtggaaccaagttgtctggatctgattctgagtgaatgaagctcttagtgtatgtgtcaagttagaagctatgatatgtctagatggataaaatgtgttaaacatgggaagctcctttgaaagcttggcttgatggcctactgcacattagaacaacaaaaaatcaattaaaaattaacataattaacagtcattgaaaatataaatgtatcataatgagcgcttttgtggccaaggaaaaaggaaaaagacttcttttgtcaatgtagtgaactaagatcttattgtccaagttttatcaggatgatggtctttaaaaatttcttttttctttttttatgtattgcttggatgttcttaaagcaccatggaattcagtttctaaaaaataaaatgggagagtgacaggcatttctagggtgggattaggtggtttttttatggttgccatgaacttccttcaaacatttcgagagaaaggcagtgaattgtagtagttaggttcagtagatgggagttacctgcccttggttggctatagctgaacataaatggtagttcaagagggaacacaggaaaagaaggtcctggaggtttgattagaatggtcagtggttactatagggatcttacctcgtgtacactgtctattgcttaccgctggcaattttaggtaaccataaagttggtagggaagcatacggttcaagcttgtggaaagctattagcaagggtgggactgattttttcttgaggtcaagatttgccattggcaatggtgtcagggtcagattttggcaagatccttggaatggtgagaatcctttaaaacgattattttctggggttattcaatcttgtaatccataaagagacttggccagcagattattggcacaggatttgttggaatcctaggtttagaaggaattttttggattgggagtggcttttgtgtattccttgttgcagctattaagccctttcttttgtttcaagctgcttgggggacaagttagttttgaagattactcaagactcgatctccgtcagatcctatactttcctctgctttccaaaatgcttccatattcccttctaagttgatttgaaattccagagtgccctccagtgaggtgtattttggtttgtgtctgtaaagggggaggtgtgggaaaggggatgagaagcagcatgagagaaaattctgacaatggaccaattcatgaggagaggctggagtatagttgattattgctgactttgcaatcaagatcttgagtctgctactcacatcctcatccatttctgggctatgatcttcggtgttccctaggtgcttctttgttcagttggagatgttctttttaattgccatggtacctttgtgggaactacagttgattcctttatatctattttagatgacttggaaagagcacgatagtagaacttttgaaggagtggaataatcatgcttggtggtgaaagttgtgcttctaagatattgttttgtggaataatgggggattaggttcttctaatttatcctttttagattttgttgatagtatgggggtttgttagctagacagaggtttaggtttgtcctctttgatgtgttgcttgtacatattatatgtacatgggtggttactgaccgttaatctctgttattaatatactaaaacctaaatacatgacaactccagttaagaaaaactaggatcaccatggcttgtagtatctggattgtcgtcctttgggatcaacattaatgtcatcctttgggaccaatacgagtgaagatctaacaattatttaaaatatctaacaagactaggtaatttaaaggaatgcatccagagagtttcacaatttagtgttaaattcatgaagaaaaaacagtttctgatgtagggtttatgatcaaagtttgtttgagatcaaattaaatcttaagatcaattcacaaccaaaacttgaatttttaccttggaaaataaatctcttaaaccaattaaatatcttagtttaatttcatgtttatgcaatcataaccaagatccatcttgtagattcgcctgttggacttttttcacaacagatcaaataaagttaactagtgattagggtgttcatgagcatcactagtacctcggtgattatctattttacctaatctaagccgaactacatagaggattgcttccaacccattaaacataaaaacatagacaaatcaatcaaagttttatcaagctatgactactcttgtgaattcttgacctttattctaccttctctggaccagaaaaggaaagtagaagaaaaagctaatgctttattgaaaactaaagaaaaaaagaaatcctctatgtatttccaatatacattgatgtctctaatagcaatagtgcgtgtacacacgtacaaccttattcctaattggtagattcctaaaattatacaaaaactaatgaaaagtcatggaagaacaactctcggagcactacaattcaaaatggtctcaaaaatgttggaaaacaaagtgaaatgctcttgatatcaaaattttgatagcactaagtgaactgcaggttgtattgaaattgcatcagaatttcaatacaaatccaatatcaggtacaaagtttgctggtatattttttttttttgatagataaaaagaaatgtattcaacaaaaagaggaagcaccaaaaacagtgccctcaaagtatacaaggagtatacaaaagcaacccaaaggctcgaaacccctacttagagcctagccaatccaaaaaactaacaagagaagaagggctcaaaactacagacgccctaacccaagaccaaagattacatacaaaagaatattttaatctatgaagtgaaagctcctcattcccaaaagctaacaagttcctttccttccagactgaccaaaaaatacataagggggccatttgccaagcctttttacgagttttccccacaaaagctccatgccacctaagaagagtttccttcattgaacacgaaagaacccaagccacaccaaatagggagaaaacgagattccacaaaacccgcgtctttacatacccctcctttgaacttgctccaaagttaagattttaccttaagaagcctcccaagcaaagaagattaccttaggaggtgctttcactctccaaatactattacaagggaacaaatgagagtctccgggctccaatatagaatacaacgacttgatttcactctccacccattacccacaccatatttctgattgataacttgcttccaaaaagcctctctttcattggcacaacaaagtttgctggtatattaaaaatggcgtcagaatatagatgaaaaatcgatatgcacatctaaagatactgccagaaatcaataccagacttttggcataaaaaattgggtagaaaaccaatatgagcaacataggtgctattggaatgggatttcaatatggaactctttttaccgaaattctgatatggctcactgaatatgacacaaggaactctggtataaaaaattctagtgacattgtaatttcgatatgactgatcaggctccaaaaaaagcacagttcattacactaacatgatatcaaaattcctcatttccctttcttctcactttggaattatgaaatagccaccagaagacacttttcacattgaaatttatatctaaattacaatgtagacaatgcttcttcatttcttcattccttcattccatgccttgaaccactaagtctccagctgctgcttggcttttctttcactaaccttggtttctttgctaccttaaactcgcccaaatcactttttttttctctttttttgttgcattcttcactagatataaacattagtcctcaaatgggacttagcatacatccaagtttaaaataatgatttaacactcaaaagtgtgacataagaaaagacacatttttcctctctaacttgggtttgtctccctccactaaggtcatattttctagaatcctttctatgagattaccatagagagattaggtggctggttgttattgtacaaagatctgggagtgaagaccctggagtttgagaaaatttgtctaaaggtatgggcaaagaagggtgaaggagtagacggatggtcatacttgatgcttcctttggtaaactggttactcaaaaccacaagacaccggaaagattatttagtatttatagacaatcacaatgatttttttattttattttattttattttttatgaagtgttacattaagatgatgtcattagaggtcgatgaaacccttccaatttataggttttatggagtgttgtagcaaacctgtaggtagcctttttttcttggatgggaactagaaatcaggtttttacaaggggcacttaattctaggattttctaaacaggcattttatgcagtgggagtctgagttgtttgtatttgctatctttgggttgtcatggatctaaccttccaatgttttgtaaatgttcaagggttggcatgtgccaagagttcaatcagatgtctctctattctttctacctgcaagatgcttaatcattcctgtgctttaaatgtgcaggggaaccttgcgaattgattaccttactctaattc

SEQ ID NO: 10624 - DNA, 17208 bp, Vitis vinifera
  Intron number 3 from transcript GSVIVT01038760001 (locus G SVIVG01038760001) derived from phytozome v7.0 (chr-ID chr1 2_random; pos 616594 to 633801)
gcacaaacaaggtatgtttcttatgttcttgagttagcttcttttgtttacttgtaacacattgcaagatatgttattttctacattgcattttgtcaactatagcaaacttgaatgattttttcatcatttttgcgcctaatccttgagacaatctattaaggacaattacaaacataatgttgcaactttaaatgagaatacttttatattgttatgtggacccgcatttttcatatgcatccccacttatcggtgagactagcttttgatagtgaaaaattagttttagtaaaaatggagttgccacttattttattttattttaaaaagagaaaataaaacaagaaagaaaaccataaaaaaagtaactccaatgttttgaaaaagctcgagtttgggtctagagattatattacctatcggggaggtacctcaaagaggtagcatccctctaagccctaaagaggtctctactagctaagttgaaggaaatatgacaattaacttattaacttagggtactaagaagagctaaggtgattttaaaattctactaacactagcatgccaaactagaattcaaatcacaatcataagggagagttagggtgtgtacttggactacttcttaagcgccatcacaagacatcaaagttagttcaaaataaggcacacaacatgcattttttcaaagaaagtcaagtagatatcaaggcaactaagaaacaatgttaaaacatggacatagttcatgtctaacatacatattcatagaattttgaaaatgaaagatagagagcgtactgttgggctttgtggagcctagttttgtttgatccggtttgacgacccgacccgaataatattgcatggcttttttaatgggagatttattgaggcctgttgggcccgtttagcccattgtggaaccaccttttgtaattagggttttttagtatggtagggttgtcgtgctatatatatagagagaatattgtagccgccaagttgtactctgtattcttccctgataatagtgatatccctgcaactccgtggatgtaggcaaattgccgaaccacgtaaatattgtcttgtgtgtgtgattgtttttctttggcgtgtgttttctctaatttttgtttctcacgggttgggaattcggtttaattccctacaactggtatcagagcctagggttaggtttgagtgggagcaatggcagaggaagcaggaaaggcgtctggaatagaaaagtttgatggcacagactttgcgtattggaggatgcagattgaagattatctctatgggaggaaattgcatctgcctcttttggggacaaaacctgagagtatgaaggctgaggaatgggcgcttcttgacagacaggttctaggtgttattaggttaactctgtctaggtctgttgcacacaatgttgtaaaggagaagaccacaacagatttgatgaaggctttgtccggtatgtatgaaaagccatccgcaaacaataaggtgcatctgatgaagaaattgttcaatttgaagatggcagagaatgcatcagtagcacaacatctgaatgaatttaatacaatcacaaatcaattatcatctgtagaaattgattttgatgatgagattcgtgctctgattgtcttggcttctttgccaaacagttgggaggcaatgaggatggcagtaagcaattctacaggaaaggaaaagctcaagtacaatgatatacgagatttaattctggctgaggagattcgccgaagagatgcaggtgaaacctcaggatctggttctgccctaaaccttgagacaagaggcagaggtaataacagaaattcaaatcagggtagatcaaattccagaaattctaatcggaacagaagcaaatctagatcaggccaacaagtacaatgctggaattgtgggaaaacaggtcactttaaaaggcaatgcaaaagccctaagaagaagaatgaagatgattctgctaatgctgtaacagaagaggtacaggatgcattacttcttgcagtagacagtccacttgatgattgggttttggattcaggagcttcgtttcatgccactccacaccgagaaatcatacagaattatgttgcaggtaattttggtaaggtgtatttggctgatggttcagccttggatgttgtgggtctgggagatgtccggatatcattgcccaatgggtctgtttggttactggagaaagttcgacatattcctaacctgaggaggaatctgatttctattggacaacttgatgatgaaggacatgcaatactatttgttggtggtacttggaaggttacaaagggagctagggtattggctcgtggaaagaagactggcactctgtatatgacctcatgtccaagagacacaattgcagttgctgatgcaagtactgatacaagcctatggcaccgcagacttggtcacatgagtgagaaagggatgaagatgttgctgtcaaaaggaaaactaccagaattgaagtccattgattttgacatgtgtgaaagttgcatcttaggaaagcaaaaaaaggtgagcttcttgaaaactggcaggacaccgaaggctgaaaaattggaactagtacacactgatttgtgggggccttctccggttgcatccctaggaggttcaaggtactacatcacctttattgatgactcaagtagaaaggtatgggtttattttctgaaaaataaatctgatgtatttgtaacttttaagaagtggaaggccatggttgagacagaaacaggtttgaaagtaaaatgtttgaggtcagataatggaggagagtacatagatggaggattcagtgagtattgtgctgcacagggaattaggatggagaagaccattcctgggacaccacaacagaatggtgtggctgagcgcatgaatagaactctcaatgagcgtgctagaagtatgaggttgcatgctggactaccaaaaactttttgggctgatgctgttagcactgcagcttacctgataaaccgaggaccatcagttcccatggagttcagacttcctgaggaggtttggagcggtaaagaggtgaagttttcacatttaaaagtttttggttgtgtttcttatgttcatattgattctgatgctcgtagtaaacttgatgcaaagtcaaaaatatgttttttcatcggctatggtgatgagaaatttggctataggttttgggatgaacaaaacaggaaaattatcagaagtagaaatgtgatatttaatgaacaggttatgtacaaggacaggttaactgtaacgtcagatgttacagagatagatcaaaagaaatctgagtttgtcaacttagatgaattgactgaaagtactgtccaaaaagagggtgaagaagataaggagaatgtaaattcaaaggtagatttgaggacacctgtagttgaagttcgcagatcttccaggaacattagacctccacagcgttattcacctgttttaaattatctcctgttgactgatggtggtgagccagagtgttatgatgaagccttgcaagatgagaattcaagcaagtgggagttagccatgaaggatgagatggattccctattggggaatcagacatgggaactgactgaattgccagtaggaaagaaggctttgcacaacaagtgggtatacagaataaagaatgagcatgatggtagcaaacgttacaaggccagattagtggttaaagggttccaacagaaggagggcattgactacacagagatattttctctagttgtgaagatgtcaacaattagacttgtacttggaatggtggctgtagaaaacttacatcttgagcagttagatgtgaagacagcattccttcatggtgacttggaggaagacctgtacatgattcagccagaagggttcattgttcaaggacaagagaatctagtctgcaaactgagaaagagcttgtatggccttaaacaagctcctagacagtggtacaagaagtttgacaattttatgcatagaattgggttcaagagatgtgaagctgatcattgttgctatgttaagtcctttgacaattcttacatcatattactgttgtatgtggatgatatgcttattgcagggtctgacattgagaagattaataatctgaagaagcaattgtccaaacagtttgcaatgaaggatttgggagctgcaaagcaaatccttggtatgagaatcattagagacaaggctaatggtacattgaaactttcacagtcagagtatgtgaagaaagttctcagcaggttcaacatgaataaagctaaaccagtgagcacacccttgggtagtcatttcaaactaagcaaagaacagtcaccgaagacagaagaagaaagggaccatatgagcaaggtgccctatgcctcagctattggcaacttgatgtatgctatggtgtgtacaaggccagacattgcacatgcagtgggagttgtgagcagattcatgagtaggcctggaaagcagcattgggaggcagtcaagtggattttaagatatctgaagggttcattagatacatgtctttgcttcacaggtgcaagtttgaaactgcagggttatgtagatgctgattttgctggtgatattgatagtagaaagagtactactgggtttgtttttactctaggtggtacagctatatcatggacttcaaatctacagaagattgttactttgtctactacagaagctgagtatgttgcagcaactgaagctggaaaggagatgatttggctacatggtttcttagatgaattgggtaagaagcaggagatgggcattctacacagtgacagtcagagtgcaatttttcttgccaaaaattcggcttttcattcaaagtcgaaacatatacaaacaaaataccactttatccgttatcttgttgaggataaactggtaatacttgagaagatttgtggatctaagaaccctgcagacatgttgactaagggtgtcactattgagaagttgaagctgtgcgcagcttcaattggtcttctagcttgaggacaggaggatgagttgtagggatgagggatcgtttcttggaggatagcggtttgatgttggtgattggactagtctccaagtgggagatttgttgggctttgtggagcctagttttgtttgatccggtttgacgacccgacccgaataatattgcatggcttttttaatgggagatttattgaggcctgttgggcccgtttagcccattgtggaaccaccttttgtaattagggttttttagtatggtagggttgtcgtgctatatatatagagagaatattgtagccgccaagttgtactctgtattcttccctgataatagtgatatccctgcaactccgtggatgtaggcaaattgccgaaccacgtaaatattgtcttgtgtgtgtgattgtttttctttggcgtgtgttttctctaatttttgtttctcacgggttgggaatttggtttaattccctacacgtacttgggcaacaagctaagtgcttcaaggggaaaaaaggttagcttgacaataggtgtaaaacaatctcatatatatatatatcacaaaaaggatctaagtcaatctaataccaaaccatcatctcaattgaatcattatcaaagaagatatgatggatgttgggcccccaccaagacccaatttacttttgcatgaattaatgccatgagttccattatttttggaatcataaagattattcattgttattaaaaatcaagaaaatcgagaaaattagtttaaaaataaagaaaatggtgaaaatgcatgccagaaggaaaatggtaactagtttatgaatatggggattttatggatctaaaaactcctaaggatgaaatttaaaaaaaactggaattattttaacaaaaaaaaaagtttttgaaatccagatttaaaatgaatgagatcacaaagaaaagaaaagcatcaggaggaggatgtgcaccaaggtagccatgctggagtgggacctgggggtgtgactgagactgttgttggtgaatgcatgaggagacctctgcagattgctctctttgtgcccaaatcaatctctcttctcacacaaatttcaagtttccttccaagtagttcagtctgactgccagtttaggattgatgccctgatttaccaccacaagctctgaaacaagcattcgtcagtttttccatgaggttgccaagttttgttatgcttgaagaaattgttgctacaattagaattgatgaaagggctgaggagactgttcaaagacttctgctacttcggaatcctgaagtttgaaaaccattctacaacctggaagttctcctgcatctgtagtttctttattttgcagggatacgtcagtgccgaccttgtttgtgttattttctctagcctcctgaaatcagttctgataacatgttgacttctttggataccagtgcaacatttgctagcagagaggctctccgaagtagaagcaactgatttagtataacatttgcctttattgatttcttcatcctccatctatgctttgtcaagcaccaattttagaaagattccaatgctctgaatttccagcaaaagtttctctcttaaggatgttcttttgtgctgagattctgaacaagtgatgctaggcattaaatcctgatttagaagaacatcattaaaactatcatgatcagagaaaagatctttaaaatttctcagaaaggatcagttcggaattccccttgttagtccatcacaagaactgatagatttcaaaagattgccacctagctctccaactaaaattctaccttgactcacagccactaatcaccttctcgagaattaggttctgagcatagtcactcttctcctgaaacatgtatggattaccatgctagtagtgataaagttcgcaatagtccttgtaaaggtcttgctattctggagattgttttaaactctcatgtggtttctgatattttagattgagtagggccattatactctatttgcatagggaaatcaccatcaaatgtatcacttgatctctcatcgcgatctgtcttttcaaattctaagatcagagcttctgcagaaccattctgagttttgtctttgcttgaagatgaacaagactacctcttggcttcacctcaaataactggaatttctgaacctttaagatttggatggcaagttggctctgaagggagttaatttccaattagactgcagagtcttcgaatagcagtttttgctttaagaagtgaaatagattcaccatgaaatgcaagtcttcgatccaacttcagtgcagaatcactagaaccagccattgtcgaactacccaacatacattctgattcaaataaatcctttctatcaaacaagtttcattccaatgcctaccttaatcctttttaattttggacatgagagaagagggagagcattttagtttttgtttcgatattcccattttcaatagcattcgcctcaactcttggacaagagcttcgtcatctagcctgaccatttgcaatgcatttgggctgttcttacagcctgcatcatcttgatcacttggttttcgacgaaaattgtttgcttctatgataggaataaatattgtttccgtgccagaaactccattctttcatcagaaactgagtcttcatcatagggtgagttctgttttaaacattagaattcctccaattaaaatattgagcgttccaaaatcgcttggcagagtaccttccaactgtgtgggaagcataggtgacatgcttggttggattcacgacaatatagtcctccagttgtgcaacgatttcaatgtgcttctgaccgatttcaaaagcgttatgcttttctttaggatttgcagtctgaccaacccaaacaaaaactccaacacgtatatcaagtgtcaagacaccctcagccaacaggtcatctactaaagctgtaaatttcctcaacctcaaattcccttttatatcgaatttagagttcctaagtgacatggtaagtgcacgagcaagttcatcatctttgtgagtttccctcgggtgggaaaacaaccactccatcatcaactctatgttgtttactccagcttgccgtggagcttcttctgttctaaatctgggaaagcccatctctacgactattgaaatacttgtctcatttggaagggaaccagttacttgagcgcctgcattgcttttgacatttttcacttcaactcccaaataaattgaattacagaaatgattttcgtaatgaaattataactataatcaacaaattgtgggtttatccaaactggaaacactaccttcagcaccagggactggaggacctttacaaatgtcctagcatcccgaggaaaaggaatatcaccaatgattaggggttgggcaggcaggtgctttctccttttgatatcaaagcctggactgaagaaagttaagcttggcagtaaaggaactggagatgggaattttggtgcagctgattcactacgactgctaaaaaataggcttccagaaaagataaccagatcatatctggttctgtttagagttagctgaaatagagcataatctggagggtttctggaatccagcaggttttctcaagtgaacattctgatgatatctgctctgtcattgcaacagatggtgaatctccttgtggaaatccaatgttttaatcaaagctcctcccattttcaagacaacaccaccaccagaagacccgactaacttttcctgcaacttttcttgtcataatcagaaatgttcagtagctcacactattcctccatggccttcttgtcaccagccccatcaaggataacagtatcacccttagacattgtaccctttttttcttgcaaatgccaagcatatcatgttctaccttctcaaacttcaaaccaagctttttcgttataagttcttctcccgtaatagttgtcaaatccagtagagtaaccttcctatttcctccaaatgcttgtcgaaaacaccatatattagccgctactgattctgtgggatgataaaaaattatctagcatgattagagacttgcgtttcccatctgtagatatttgctcagtggtagttcaatgatcagatcctcccttactagtttggcagcctcttctaggtagacaattcaggatctcattgagaattgtatcacctccagcatcattagattgtgcaaatacttcttttgtatcattcttgaagaaaaacccaatcagagcattagtgtgggtattgaagactccatctcgaacaaatgatcacaactaaatttcccaatgtccaatatcaccagaacctgaaaccccattgagtaatacaccctaaacttgggcatttatttcgattagcactttgggaatgagttctgctgcttcagagagcattccagtttggctcaggacttcttccatgcaaacataatgttcaatagagggttggatgccttattttagaaaaatctcattaattttcttctcagcttcgttgaccatctaggaatgagcacaaacctctaacactgtagtaaaaggaaatgatcaggcctagccctgttacagaatctgccatcgtctaccaatcatagggataacagaagagtcaagggatttcatcaactcagaagttgaaaataacagctgccaataacttccaccttcggactacaattgaagagttttcaaagaggtatccacattaactatgctactttgacagcatgcttcccactgactcttaatttaaccttctctcttgctctattaacactcttagtgctatgataaacaacattaacagatataacagctgattcattaggaactccaattccaatagacaaagcagggaccgagttggatcagaaaatttataaacataacttgcagcagcagtagaaagggaagcaatagactgtgatgggtgatgaatctctaagtaaacaatgtatttgctgctgatggctgactggtttttccttggtagtccatctggccatggtaaaatggtggattggcttcacgagtaatggaagaatttggtagaattggttgagaaggttgaattgtgagtggtaagacaatagtgcctatcaaaggtagagtgttgcttcacccatctaactcatctaaagtatttaaggaagggcctgccaaaccatgtagagatgagcttttccttgatcccatgtccatgccattgacagcaacaacattctgaatctctgaattgccaattgtgccgtccaaacccatctgagtatcaactaagtcacttgtagaaaacaaaaacatcatgagcttctttgatccttcattttttagttcattacattctttcttcatgttctataaatcctcatcacgagaaaaagaaactaaggtgccaggatctttcccaggaatctgatgcttaataacatgggcttggttagaggccattaacattttctgcacaagctcttgctaagaaaagcctttttcatactcaaatgcaaaacataacctctagtgtttctattcctttctgtccaattcaatgtgcaattttggaaatcttcaaacatgggcattagctttctgtaactcctaggtggtctatcgaacttgagtggttacatcctgtttagcaaagaccaagctccgtgcctttgcacatctgttgtagttgctcctaaaaaatgttcgccggttctaatatcttcttctatgttagcggagacaaaagagaacgaatgaagcaagtagagcaaaagcaaaatgaacagcacaaccatctattgtagttacaattctaatttatatcctatatttacaaagacatttaaggaaaaaaataaattcataatccctataaatcaagacaatccttataaatcgggaattattcttcctaatctaatttatagctatacacactttcctaatctaatttacagctatatactattacataaatatatacaagagacctcaattaggaaaattcaaatttctaacactctccctcaagttggtgaatagatattatccatacccaacttgccaatagttgcttgaaatgttgtgctcgccaaacccttggtcaaaacatttgtaagttgtctgtctgatgacgcaaacggagtgcaagttaacccactttctaacttttcctttatgaagtgtctatcaacttcaacatactttttctgatcaatgttgtactagattatgagcaatgtttatggttgatttattatcatattacaacttcataggtccttcccatttaatccataggccctcaagaatgattttaagtcataataactcacaaattccttgtgtcatagctttaaactctacctttgcactagaatttacaacaactagttattttttactcctccaagtcattaagtttcctccaagaaaggtgcagtaacctaatgttgtctcttgtctaccattgattcagtgtagtcggcatttgtataggcttcaaggaacaaactcctacctttctaaagataatttccattcctaagatacctttaagatactttaaaatcctaaagacaacttgtaagtagaccttcttcatattatgcataaactggctcactacactcatggcatagagaatattcaatcttgtgtgtgacaagtaaattagttgtcccactaatctttaatacatacctcgatccactcctttgttttccaatgcttcctcaagcttgtgatttgcttcacttagattctctactagtttacatccaagctttcttgtcttcttaagtaagtcaaggatatatttgtgttgtgatacaaaaataccctcttttgatcgtgccacttcaattcccaaaatgtactttagtttgcttaaatcctttatcttaaactcctttgcaagacattactgaagtgcttttggatcattcccaatcatgattatgtcatcaacatatacttgtaatgttgaaactctccctgaattagaatgtttaatgaacaaagtgtgatctccttggctttgtttaaaacctagaaataacataacatttgtaaatcttccaaatcatgctctaggagattgtttcaattcacataatgccttcttcaacctacacaccttattcttgtctaaacttcccccaaaattaggatgaacttccatatagatttcttaatcaatttcaccatggagaaagacattctttacatcaaattgttatgaattccaatcaaaatgagctaccaaagataatcaaattctcgttatattcgtctttgctattggtgcaaaagtttattgatagcccactccatatgtttgtgtatatccctttgcaaccaaccttaatttacatcgttcaagagatccatcaaccttgtatttaattgtaaatacctatttgcaattgccacaaataggtttaggttcactacttaggtggtgtttggtctttggttgaatagaaaaagtcaaaatatttggctttttctatttagccaaaaaacaaacaccaccttagtttagggatacctctaactttttcattatttactaagttcacaagatccctataatttatgtgacctagccttctatgccaaagttcagtaaggtttagctttgcccaactgcacacaagaggtgttttagagttaggatttattacataacaattatcaattgccttgtgttctatgattatgatttttccttttttgttgattactttgcataagtcttggctaaaatttacctatgttcattgtcacatatctgactaatacatgaaaggtttgccttgattccatctacatagagaacaccatctaattaggataaccatggataaatatacttcatttgcttttcacatgagctaagcttgcatccccaaaggtaactgtacaaccattataatcctaaaaaaaaaagtgaaaggacttatctcctatcatgtgtttagagtaactactatcaaagtaccactcaccatagaatttggcttttagtgcggtgaagacaacttgacatttagccctctcttttctcatccaaaattgtttaatcctaagtagtgacttagaggagctttgtttatttctaagctttttattagatttatttccttttccattattcaagatattatttttaagggaattaaattcattcattagcctactcatttgagattcaaatctccctaggaacatagtgtagcacctacattaagtgtgtctagttttcttgtagagtgtgtgcatagtgatggagtattaagagatgctacttggttaggggtttcttctttcccttttacaaaaaccgtttatccactaggagtttcatccttattaatgtaccccatacctcttttgtcaccatgggttttgcacttatcaagtatttcattaagcactttagttctagggtgaaagatctcattcatggatgaagaggacttattacttttcacatcttgaataagaacattatttttctgaagaagagaatgatattcagattcaagaaatctaatttttcaagaagattagtgctctcttcttttagcacatcaatcttggttttatgagcttcaattgtatcatggcctcttaaataattattaattagtttttcatgcttaattacaatattattcagaaaatcagttttttgatcattggtgcattcattctcactatcattatcatagtcactatcaaacacagattccacaaatgcaacaaaagctaaaaaaccagtatgatcataccatgcatctttagaagttctggaaccgctttcttcataatctgtcacttcatgtagcctacatagagtttttgatatctttgggcctagagaaatcaatagcaaactgtcccaaaccaccatagttaaagcattctactttcttacctttggaggaacctttatccttttctttagaggctttatcattaggtctttttcattttccagattcttgaatacactcgaagatttttttcctatgattggtttcttaatttctttattttcacccaagatatttgcttggactacttttgttcatgatcatcgccaaggatgaagtaaactagacccaagatcttataagtgtatatcttttgggtactcactgacaaaaagggtgacaaatgttttcatctagcaacaagtaaattttatgtgtccatggatgtcactttctttgaacaacaaccatagtgctcctagattgttctttacggggagagtatggttgctaaagaacagttttggaacgtgttacctatggtggaatcttttagcaaccccatcttagatttggttgaaaaagtgaaaaaagttgctagaattttttaaaagagaaagcaaaatgttactagaatttctgaaaaagggggagtaactaagaaagatgctagttattatggatgaaatgcttgagaaagccgagaaagaactaaaacagtcccaagctaagaaggaaattgcatagctccaagtttattctcgaatgaataaagagatcactcatcaaattcacagtcaatccccaattccaaaaattcttaacttggataatagttttttaactctcttattttgctcctactctcttatctggtcttaatatcccaaaagccattcaaaaaaaggattagatcttgcactcaacatcccattttgaaatttgtgtcctatcatcgtcttaactctacttgtaaagattttgctactaatgtctttggtgtaagtattctaaagaatatacaaaaggcattagaaaatctaaagtgaagagatgttgttccagatgagataagggctccagaaagaaaagcaacacttgagaagttgcacaacttccaagagatagaaagttcaatgctaatggaaccatagagagatgcaaggtcagactcgtagtaaagggtttcacccagatatatgagactgattactaggaaacatttgccccaattgcaaaagtgaacattgtaagagtgttgctcttaattacaacaaattatgtgactgattgatgcaacaagttgatgtaaagaatatttttccccatggtgatcttgaagaggaggtttctatgtagtttctattggggtttgaagcatctatggtaaaaggaaatgtttgtagattaaagaagtcactctatggtcttaagtaatcttcaagatcctagtttgacaaatttacaacttccatgcgtagattggactacaaataaagccaaggggatcatatgatgttctacaaacacaataaagatgggagaattactattctcattatgtgtgtagatgataccattttaaatggaaatgatatctacaagacggaaagtctaaaaacaaaattagctattgaatttgaaattaaaaacctcagcaacttgagatactttttgggaattaaagtgacaagatcaaaacaagggatttttatctctcaacgaaagtatgttataaatttattgaaagaaacatatatgcttggaagtaaaccaaaaggtttaccaattaatgctaatcattttgatcctaacacactaaagactagtaaatagataaagatatcggagattagtaggcaagttaacttatttgtctcaaaccagatttgacattgcttttgttgtgggagtcattagccaaaagacatttttgaagcaatgtgagagggagtgttgaaaaaattaaggacttaaattgaatgaactaacttgcatacaatatgtttagtgacaatattatacttttgacacaaaatgttggtatttagtggcatataattatgtcataaaaaactaataaagttcatttttagtggcagataattagtaatgacaacattattattacaaatattcaaaattctagataaaatcaatgacaataacataatggttgtcactaaatcattttatttccaaattgtgggggcaccgaactttggtgccaatgaattaatggctaaacgttcttgtgaaattgtgttgtcattaaatataatcataaaaattctttagtggtaacaatatatttttgtcattaaaaatagggttttagtgacaagatttaaaatatgactaaaattgttgtcactaaaagtcattttcctcgtagtggtgactaagaaagagaaaggaccatgaaagtttgatgaaccattttgaattgtagttagatttgacttttggactaatatatactcatctttcacaatgaacttgtttctaataaaaaataataataataaaaaatgtggcaactgtgtggacatatgtccctcatttgtacctaaaacttaggaacccccaagcagtagcattcacaagtcctttctcttgattgtacaattatcctcaaaagtatttgtcctatttaatgagggctcattgcttgcctaagaggactaaggagggatcctaatattatagaattcaaaatctttacaagtgcatgaatctttggtgttgtcattcccaagtttaattagattccactagagggtagtattaagttgatccatctcttacaagtgaggtctttgcctagtcaaatatgcaagaaacccagtttgtaaaagtttgttaggttcttgatctcaatagagtgcaaggctggtatttgcttaatgcttcataaaatggagcttaaccccttttatattgaaaatatgtggttgctacatccaaaatttggtgagatcatcatggatgttggcatgacattcagatctacttctgaatgtgagccactacaagtttatgcataatttctttcactcactttctaattgattgtctaaataatcaaagtaacatttttttctttcattttttacttcatttttctttttggtgaacttgtatttttcatgtttttgtagttatatgttccttttatgaactggttctcgtactgcatcatgaggatcggagatcatgtgtgattttttttttcttgattactcataaaatatctttccattccagg

SEQ ID NO: 10625 - DNA, 3681 bp, Vitis vinifera
  Intron number 1 from transcript GSVIVT01001278001 (locus G SVIVG01001278001) derived from phytozome v7.0 (chr-ID chr2 ; pos 4931177 to 4934857 reverse strand)
gagaagctttccccttctcaatctcgggtgcccaggtgcgttttacctttgatttcttcgtattttgttgttttgtcactttaaggttttgaaataggcgcaattggttttttttttttttttcaattttctagcggaatgggtgttcaatgccattgctttgtaaagctgattggtttttggttgagaagacgtcaatcttatttcttgatctgaacatgcaggttgtatcgattaggctgagcttgtttgaggtgtcattttgaagcttaatggtttttcattgttgatctttatgtagagatgccttgtagaacatgtgggtcgataaaatggtatttgttttggcctgtgaagtgggtgacttgatcttaagtttgcattttatatatgatgactgttataggcaatctagaaacgacgtgcttgacaacttcggtgttgtgctgtctacttattggtttccggaggcttgtgcaaagttttcaattctaaggcttgtttctttgttgggtttgttgcttgtattttacaaaagaaaatatgctaacttgattattgatggatgtttattaaggcgaaattttatttttgataaataagttagattgtcacctggtaatttgagaaacatttcaagagcagttaagtgcatgaaaagtttaaatgttagcataggtcaaacactctgtgaagtgtggtcaatcatgattctactaacagagttgtgtgggcaaagattgttccaaatagtggctaacagccataataaggtgtattagttcctagatgtattgatgaggccacattgggttgtaagtctataagaggactaaagatggaagatttgtaggagaagcatattttggaggggaatgtggctagataagctttattgaaaaatgtttcaggtttatgggtttttatgatgtttccttcttgaagttatggaatttcaagagatttgatcttatgaaggtaaggagagctccaagcagagcctagttggagacatgagcagatgctacttccgtctccttatctgaaggaggcaggcatcgaagaggtgtctgttttgcaccaaaacatatatggaattattgcagaagttttgtccagcagatataagagatcattgcctcctgttcttttcattttcatagtgcattgcagcttgctggaaatgttctggacagtggattaacatccatgaatgtgttggtaagaggatctaacagatgtaagggtattcttacgatcactctattctgtcctttttcatcatcctccagggtttcccaataacaggcatctcaagttatgtttaagttatgcatgagccaaatgttgccttgtcttagtgccaatcttgatttgtgacctataagatgcatccatttaagttccagcaaaagcagttgatgagaattgcttcagcaattatttccatgaagactgtatggtaaacctgttgaagggtcatcaaacaaatgcatattcaatttcagtggtaaatagaagtcattccatcttccaacacccttaaatattccttacatgaaatagaattaatattcaggtattattaagaaatgtaattcctaattacagattgctagatggtgctaaagtcgatggacaatccaagcataataaagatgacagtgttttcctcactagtaccttacttctttcaagtctgcttcacaaatctatgcctgaaattgtactttaggcttgcttaagattttcttcacatattgacaattatgaatctttgtggaaattatttgatgggttttctcctttgaaattcctgcttatttttttcctatatatttgatttctttgagacacagatgagtttctcagaagttctctcaaggtagtttttcatgattgaatcatggtttgtcataagaaaacttcttacagtacaaggttattagtaggagaagcaagatggatttttggagcagtagttcacctatagtgaagattcctttaatggtcaaagtacaagcaccattgcctattatcttgacggtcatgaaactgtttccttcctgtgttttaaattggatgtgagtgggagatgggtcaaaacaacaagggaacaattgcacatctctaacaaaatatcttgagaacaaaatatgcgatcccatgaaacaatatgggaggaacaataacagagagattttgatgtggacagggtcacttcattcctgtttaggacttgttttggggcacatggctaccctgacatgtcataatagcgttgagatggaagatccctatcttcagtgttcttttttaaagttagtgcttttactgcaaacctatattttaagatcctcttcacctacaaacaactgaatatttcctagcaaaagaaaataagaaagaattgttggggaaggatggatatcttaattaactggtccgtaccattcctaatacctggatagaaggtggtgacaactacaatgttaggtttcatttttattgcagctagttgaatgaaataactagaagggtgacttttatttatttttttcaaaataataatagatgcttttgataatatgagagaatttagtatatgaaggctctaaaatattctaatatggcaaaagtggcagataggttataatcttcttaactcttatctttttttaaacaataaaaaaataaaataaaaaggaatgagactttagcatttaagtcaagttattgttattgttaaatgacgttggaaggaaagaaacagaagagtgtttaacaatgttgagcagtccgaccaaacaatcaaatttgttttttatatacttttgggatctgggctagggtatatataaaggatcacactttgttattattagattttatagattgattgagcttaaagtaaggaatgggttttttgttcctttccttgagcgctactaggtgtttcttttgtatacttagtgtgtattttgctatgcctcctttaggcgcttttagtacatgtttttcccatttgcccctatcaaaaaacaaacaaataaataactaaataaaactgttaaaggtaggaaattggtggtaatcttattcatgtactatgatatgctttatcatattcatatttgcatgtccatcaaactgagatgtaccttagtcgcatttgtaattgctttgctgttgttttttgttgttattttagcactcataggtctggattagctgtatctgtgtgtatattattcttctaattttgcgtatatgcatggatgtgtacttatatgatggtaactagaagttgagtggaattttagagctgttgcattgcttttgaaagttaaggctttatatctctgtcactaattttttttgggattcttcaatcttcataaccttaaagtgaggcagacttgggttttgaaaagtcccttagtttaatcacggtttactcaccctaaaccctaacagaccatgaccaggcccctggacatgcatgctatgtattataagcttgggctagtcattaggcatcactgatgctgatttttcatttatttgactggaatgagactaaattggaaatggctatctttgaacttgttctcccttttccattcccctattctgaaataatttctacaggattgtaagtaaaggctgcaagctagttgg

SEQ ID NO: 10626 - DNA, 2341 bp, Vitis vinifera
  Intron number 14 from transcript GSVIVT01022409001 (locus GSVIVG01022409001) derived from phytozome v7.0 (chr-ID chr 7; pos 19804067 to 19806407)
gtgatactgtaatctcctcttaatcctaaactcactgcattcattttattttacttttttggtctaagattgctgcactaatattgaattttcatatctgattaatgaataagtatcaactttcacttgagttatcattacaaaaggattcagttatttcatcatttcatttttgaacaaatacactaatgttcagtaggctgctctgtttacaaataataaagttaggtagattacttgcatgcaattaaacactgtttctgaagaggaattacaaagagaaaaccatatatatgctctaagttaaagttgctaaatcattcttttctttttaacccaaggacttggttttgtttctctcaagcaaaactaccgaaattttagaagggtcatggagtggaatatttgaatggaatgggcattctaacaaagcttaaatgcccaaagttagtaacatctgatgatgcttccatacatgaagatcaagagaaatggatgaacctgaaatattaataaccctagtgtaataatttttggatgaactcttttaagagggagggagggtcccctataggctattataacctaacccttgaagcccaaggccccttacttcaattgaattccgcaagctaaggcagcctgtgaacttatacttcaagcctatctgttcacagagatgccattttatctaccatctagtcaaagggagctcttccacattccatctagcattatatgttcattgtttagaagaaagattattttttgagatggttattttattcttactaaattaagatattccacatttgtttgctttttttatattttatatgaatcatctaccttttgtttttttaataaaaaacaaacgaatttcttgatatgaattaataagtaatgaaggatgggaaatccttctaaatctacagctgatcaaacggaaaataaaggtggatatctcaaaaaggaagattgaagcagtcttacagctgaaagatataagaaaaatatatgtaagctagaagaggctacacaactcagagagggggtgaggggttctgtattaaaagatcccttataaataaacctgctgcttgatctgctgcatatatgctgcatgatcccttataaataaaccttccttggctgaatgatatgctgcatgattagctaaatgtgaaagtccataaggaaagagcaacccaagagcccatgagtcatctagtatttaaggttcctaaaagaaatggtgaagttctcttgcagttcatgatcttctatttttcttgtgttggtgaggttcatgttgagttatgagcaaatggagctcctagctttctaggtagaagtatttcctttaaatgtgaatgattccatcatttctcaatgttagaagtcaactagatgcattctcttcattccttatgggccagaactttttttttgataggcagatgaagattggaaggtattatcagagaaaatttccttaagctctggtcagtgaatacttaccccttcactccttcccaactttctaatttctagaaagttcccttactctggacttgtatggtaaaaattttgtccatactagagctatttcttacattgaccaaatattttgggattggtccctacattgaaaatagcattgagtcctaacacatggtcgaattttgttaaagtagggccctttgtatcaactattatctgtgatacatgggcttttgtatgcatgtagggtattggtacaaatctacgtgttggacccctttgatccctagaccttaggacacagtgttatggctaaataacctaatttcattcttttcccttattttataccatatgccaaattgaaaattttatctaataatgttctatgtgggtactacactcatatgcttgcagcaaaaaaaaacatattgcaagtcttcagtatcttaaaatgaagtagaaatatggtttttttctttattacacacactttataggtagttgttggacacacatcccatatcgaaaccttttgcacatctgtatcctgtggaggtacatcacatcctttagaatcttctcataacatatattattgctttcctaattggttgatcttcactatttttttgtgttagatcttccattattaattgttttttttctgatttaggtctatgtccttgctatgagaaatgatgtttctacttgcatctattgagataaatttccttttatttttatgtgtgtgtgaatgtcattgttgtactcaatatggaatcttatttttcttgagttaggttgagtgctcaaacccatccttacttcctgaacc

SEQ ID NO: 10627 - DNA, 8429 bp, Vitis vinifera
  Intron number 2 from transcript GSVIVT01023249001 (locus G SVIVG01023249001) derived from phytozome v7.0 (chr-ID chr1 2; pos 20585058 to 20593486 reverse strand)
gacagccggtttcgatcttttgctcaagtcgaactgtaagtctctatttttccgtttagttatgaattttcttctctacttttctatttgattgagactttaattttgacctcgttgttggaaatggtgttccaaaaaatggacaagtgaaccatggggcctaccatcatatgccatgtgatggagttgcattttttggtgaaccaatttgatctagccccctggatctaatgaactttccatatctgggtattcttggtaattttacagattggagggaaagaggggtttgggagaggtcggattgtggtttttggtgtttatgctattaggtgctcggttatttggtgtgtttgtttgccaggcactattaatatatttagtgattgcctataaaaaaattcaagtaggtgtttggttatattggttatcaaattcttattcttgttatattctacttgggcgagtcttaatttctttttgtacaagattttgtttagttattaaaaataattttctttgttaagtgtcaaaacctcagtatgaataggagtaagatttgatattggtttttaagaagttaagatggcagtatgaacctaaagaaaaggttttacatattttactacaggttgtcacgatgaatttcatgttgccacatgaaaaggttttctttctttcttctcttttatttatttatttttatttttgctcaaatcacattctaaaatgtggttttagatgaaattaaaatcatattcatagaatgtggttttagatgaaattaaaatcatattcatagaatgtggtttaacatttaatatggaatcaaatgttagaaaccatgcagatgtttttcaaatgtgtttctctccactgagaagtgtatgtaaatttggagatcatgaactaggtttccactttcttcaagagctcttagtggtggtgcgaccatttaatgttggatggctaataaaaaaactaaaactgtattttttttttatgcaatctttgttccatttaaaaccttattcatgaaatgtggtttttttgtcagcttaaaagaaggttaccaaagaaattgcattttgtgaatatgttttttttttttcctttttttatttcataatttaaataaccaatctaaaactgcattctcaaaatatgatatgtggtcatatttaggctttttggagtggcttggaaccacttgagggtgggtgaggatgggtggggttttcccccttttttttgttttttctagccttgtgtagggctgttcagtatactccctgtatacgtgtggcttttagccttttctaatatatttggttgtttatctatcaaaaaaaaaaaaatatgatatgtggtccttttcaatgagaaggaaaaatggcatgaggtgacatctaatccaatatggcattatccaatccttgcagatgccttaaatactctttctatgtactttacaaactcatccatgtagctaaatgtacctcattttttcaaatttatttttaaattttttccactttacaactaactcatttggcaaattcttgagtttgtgaagtagaaaagaaaagaaaaaaaaaacaaaaaagagtgtacatttagtaacatagatatctgtaaagtagataaaaaacacttttaggagttactattcatgggcacttgagagattattttgggttgaaagtgataaaagtaggaccaccatttttttatttttttatttttcaaatttgtgcttaaaaacataattttccctcaaaaaaaaaaaaaatggaaaatagaaactcacttatttgaaatgaaatttatctttacaagttttaaaaattaaaacattaaataaaagtatttattttttcttttctatatatattttaaagtttgtttagtgaataattctatatattttaatttttatatttgttgatttataaaaatggaagaaattaacacattgattttatattccacatttttttttatcatgaacacaaatgaaaaagaacttaagtgaaataaaatttgtaatgatttctttttttaaagttcaattttgcaaaaaggatgaaatacaatataattaatttagaaaaaaattgatgtgacattgttaaatgcataaatttaggaatttacaacttctcatcaccttgtaagaagatataagatcgtatgctctttgtgcgaaagacgatcgtgagctgaatgaatgcgagagaatgaaaattactttgaaattgttctcattgaagcataatttgagaatgcatgaacttctaaatatttcaaaatctgtgaagagatttaattttaaattagtaggtttctattttcattttttttgagaaattttaagcatattcatctcatctctctataaatccactcatttttatatataaaagttatatgtaaaatgatcaaaatgccctcttcttcaacctcccaacaaccacacatcccaaattttaatccccttttctcatcttttctttcctttccttcccttcccttccattccctttcatcttctccttcaatatatatgtattttttttaaattgaaataaaaaagggaaatgttacggggtgctcgaccaggttgttggcaatgaccaacgacaatctagatcttggttggcacctcaacattggttttttttacttttttatttttgtgtttaaaaaaataaaaggaagggaagaagaaaagaaggaaaggaaagaaaagtgggaaaactagagaagatatggaggtttaggatttgaggtgggtaggtgttgggaggttgaaaagaggatattttggttatttcacatatgtaatttatttaaaaaatataaaaggtgaatgcatggagaaataaggtggatgtgtttaacaatgttttttttttcccttcaaattggggtaccaaaacatactttttctcatattttagtttttgtcttttttatttttattttagctaaaataggagataagtcttagtgtcctttggaggcaaatttttggctcattgaactataattaataaatctttgatttgttcctagatttattattattatgtttataggaaagcaaaagtatattaaaagcaccttacaaaacatgtaacaaagtacatagattgtatataaagtataccaagaggcaaagtaaagaagcaaagggcttagaaagcaaaagtccataacaatgtccctaactaatcaataaaatctatcatggttagaggaatccccgctatatacattctcacccgaaacataaggttgtcagtggaacaagatttataggtttgattggacattttttttcttttgaatgttctttggttcctctccttccaccaatgccaaaataagcacaacggtataatcatccatattgacatacccactttctcttttttctacaaaagaaccatgtcatcccaaggaactcttttattaaacttgacatcacctaagaaatccgaaacaaggaaaacactaaattgcttaacactttagctctagcacaatatagaaggatgtgatcacataagggaagacccacatatgtggtggggagatctcccttcctacaaccccactcaaccaccaattcttctataatagggacacccataggaagtaactcactcttctccaaattgatcttcaaactcgaaatggcttaaaccacatgaagatccaatttagatataacatttgcttatgattggcttcatagaaagtaagtgtctcatttacaaataagagacgagacacctccacacctttgcttcctcttttgcttatgttaatggtccaaacacaatttaacaccaagatacatattgttggctcttgttggctccgataatgatggggaatatttcaatggaagacatgacaattttttcttggaaaagagtgttattcatcaatcaagttgtgtaggtactccctaatagaatggagtgatggaacataagaacgaacatctcattgaggtagctcgaaccttaatgttttccaaaaatgttccaaaacatttctagggagatgcaatcttgacaacacctaccttattaataagatgcctttaaaggtactcaattttcaaactctcattagaacattgaaagaatgtatactcatctatctatattcagttctttaccactggaaatctttggaagcattgttcatgcctttaacaaagacaaacctaaacttactcgaaggccactaagtgcattttccttggatattcttcaacctagaagaggtccaagtgttaccattcacccatcaaaaggaaatttgttacaataggtgtaagtaaacaacaaccatattatacaaagactatcttcaaggagagcacaaatgggagctaaagatcattcacaaactagtaagtcccattaccaacattgatttggagtaatcaagaaaagggggagaacttggagaccactcacaatgatagtaggatagggtagatataattgtatacaagaaaaccttgggatcaatctagattagtggtcctctatcaaactttgtttcttgtcacaagattgcaaggacatataaggtgtttaccttccatataaatttggagtcaattctaaagaatgttgaagaagctcctattggcttgaagtggaagaaagctatagacgaggaaatcaatgctccaaagaagaatttggggatattgtggatttacccaaagaaagctctcgatgagatgcaatgagtttttacaaccaaatacaatgcaaatggttctataaagagatataaagtgcaacttgtgacccaccaaggtagcctagttggttagggtgaacattgagaagtgtggtcccaataagtggcacatggtcctatgtttaaatcctgccactaatgatactctaaatggtgttggttgttgcgaggcggtcaacaccccaaggtttgggtccccatggaaagtccaaaaggcttggccatagaaggtttttgggttttcaaaaaatataaaataaaataaaataaagcacaacttgtagccaaggggtgcatgtagacttatggcataatgtcacagacttaggcttttcctaagctcacgtgtggtacttaggcaagccaagacacttgatcttgctaagccagtcttacccccaatgcttagtttgataggctaagatgcacacgacttggaagctagtaggcacatgtaggcaacacctaaagaatggaagttttattgctctcaaaggatgttttacaagctcttggaagctcatttgcttggtgccttggccaaatgaagcttttacctatttataggcaccttaggaagtctttggaaccttggatggttccttacaaatcaagaatactttagaatattcctataaaaaaaaaaagaatactctagaatatcctacacaattcaatgtacaaggctatgtacaagtatagacaagagacctctggaactctctagaatgccctggactcatcccatgccttccaccttagtgtagagaagtgtgggtatctctaaccatctctaaaactttccacactcttcctaccaatggctaagtgtaggagtctccagaagcttctttccctctatataaaccaatgggaagggtcatttggagcatgtagtgacaaaaggctaccaacaaacctttacccctttggcaaaaatgaattctattagaattctactctcttgcagctaattacaattgatcactacaacaatttgagatcaagaatgcttttttacttgaaaatctagatgaagaggtctacataggccttctactcgattttgaagaaaatattgaaacgaaatgctagctgaaaaaattccttgtacgacttgaaacaaatcacctagagcacggttggaaagatttgctcaatcactcttgaaatttagttttcataaaagtcaagtagacgatacttttttctttagatgatcacccatggggaagctgattatgcttagtgcttatgtaaatgatgttataataaagagtgatgatagtgaggaagttgagaaaatgaaggccaggttgactaaaggtttgaaatcaaggatctaagtgctcagccttattttaggaatcgaagtggcaaagtcaagagaaaggatttatagatcctagaggaaatatgtcttagatcctctcaaggaaattgaaatgcttgaatgcaagcctaaagaaactcctactgatttgaaccacaagttcggtgtagtttacatatgttctctaatggataaagaaaggtaccaaagacttgtgggaagattaagtcatctttcccccacctaatgttattaaaggcaatcgcttgggtcgcctaggccattaggccaagcaaggcagatgaaagtcgcctcttaaagacccaacaaggcaacttcaaagaggcaacccctaggtgattgcctttgaccatgagttaagattaaacatacttagagtataatttcattcaatctaacattggattaaacaaaatataagatgaaatattattttatcaatcatagagatgataagatggagggctatcaatttagtcttgatggaagcgatgacaattttaatttcaatgatgatgcccaaaacttttctaggatggtcattctcttattttgtttttcattatgatttttagatgtctgaaaaattagaatatccatttagacaggatgaatatctctaagatgaaatattattttaccaatcatggagataatgagatggagggttattaatttagtcttgatggaagcaatgacaattttaattttaatgatgactatgatgatgatgcctaaaacttttataggatgttcattcttttattttgttatttattatgatttttagatgtctgaaaaattagaatatccatttagacagaatgaatatctctaatatgatgtttttcttatcatgtgaggtataatatttaacactttgaataattattattattttgttaattttataaaacaccatgagggatgaaaaataaatagtattgattgttgaagacaacgcttatattggttaagtatcgaataactaaatatatgtatgttttttattgttttattataatcaggctatcgccttatttttcaccttttaccttagtctaaaaggagtcttatcgccttgacattgccttttgcttttgacaacattgcccccaccagaacccatattacttattttgtaagtgtggttagttagttcatgcactctcctttaaaacctctcatggaagcagtcaagagaatattgcaatacctagaagcgactccttgaagaggatttctattttctcaaaatggttatatggatgtagaagtgtacatggatgctaattggggaggttcgactggcaagatatccacttatggctattgtactcttgttggaagtaagttagtaacttggaggagtaagaagcaacttgttgtggccaagttaagtgtgaaagctgaatacaaggccatggcacttggaatatgtgagttgatatggataaagaacttataaggagagctatagatagaattaaagggccttatgaagctatatggtgataacaaggtagccataagcattgcacatgatctagcgtagcatgatggaacaaaacatgttgaggtagacactccatcaaagaaaaaaaattgttggtagaatgatatgcactccattcatttcttccaagttatagctagcaaatgtcttcactaaagaggttcctaatccagggcttggcttaatgacaggctgggaatgaaggatattttggaaccagctgcttaggtaatgtaattagttctataatacatatgagttctttgcatagtactcttccatgctggttttctcatggtttatttagtgggctcttgtggtcttaatttcctcaactaggtcttcttacatgctgtgagtatgaagtgaatggggcaagtgagacctactcatggtctttaacttttgatgagccacttgggcctcaaacatggtcttatccttttacatggtttttgcttctttgaattttgtgggccttagatgcttgaggagagttgaaattcatgtaccattagtgttggtggaaagcgtgttatactctattgcatggtattaagctccaaatacaaatacaaatactaatgtttcttctaccataatttgatttctatgtgattattgtgtgcatctcccttcaagaattacgtgtgtgtgtgtgtgtgtgtatagctgcctataacacaatttttttactatgtcttgttatttttaggtttctatttagaacataatgtggattttttaggtggtttgccatgtagg

SEQ ID NO: 10628 - DNA, 10942 bp, Vitis vinifera
  Intron number 7 from transcript GSVIVT01029976001 (locus G SVIVG01029976001) derived from phytozome v7.0 (chr-ID chr8 ; pos 2561503 to 2572444 reverse strand)
agctggagcaaatcttcagagcgcaaacctacaaggcaattttttttcctatcattctcataatactcagtaatcttcatatctttcttcaacaagtactacctctcaagacaacactatctgttttctagttccattatcttgcaaatttgtgatcaggcattatcttgcaaatttaatcgcttaacagttccttgacatgggttttggtcctgtttatttgggtattcatctacctgttaggtcaatttgttagcatattatgaaacattcgatcatatgtttttttttttctttgagttcaatgcattgaaataatggcatctagtctcacttctattcttcggatttacattattttctaaaagaacatatggttgtcattttaatgttcgaaggtacgactaggactgtaatgtgcatctcccctgtggcattggtatcattaaatcaagtattatgcatgattaacagaaagaaatcactaccattgaaaaacaaccaaaactaagttatcatattctttgtttgcatatcttatgaaatatatcattcagaatgccatgtgggcacccacatcaacctggagaccaaagatataatggtagttttacacaccaagtagagctcagcaaagacacaacctgaaaatgtattgctgatatttattagctgcagatatagtgtgttgtgggaataatgaaaagaacatctaaaggtaacttgcaattaaaaatagtctaggtcctaatcttggtagtcaggaacataactgtaagaaaaatgaaggtgaaggtctctgtgaagaggaagaccttcttggttaggttcgaaggtgaggccgggggaaaatggtgttcgcttatagagcacagtagaggctctgttttcgccttaggatttgagaaggaagaggttggttggttgatagaacatttgacgaaggccattgagatgaagaatttcatgagtttcagtagaaaattcagagagaaaaccagagtccatttaatggaggtttgcttcaacaatcatggtaggtttataaggctctccgagtttgcttctaacagaaagtcaactttcctggtaatacctgagggagagaatggtaggggttgggaaaatctaaagtttgctttgtcttcaaggttggtggtcgcctccttgagtactgttgaaaagggaagacagtgcagggaagaagggacttttcacaaacatgtgggtcctttgtgccggtccttcgcgaatgtagtcagagaagaaggaccgaggagagaaggccttgttccagttgggagatgggcgagagctgtggtgtgcgaatgtcatgctagttctgttaattgggctgaggtcggtcgggctttggcgaaaagattagggcataaaggtgtggtgaatatcgtccccttctccggtggaaaaggattattttttgtggaaaccatagaggaaactttatcactccacgatttaaggtttatcaggatcaagggtgggcttacagtcttgttaagaagatggtcgccaaaggaaaattcagtaatagaggggaaatttagagaaggttggatagaattacggggtttcccatttcatttatggtatgaggtacatctaaagaaaattatggagcagtgggggacggtgacagagatcgattctaaaactgtttgatcttagcaaggcaagggtgagagttgtaatgaaggaacgatcaattctcccacctttgatcaaggtattagatgggggatgagagttcacagtttcagttgcagtggctggagaggatgacgttaggcgaggaagagaaatgggtgagtcaactcggcagaagcttgaacctgactcgtggacaagtggcaaaaagagggctgaggaggccaaatcaacgattgtaggtaggtcttctgatggggcagttggcagaatgaaggaaggaaaagtttgtcaaaaggctgaatttgctcctgtggggacacgtggcaagagaagaccgatagaggggaacaactggtcccaaccatcccagtctctcagtttgaattcaaattttctgagaacagggtatgacgggccaaggcaagatggagatgtttgggttggaggggacaaagcccaatcaactgttgaggatgggctttgggcctccaaacaaatgagaagggcccaatcttctcttaagcctagtccacaggttgaaattgactttgggccggaagaggggagtttctttaataggcctgtgttcgttgttgggccaagaaatgggaggcagacaacccatctctgcgaagggctctttacgtagagatgacccctatgcaaagggaaatgggaaggtaggctctgaggcgtttgaagctcaattgaggggttccgtgttgaagtgtggttcaaagaagctgtggaattccctgttccctctaagttttggttgccgacaagggggtcgaagtcgaagcgagcctctaatgcttgagagaccgttgttagctagcgatgatcttccaaaggaagattctttcaaagctcaaacacagattgaacggagctttagtgcgagtccaagtcgctcgtcggggagtcgaaaaaggtgttccggggaaggtacgtcgccaccgagtggagacgcggatcaaaggtctattcttaaggctcctttcctttcaaaagggaaggagaaattgtgcaactcctctaaaggtgaagacaaagcaggttttaagggatttgcgggttttcctcattgtggttcatcagtcgcggttttcccttcttatccagtaaccagagaaaaagggttcactcggtggggtctagtggaatgatggtagtggaagacctcgaggtatcttcttatcaacattctcagtcatttgtctttttttccccctccctctggcttggctcttccacacctgagtccttctgttcccgttcttcctaatgcagtcattcagtatcagtttcctacgaaaccttgagttatatatgaaattttttccaaaaaagatgacgatggggctttttgtcttgggtctgttggcaatcctaaccgagatgttgcggtgtcccagttagctagtttgaaccatttgtccgagagttttaaatcctttaagcccaatctcggctcgcctcttagggcccccaacccggtcacagttagccagggtgttgcggagtcccccccgatgggtgggttccaaattgaaggcctttcctccagcagaatggccaaagtctgtgaggtcttaagttatttggacattaaggtgtattcaaggcggaagaacagattttacacagatagttgagatctgttggtgttggtttggaggtttagggtcagtgaggtgtatttatgaaaatcatcagttggaatactaggggtttgggttctaggaaaaaacgaagggtggttaaggattttttgaggctcgagaattcggatgtagtgatgtttcaggaaacaaaaagagaggtgtgtgacagaaggtttgtaggtagtgtctggttggttaggaataaggagtgggctgctcttcccacgtgcggggcttcaggagggattttgatcatttgagactcaaagaaattgagcagcgaggaggtggtaattagatctttttctgtttcagtcaagtttttgttggatggatgcggactactatggctgttcgtagtttatggcccaaacagtcccttacttaggaagggctattagacatttttgacctttcttttccattatggtgtgtgggtggtgattttaatgttataaggagaagttcagaaaaattgggtggctttagtttcacttctagcatgagggattttgatggttttataagagattgtgaattacttgatcccccctaacggaatgcccctttcacttggtcaaacatgcaagagtcttcggtgtgcaagatattggatcggtttctttattcaaatgagtgagagcttttcttccctcaaagccttcaagaagttctttcgagatggacatcggatcattggccgattgttttggataccaatcctttcaagtggggcccaataccttttaggtttgagaatatgtggctgcaacatccaagtttcaaagagtgctttagtagttggtggagagattttgaaggcaatggttgggaaggtcataggttcatgaggaagttacaatttattaaggcaaaattgaaagattggaataagaatacttttggaatgctaaggaaaggaaaaaaagcatcttggatgaaatatctaacattgatgccattgagcaagaaggggttctctcttctgatctttctgctcaaagagatttaagaaaaggggagctagaggaattaattttgagggaagaaattcattggagacaaaaaattaaggtgaaatgggttaaagacgaggattgcaattcaaagttttttcataaagtggctaatggcagaagaaacaagaatttcatcaagtttttggagaatgaaagaggcttggtgttggataattccgagagcatcatagaggagatcttattatattttaaaaagctctacttgagtcctcctggagagtcttggagagtcgaaggcataaactggtccccaatctcaggagagagtgcatctaggctaaattcccctttctccgaagaagagatctttaatgccattttccagttagatagggataaggcaccggggcctgatggttttaccattgcagtgtttcagaattgttgggatgtgatcaaggaagacttagtgagggtgtttgtagagtttcacagtagcgggattattaatcaaagcaccaatgcctccttcatagttcttttgtctaaaaaatccagacaaagaagatttcagattttagacctattagcttgatcacttgtctctataaggtaatagccaaagttctattagggcgattaagaggagtactacacgaaactatccactctactcaaggtgcttttgttcaagggagacaaattttggatgcagttcttatagccaatgagatagtggatgagaaaaggcgatcaggggaggaaagagttgtcttcaaaattgactttgaaaaggcttatgatcacgtgaattgggattttttggatcacgtgttggagaagaaggggtttagtcctaaatggaggaattggatgagaggttgtctgtctttggtctcttatgctattctagtgaatgaaaatgctaaagggtgggtcaagacatctagaggattaaggcaaggtgatcctttatcctcttttctgtttactattgtcgcagatgtgttgagcaggatgatgttgagagctgaggaaagaagtatgttggagggtttcaaggtaggtagaaatagaacaagggtgtcccatttgcaattcgcagatgataccatcttcttttctaactcttgtgcggaagaactgcaaactctcaagagtttattattagtgtttgggcaaatttccgggcttaaggtcaatcttgacaagagtaatctttttggcatcaaccttgatcagaatcatctctctaggttggccttgtttcttgactgcaaggcttttgattgacctatactctacctgggtctttctttgggagggaatccaattgtttgtggattctgggatccagtgattgagagaatctcaaggagattagacgggtggcaaaaggcgcttacttatcttttgggggtaggataactcttatccactcttgcctttcccacattcctagctactttctctctctgtttaagattcccacttcattggctgcaaaaattgagagattgcaaagggatttcctttggtcaggggttggggaaggtaaaagagatcatctagttagttgggatgtagtgtgtaagccgagggtaaaagggggtttggggtttgggaagatctctttaaggtatctcgctcttttagggaagtggttgtggaggtaccctagggagagtacaactctatggcatcaggtcattttgagcatttatgagacagattctaatggttgggatgccaacactttagtcagatggtcacatcgttgtccttggaagactattgcacaagtcttttaagatttttccaagtatacttggtttgtggtaggagatggggaaataattcgcttttgggaagatttgtggcggggggaccagcctttgaaatcccaatatccaagactatttagattagtcatggataaaaatagtcttatttcttcaattctcggatctgctcaccctttctcttggaactttaatttccgtcgtaatctttccgattctgagatagaagatctagaatgcctcatgcgatctcttgattgtatgcatttatccaccttggcttcagatgcgagatcctggtctttatcttcttaagaattgttcacagtcaagtctttctttatagccttgtcccaagtgcccgatttatctccttgttttcctactaagtttgtatggaattctcaagtcccttgtttggttagtggcacacaagaaggtaaatattaatgatttgctacaattgagaagaccttacaaagcttttagttctgtcatttgtaagttgtgcatgaagcaagaagaatcagcagaccatcttttcctacattgttccttgtccatggggttgtggcacagattatttcagctagccaagatggattgggttcctccgagaagcatttcaggcatgatgtctatcaattataaaggttttgacacttccaaaagagggatagttttgtggcaaaatgcgagcattgctttaatttgggttgtgtggtgggaaagaaatgcaagtatatttgaggacaaagctaggaattcaaagaatctatgggattccgttcacttcctagcttctctttaggcttattgttccgtggattttaagggcattccccttaacgtgttacaaatagattggctagcagtgtgtagttccaatgggatggtctagccaagagagcttgttcgtagtttttatagtgtagtttcttgttcttttattgtgttgtttagttttatctttggtgggaggattcctcatccttcttttgtacttcttattctttcaatatatttatttgttgtttcctataaaaaaataaaaaataaaaaaatcttggtaggtggttgttgggagacgggatgggactgggggtgttgtatgcttgggtttactaggaatttctttgattggtggttatgagttgatgggccctttgctgtaattgccacttccagtgaagggatgggactgaggttgttggatgcctagatttaggagagatttacttgattggaagttcttagaacatgcattaaaaagcaaaggttttaccctttcagaaaaagatgaagatcgtggatttgaggatgcttgtcgtctatcagttttgcagtactaataagtggttgtgctaaaggatgggttaaggctttaaaggatttaagtgattctcttcctcctttttatttagtgttggatattctgggtaaattgatattaagagtggagaagtgtggtattttttggggcttcttgttgggtagaagtaagatgagggtgatccttgtacaattcactgataacaaaattttcttcccaagagctagcttaaataacttacagagtttgaaactaattttgttagtgcttggacgcatttcaggactaaggataaacctagaaaagagtaccttgttcgatatcaacattggttagaacatagtcttggaattggctttctccatagaatgcaaggtttctgattggtctttgtcatatcttctgagtgggatggaatcctaaagctgtttagttttgggatgtgatcgtgggtgggggtttcttggtacttaaatggttggaaaagacctatttgttgttaggtggtagaataactttggtgtagttatgcttgtcccatatcacttcttattttccttttattttcacgtcacttgttaaagtggcatagtgggttgagaggttatagaaggaattcttattgtcaagtatgggggaaggaaagagagatcatcttgtaagttgggatcaagtgtgtaaaccaaaaggtgaagagggcttgagagcaaggaggatggctttgaggaataaagtcctattaaggaagcggttgtggaggttatggaaagtagtgattaatggtacaagatcatcttgaatattcatgggcaacactctaatggatgggatcaagtgtgtaaaccaaaaggtgaagagggcttgagagcaaggaggatggctttgaggaataaagtcctattaaggaagtggttgtggaggttatggaaagtagtgattaatggtacaagatcatctcgaatattcatgggcaacactctaatggatgggatgacagtattgtggttaggctgtcacatcaatgcccttagaaggccttggcacaggtattttgggatttcacttggtattgagtgggtgatggtacaaaaatttgattttggaaagatatttgatggagtaatctacctttttattttttatttttggataagaaatagcaatttcattgtgatgaaacatcaagtatagagaaggatgagcaatgagcaattcttccaagtacttaatcctctatacaaagaaggataaaaagacagatgagtgtattctaatccaaaaagttaaatctaactaaaatgcacaatggtacaaaatcttcaacaaaagaaaccatatgtctagctccaggttttgctaatgcatttgccccatcattgtctaagcaaggagtccaataaaaggaacatcgtaacgctgaagaaatgtcaataatctggagcaaccactctgacaaattcctatggtcctctttctttcttagttgcctatgatatgacaataccagaatcaccttcttgaaaattggaaaaaccctaacaaccctgctaaaagggttagaatttctaccttaatggctgaaccttagcatgcaggtttagtttcaccagtaatctacctctttatgttcaattccttaatccatttagactagtgaggaaagagatacatgtgtttctttgattctaggtttatcctcctatatgtcatgaaatttaatttctgtctgtaccttttggaccatgaaattgaggaatttactaacctcatgttgactttacttcttgtgtatttgtcatctactttctttgatgtaagggtttggtccttgatatctttggatatgtattcagttaattctttttttaaggccctttctatttcctccaacttgagttcctttcttcttgaagatttcgtctgaaaatctaaaactccttcgaaagtcaaggcctttgcatgggatttattctatttatcatcatccctatgtgcattagcttgtgtaatgtttgagggcactcttttgatcattatattgctagattggaacatagtgtgcagatctacgtctactaggctgtcaaagaagacactcccaatttagactctttctctatttgttgttgttaaactaaatattgatgggtgttctttaggtaaaatccagaataactaggaataatcttaaaacactagtacagggattcttgaaagatgctggagagaggctagccattgaggcaagactttagccttgttagaagacttgaagctagttcaagccgagggtctctgcaatcttctagcagaggccagagagagatttgacgatatttatattgtggatgaataaggaagaaaaggttcatggagttggatgggaggcttttccaattttttcatattgcctgagcattagggtgtttcttttgttggattcctcgattaactaatcaagtgcagattcattggcaaagtggggaaccaaacttttgatcttttttgtaggggattttctacgtccgtgaggaattgatcttatagttgtaacagtcgtgttactttttgtcaggttgatgcaaggttcttacaagggaaaagatttctcatccttttttctgtacctaattgtttcattgtaatcaaatgtataattttttattgaaaaaaaattaaagatttatactctctaaatactagagcaggaggtttccaaaaatatgaaaacacaaagtcttgatctcttacctcagatctccaaaaccaccaagaaaaattcttcattcttccttcttccttcttccttctcccttctctctgcagctcttaaacacggatttgtttttcagaacagaagcccatggaacctgtagtcttttagggtttgcttatttatctgcagaaccttctaatttcccctaaaacctccctacctcttctaggtcatagcataggaattttccgaaaggttttactctaattaagtaatgctccttaattaattaacaacctgtgtctgtaattcctaataaactaactataattttaattaggcatgttgctgtgattaatttattaaactaatattaagacaggattattaatttacccaagagcctaaggttgggttgaggtactactggtgaacttctataaacctgatgattatttcctttagtttactaatagggaccttatggaagcaagaatgaagaaaccataccatatgtgaacttaacatactgccattaaatttttacatattatattgttcatttggatatcaagtgggaaatcctgtgttggatatcgactccaattgtctagtttcagtctcttttgccttctatttccaaggatgatcgagtgtttcaggttcttcaagctgtaccacttgttgtgagctacagtttttgtttatttacttagtctgacatttttcatgtaaaaaatgcatttgaattcagatttcctttttacttgcag

SEQ ID NO: 10629 - DNA, 6200 bp, Vitis vinifera
  Intron number 6 from transcript GSVIVT01000748001 (locus G SVIVG01000748001) derived from phytozome v7.0 (chr-ID chr7 ; pos 350562 to 356761)
ttgccacagatatcttcgaatttcttaagaataaagtgagttccttttggcccccttacatttcttctggcactaggcaccatttacatttgattaatgagtccattttttttgaagtttttattttttatctacattatattcataaagatgttactttaagtagtacataatttcacatgtatcagtccattttcatttccatgaatgttatcatatcatgctaaatggattcttcctttggctaaatagtaatttgatgggtggccttcaaactaatggaagattggaaccattttttcccttgagcaattcccagagttgcaatgtcaacatttgtagcaaatgtggggggcatagagagaggaagaaagaactgcatatggcctttatcaatgaagatgatgcatatatagggtagagatataatatagaggattttagaaaaagaagggaggaccaaatagatgtattttgatatgtctatggatctgaatgatgaatctgttaccatcatgagcataactagagatatatgaaggatcaggactaactccctatctttctttttgaatcatggatgaatcaactggacgcatactggatgagtttctatggtatatactgtttgtggagaatatagttttggtttatgaagctaaagtagggtgaaagcttagttggcctcaatggaagatgcttgaaattaaaagagtctccagataagtaggtttgaggctgaatatatgtaatatacctttgtaaagttgaaatggaaataataaagtaaaaaatattgagaatataccaaaaagtaattatttgtgttacctagacttgatgtcctgaacagggagagagattgaacattgtatttacctatagaattggagaagaatagttgaagtggacgagtttttttgtagtgttgtacaattggtgttcgcctgtcaaattggaggaggatttacaaaactgccatgtaaccagctatgctttatagaatcatgagtagttgagatggtcatcaaatgagcatggatgaaatattgttgaaattgttgagaaggttgttggtttttatctttttatgataggtctttccctttttaggtttcctgctaagacttgatccctcctatgtccccatcccaacccttaaccacttaagctaggcatcaaggatggatgttgagaagaatgaaggtgagagttgtaagacaaaaaattaccaaattaaaaataagtacatttggaagaacctaggggtaggcacaactaaggagcaagttgagggaaaatactcgaaatgttttgaccatgtgaaatgaagactataaattgcatagaacataatatagatagcttaaggaagcttcagcatataggaggaatctgaaaatggacatgaattgagctaatatgtttgcatatgatttagcagacaatatgcccctagatacagctgattgtctaaataattagattaatacaccatgttttgctagggtttatccttcactgtgctgctgctcatgaggacaaaagtagagaactgataatcttatttgatatctcttgttgtggtattgacatcttatataatagggactcaactcggaaacacactattgtttgtgtttgtttaaaatggtaaccgactaacagtccttggctggttgtggtgttgtgacttgggaactgaataagaaattttgctgttgtgcaacctttttttttattttttatttatgggcaaatacaggtgcattaaatagcccttggtaaaagggggtccacaccccatgtatataggaaccttatataagggaaccacaggaaaaaatgaaagaagaaaactatacaaaggaaacctatcagcttctacttaagccatctatgaactctaaaaaagtgcagttaaccatcccaagcaggactttggagcaccaccagagggatttgatgaaaatctccttcaatttatagttggaaacctcctccttattgaagacccggttgttacggtctctgcatttgtaccaaaagaaaaacaagaatagtcatacaccacaacttcctcaacttattatttatgccatgagccttccaacccaaaaatggcaaataaaatatccctcaataattgaactttattatagtgaattaaaatatagtgctgattctatattagcttttcagaggctatatctattaaataaagaccatcccctcctgataagttggtttgtagttaaaatcctgtttgcagctcctttccaaacaaaaaaacaaggcctcaaaggggcataggaaccctacatctcttttgcagggaaaagagtgaggcctactgaacacattgaattctaaaaagacttcatttgaatctctccttcttcactgctattcatgataggttatcctctctttccccaatcagattcacgaatggatacacttcataaacttatccactggcattagctcctactcttgaaaatatctcctaaaactaggatttcaatgaccctaacatctctcaaccacccagaagtgttcccccccccacaccaattggaattttggcagtaggaagactataaagacaaggaaaagtttcttttaagaagctgttccctacctatctaaccaaaatcttgtcctcaagattcctaatcaaaatggaggcttgaaggttgaagtcatgtcatccccttctaatggctatccacaaccccacacattgtacctccttcaccacttgagtgccccaacacctttcacttctccaagctttcctttaatggcctttctacccaaacagtccctctcattagcaaatctctgtgtccattttccaagtagggctctggttaaggtagaaagttttctaatgccttgaccaccaccaatttttatttttatttttttatcttagcacgcccttgtccaattcacccaatgaaatttcaccccaagtgatccctcccataggaaatctcttcgaattttttctattttgattctcattctcctgagaacgacaaataaggacatgtgctagattggtatattgagagtgcttttgataagagtagatcttccttcttttgacaagtactttttcttccaagaagccaatcttctcttaaagtgctcctccacaaacccaaactacatcaaacttaaaaagttcttttgaaggaaagtctagatatgtaaaggaaagtgtccaatttagcatcataaagaagaggaaactatcaatcatatgttaattcattgtacggtggcaaaaggtttatgggatattattcttgcgttgtgtggtgtacagtgggtctttcctaattctgtaaaggaggttcttagtagttggaaaggctcttttgtggggagaaaaaggaagaaaatgtggaagtccatcccgcttttcattttttggacaatttggaaggagaggaataggcttgcctttaaagggggtgtgttagcctttcagaaattaaagacttcgtttgtgtataatctttggggttgggctaaagtgtacattgatatggagtcgaattcccttataggtttcttggaatggatagcttccaagtaggggttgggttcttttgttttttggtttagggtttgtagccttgtatactccctgtatgctcttcggctttttgccttcgttaatataatcgtttacttataaaaaaaaaataaaaataaagaagtagtcaatatatctggccccatcaccttgcatttttaaaccatgatgctagctcaaaggaaatcagcacccatctcaaatgccttgattgatcctcactagccttctataatagcaaagtaccatccacaaagagtagatgggaagcctccacccttcccttctcctatccccaaaaaagaaacagctccataaccaaaacaaaaaggtgaggagagaatggatcagcttgacccaacctcatagaactttaaaagaaacctgtgggtgttccattgattgaaattgaacatctcatattagaacactacaactgaattgttcatgtaacacaagatgccacaggaacgcagaaactaaaatatgatttcctgcgccagttaacagtaaggatatctagggaagcatcacttcaacccccttaaagatacccttgctgtcaagggttgaaaaatttttaaatgccaaattttatcaatgttcgtatccaataaaaatgaaaagtagaaactttaatccttccatcatctcgccaatgagtgacttttcaatttcagccatctgtttcaaaattccttgaattgttaaatcaaaatatcttgcaaaagagcatttagctgcgtcaattcatatcaatatgtgccattttcctgaattatttgacactctacttggctgcaacaattcttttcttgcttgtccaagcggccaatgttttgccgatgatggtgcagttcccagttgtggaatcacattactgcttattgccttttgaaacatatgaacacaatatcaggcttatggcttggttcaaaattagacttcttactgtagcacattggagaaccatcatatttggttggagataccacatcccaatgaggctgtccctggaatgcatgaactgaattaccacactaattgctaaggctatgttcgttttggtactctttcccagtcaaattaatttgcttgccttgtattctttagtatctgaggttaattaaagaacattccttgctgaactctacagttgccatatgcatggtagtgtctacagtggataaagtttctctcacccccatgaaagaattctctttttcccaataatctgcttccaagctggcagatggatgaatctgatagaacaagtaaagcaaacaaagtgatgtctaaaaatcccatgcaaaataagtgaatttctcttgaaggcctggcaatccgaaatagccttcattcgagtactaactgtctagtactgtaatggaattgtgtttacttagaatgtttctcaagctgaggtgattagcttccctaaggccataatctcagcttcacctgccccacattaactagaaatgcataatatgatgcctcacattatccatgaaaatctcagaaatacctaattgacctggactctcgggaatatccatcaaggatggcttttgactattcctagtgatctaggaatctagacacacatgggtgaatgcacacagccaaagccagcaaaatgacaactctctgataatctaaggcatagggactcgtatgaaccccttggttattgaggcaatgaagtgagactgaattatctccctagctgattctaagatcttcatatttgcttaaattattcttctattaattcctgctgcactaattgctaaaattgataggtattccttttcagattaaaactgaaagatcaatataaatgcgacaaaatacctaggctataaccacttaattgaatttatcaaaacatgcataacatggcaacttaaatccatgaatagcctaggctataaccacttaatccgttctatagtacatggccattagacattctaagtggggcaagttatcaaatgaaaaatattaaaccatgggctagaacttgccctgtgagaaataatgacaataatgcctgattgaatacatttgtgatgtgggagttaattcaagtgggaagcatgctttgtatgatcacattgaatgtattaccctaaagaacagttatgattctgatactagcttcacagaaagtcagaaaccatagaaaggacagtgccttctgggaaagaatagtgatgtagaatagaaaaaaggcatgaaacatttttatttgacacatgaacaatcttaagatggaactgatcaggaaatgggtgacaacttgctgatgtttagggaaaatcaagatcttgaagcacacagccttagcagaaaagtaaacacaaaactattgtcactggcactaagagatgacaaatgagatcaattgttagaaatggatttatcaatgacactaaaacattgtgcaattgttgcttattttaggatctagaaattggaaatgcaagaatgttattttaatttcttctagtgggaaaattaaagaaatcctctgatttccaggagatatctcaggtcatatttgtttcattctgtaacaggg

SEQ ID NO: 10630 - DNA, 3258 bp, Vitis vinifera
  Intron number 12 from transcript GSVIVT01036006001 (locus GSVIVG01036006001) derived from phytozome v7.0 (chr-ID chr 4; pos 7082374 to 7085631)
gaggttatcctgtgctcttttcttgaaatctctttgttaatctcaaaatcttgatctatgatattaatcatttcggaatatgtgggtgacatatctggtgtttcttgggtatacaccctatattttgaatagtaaggttgtgtgaaagtttttgtgtgacttctaacgccaaatgatttaatattcttagggtttgaaggtgtagatccttcttctatctcagtggttctagttgggatagacgaacatgatgctctggagggttcatattttgaaattctaggggtcctagaatgtttgaaagaagaagacttgatcttctcctccatcaggatattgaactatttgttctatcttctctactctttattctatgggtggaactgggaggaattccgtgatcttggaaaatcaacttcattccacatgattttcttagggatgatgaagttagatttactaatcaagtttgattggaagagaatgatctctcccttaggattggtgcataaagccctaaatcctacactagtggtcatactcttataagcaaatttggtaattatggagattggattgtttccttccttaaacctaaatccatgagtcttaacgtgaaggacaattgaatctaagatgtcaacatcctttagtcttactgtgaaattaggataatattggaaataaattggtccatcatttaatcttgcttgaacaacttcaataatataatctttataatcaagatttctattatctcttaaacacatgacaattgaggtatttaaaactatcctgaccaatgacttagtagctaaaattataatctttcctatgcctttgtatggatttgctatctaaaagtcttattacttgatcatcttgttcttgacttatggtctgttcaattgtcttaattgtataatatgaaaaaaacttaaagggtcatttcttataaatttcttggtgaaaaagcccctaagttcaatggggtaacacctagagggtgggtggggtggggtggggggaatgggtgtattaaaaaatttaaataaagatttatatgttatacctaaattttatcttgcgagatatcagagtatatcaattctttctattgtaggcaattcaaacaagatatcaaataataagcaatggggcacaagagatttttacgtggaaacccccacactaataatggagataaaaaactacgaggtctaagacctctaatctaaatccactgtataagatcaagttactcaaatttacttgaccgctttactttaaagatttactctctagtgctcacaacttgatccatgtccacgatgcagcaatctccgattgctctagtgaatacaccttaggcttgttgaagggatgcaagtcttcaaccctagatttaatccttgaatccttcaaatgagagattaggaatagtgtggctcatcatgctttctcctcaataaaactctctcaaaaagtttttgatctcttgtttttctctttttcatgccctcaaggggttatagtgaggtatatataggtaactaagctgaagagtttcggttttggaagatttctcaattgaatttgcgtgaaaaattcttggtagagatagcatgaccgctcgagccaactaacccactgcttgagcggtaaggagcacttgagcaatcctctacacttgggcgcttcaagctgcttgagcggtcctaccctttataaaatattaatttgaaatcattttaagttcaaaagaaaaaatgattctttttatgccttagaggagcctaacatgccacaagtcaaacctttttagacgtacctgtgacttcccaattagatgaacaaaaacccttgatcttcaatggagaacaagttgctatctaaaaagacttctatgaccaaacattaaaaggaacaaaattgccaacaaataatcaagactcaagtcctaacacttgggagatcttaggtaaaatttccaatcgtctaattcattaggaattttaggataatttactttttcactgtttactacaacttcttagggatctatggatctcttagacatagatctgaacattgaactcattttaggacttaatctagagcctattcatggtattacaaacctaattgagtaatctccagaaatcctgccctaaaacgcccatctcttcggctaactcgagctcctttggatcgcctctaagcaaactgttactcctaggatagatgaagctctaaaataaacccaatttcccttcccatggctctgataccattaacatgtagaatgaggtaatatacaatgaaaaggtagattgttctaaaattcaaagagaaattggaaacaaacaaagtactaaaatataaagaacttgacaataataaatttaaacacaaagagaaacaaagtattcattgataaggatttcaaagtacatgtggtggatgaggacttcttcccaaataactctgttcaaatagagcaaatgaataagtttcctccaaaatacataagagacccatacctcaatacagtaccacatggaactttatgaaggaaaaacaactctgctctctgtagggatcaatatatctacaaaaagactgaagcttgctttgacctctctaattcacacacaaattttaattgagctgaattttattgagaggagtgttgttgaaagctgtagttattgtggtccaaaaagaggaatagaaataaattaggtcccatattgactttgtagttctccacttgtcttataaaatccttgcatttctctcctgcagtgttatctaaatcaaagtgaggcaaacatctttcctaccatacttacattagatatatagatgtgtaaatgcttgttggtttggtttcctccttttaggagttccttttagattttttggatgctttatgttgtaggtaatctatagtctctgtaagttgctgttgcatactacatgtcacccctacttgagttgtgtggcatcgtcactctctagcattattttgcattttcctcctgtgtcatctttaacagccattttagcacagaccatgacacttcatgttcccacccccacccccgttgtctctgtctgtctgtttgtctctcctcattttctctaccaactaccaacttcattcctccagtgaaatatgttcttatgtctcatgtggtcttcattttcatcatttcagaagggttatataaattcttcacatccaaatttcat

SEQ ID NO: 10631 - DNA, 646 bp, Vitis vinifera
  Intron number 4 from transcript GSVIVT01010684001 (locus G SVIVG01010684001) derived from phytozome v7.0 (chr-ID chr1 3; pos 11714915 to 11715560)
aaggttagctttgttccatatcctttatacttttacttttctatacagcaaaccttaatagcatgctctcatctaggagagtggaattgctctttgctctcttcttttttattggtagttcttttatcctttatacttcaaccttcttactgcgatccataccaaataaaatgctatgtgaaattgaagagtgggattgccttctcttttctttctttttatttgaagttcatcgtgtgtataatggggtcagttcttggtcttaggcatgcttagtggttttggttggttatgtttgtggataaggggctgagtgggcaactaccctttttaaattaatttcattatgtataattgaaacatgaaaagtataaatttgggcatcagcagagtttagaacttactttatttgtatattgtaatgtgaaaatttgaggagtaccaagtttaaagaatctgccaagtcaaagttgctctagtttctgggcacagtcatggagttgggagggatttgttgtcctgaaggatggactttgaagtgtgtaaagcttttgtggtagtaaaactgcttctgtgtaggcatgctgttttgtctgatcaaactaagttccaatgtgggcatactttggattcaggttggacaaag

SEQ ID NO: 10632 - DNA, 10019 bp, Vitis vinifera
  Intron number 2 from transcript GSVIVT01032340001 (locus G SVIVG01032340001) derived from phytozome v7.0 (chr-ID chr1 1; pos 15281304 to 15291322 reverse strand)
atgtatgttttgctcatttctgtgagttactttcataccatttcaggagaatagatttatgtttgcatgggcatcacatgcacacaaagtcccacatacgcactctgatatctagatgtatatagatatatgtaaagatagagcacagttcagtgaaaagaattgtttgtttctgatgaaagcatgtataagctggcatcagaaatacattgtgcctttgtatacatatatatatatatatatatatatatatatatatatatatatatatatatattgaattgtttttctctgatgaaatcaaaatttcagaacatatttttgcctctataaacatgcaccagacttcagaatttgagcagcttattatttggtgaatatttgttgctgattctttgatggacataatttttcaacttttccaatattttgttcgctaaaatttgtcaaatatatagatctctggtgaaagcttatatatatatatatatatatatatatatatatatattcaatgaaataaattgtttttctctgatgaaatcaaaatttcagaacatatttttgtctctataaacatgcaccagacttcagaacttgagcagcttattatttggtgaatatttgttgcccattcttagatggacatactttttcaacttttccaatattgtgttcgctaaaatttgtcaaatatatagatctctggggaaagtttattttcatttatgtctatttttaatagataataaaggatgtctattaagctaataaagggggtgaaccctagtacaaagtgcatatacaaagacccaacaaagtgaaataattcaaccccaaccaataacttgcaccctgtaggaatacttacttcagttacaccctatccaagaagtaatgaagatatgcttccttccataaaggcatccattgagcacataaacaaagatttaaggagcccttgaagcatgggtcaagtggtaaagggttggggagggtttgtgtgaaggtttctaggtttaagtcgcaataaggacaaaaatttacctatcaaagaaaaaaggacacccatatttgaggaatacatcttttagtttttttttattcttctccttccataaacctaacccaaccaacccccctccccccaaagaaaaaggacaaatcctcttccccaataaacttactccttaaatgaaggcaaaacaatcaatcaaagcactaatgcattcttcatagttttgttgcccaaaaaaagcatgactaagaaaatctcaaactttagacctattagcttgatcactagtctttacaagataatagtcaaagtgttatcagggcatctaagaggggtacgaaactattcattctactcaaggcgcttttgttcaagggagacaaatattggatgcagttctcatagccaatgagatagtggatgagaaaagatgttcaggggaggaaggagtcgtattcaaaatcgactttgaaaaggcttacgaccatgtgtgctgggattttttggatcatgtgttggagaagaaagggtttagtcctaactcaaaacattcacaccaatggtaatagacgggtttgagatgagggagagcgagcgagcatgcgagagcgacagtgacgagggagaaagtcaagcggagaatcggagaaaacggaaggggagtagcttttgggtggggtcgaaggtttttgaagtcggagttgaggagagaaaaggcaaatcccatgtattcatcgtggaaagcaagagaggggtttcatcatgggtccgtctagggccggctaatgtagggctttttctggagggtctgtaccaatgcatcaaggacgggaaagaaggtaaatgggaaaagggatggaaggaaaaggggagaagttactctctggtgcatgatgccaatagtgcgggatgcttcctccaattaggggttgtcgatctggagaagaagagatacatcatttgcatctcgaaaggtagtggagaaagggaggggggggggggggggggggatggttggctatggcggagagtttgcgtaaattggatgtttgtctcaacaaaaaggagtacaaacagagagggtctcgggaaggttgaatgtcgaattggtgaagaggtcgtggagtagggatagcaaaaaggtcagagtggaggtaaaaggggaggaaataagcagaaacttgagtagattggatcattgtgtagtcgggatctagaaccccagtctagcaggaggagaggatttggagaggttggggtggctcatggcaagttcttggggtttgaaaggaaagttagggttggcaaggttggggaggacgggttctattggagtttgaatttgtggaagaagccagacgagttctcacctctgggaaaaggtcggtgggagggattcaaatgggattggagtgctggaatccaaggtctaggtgtttgaaagaaggggaattaagaaatgaagcttgggtgaggattctaggtcttccaatctcattgtgggtctcgtcgattttgagaagagtgggggaagtgtgtggtggtttcttagctatcgaccctaagacggagagaatggaggaactacagtgggctcggattttagttagaacgaacggcgaagacctgccaagcttgttggagacaggggtagaggagtcgacctattgcctctccctttggtgggaggtcctgctgtcgttgaggcagaacacggtgaactatagtggctcgtctggttgatcaagcggagaggttaggggaaacgttgatgcacgcgctggtccgtgagtggaagagttggcaaacgcttggctcgaggcgcagttccggtcagttgatgggattggagggtaggtgaacgaggcgggtagtgaagtgtttgaaaatcgggctcagaatgggtcgttgactcggccttctcgtgaactgtcggttgctgggccatcttcgtctagccttgcagtgggactcgtgagctcgaagagggttgttgggcatatctcacaaggcccatcagaggaagatcttttaaagggggatgtgggtggtggggctgggctagaggttgggccgtcatgttccaaaggaaaggggtgggccgccgttgaggtgaacgcgttgaatattgggccttctttcctgttaaaggaaagtcatggcccgtcccagtcccagctcactgtaagtgggctttcattgaaggcttgctcctcagctctcactggaacttgcaaggggagcaactcggagcttgagtttattatgatgtgagagaaggaagactggaggaagcagcaggtggattttcactctacaatgacaaaccgtgcgctaatagaagaagcttcaaggtatgggtatgtttcaaattcgtggggcttaagggtctcggggtcttctcttcctaattctttttattttggtcggactccggagggggagtattacgaccattctgggatgctaagggaggatacttaggaaggaaaattggtaagcatcccagacgcagacgggcacgctgaggttggcaatggttgttgggacttgattgaggttaattgtgtcggagatttggcaagggatctggagtgggggttagttcagtctgaaccccaagaagtaaggggtgaaaaggaggttaattgggaggaaagcagtttggctaaattcagccatttcttgggcttttcgactgtaggtttggaaaatgaaatcctaagtttcttgatcaaaattagaaaaaggagggaaaggatacacagtaaaggtcttctggagaaattaaaatttgaaagggagcttaagaggctggagtgttcaattaaccatgagggggaacttaagaagaaatgtcctctttagggcagagggagccaattagcggatgtccaatgaacctaaaaatcttgagttggaatgtgaggggagcgaatgacaactctaaaaggaaaataataaagtctgtcataagaaagcagaaggtggatttgttgtgtatccaggagacaaagttacaagttatggctgaaggggtggtgagaagtttaggtccgaggagattcttagactagagaaccttggatgctactagttcggcaggaggcatcttgatttgctaggacaaaaggtctttggaaaatttggattgggaggtgggccagttttccacttcctgcagattcaggaatgtggaagatggtgcagtctgggtatttatgggagtatatggtcctttttccagaaaagaaagggagtgtttgtgggaagagattgtggcgattagaggaatttgggaagaaccctggtccctagggggtgattttaatatcatcatatcccaaagtgaaaagagcatacaagggagaataacctcagcaatgaggagatttgctcaggttatagacaacttagggcttgttgacctcccgctgcaagggggattatttacttggagcaggggcctcaataatcagtcttgggccagactggatagatttctcgtgactcttagttgactcgatcagttcagtagtgttgtccagagaagattacctcggcctacctcggataatttcccagtacttcttgagggtggtggactaagaagaggaccctccccattcaggttcgaaaatatgtggctcaaagttgaggggtttaaagatcttcttcgttgttggtggcaggggatggtggttagaggcagtgctagttatagactagttgctaagctgaaggagatgaaacaaattctaaaaatttggaatagggaggtgttcgggagactggagtgcaataaagctgtagctctccaacaagtggagttatgcgatatggtggaaggggagagaagtttgatggaggaggaaacagtctgtaaaagggaagccaaggagggatatgctaagtgggtgaccttggaagaaacccattggagacagctgtcaagggaattatggctaagggaaggggatagaaatacgagttactttcattgtatgacaactgctcatcaaagagttaattccctggacagagtcaagataaatggggtgtggttatcaaaggagcaagaagtgagggaaggggtagcgaacgcctttcaacaactgctctcagaaagctcggattgaaaggcgaacatagggggattgcagttaaagcaaatcagccagcaagaagcggagttgctggagctccctttttctgagtctgaggttcatgctgctttaatggatatgaatggggacaaagccccaggaccggacgggttcacactggctttttggcaaagctgttgggatttcgtaaaggaggagattttggatatgtttaaggaatttcatgagcagaattctttccttaggagcctaaacaatacgtttctggtcttgctaccgaagagaccttggggattatagacccatcagcttgttaggggggctgtataaattgttggctaaggtgctggccaatagactcaagaaagtgataggaaaagtggtttcccctgatcagaatgcgtttgttatggggagacagattctagatgcttctttaattgcaaatgaggtgattgatttatggcaaaaaaggggagagaaaggtctaatttgcaaattggatattgagaaggcgtatgacagcattaactgacagttttttatgaaggtcttgcaaaaaatggggtttgggccgaagtggttgggatggatgtggagttgtatatctacaaccaagttttggtcttggtgaacggagtgccaaccgggttctttccgagttctaaggggttgcgtcaaggggaccctctttccccctatctttttgttatgggaatggaagtgttgagtgttctaattaggagggctgttgaagggggttttatctatgggtgtagcatacggcgatgtagaggacatgctgttaatatttcacacttactctttgctgatgatacaattgttttttgtgaggcaaagaaagagcacataacgcacttgagctggattctcttttggtttgaagttgcttcagggttaaggattaatttggccaagagtgaaattttaccgattggggaggtggaagaggtggacgagatggcagcggagttagggtgtaggatgggacaactgcctgcagtctacttgggcctgccattggaggcgcctaataaggcctcttccgtgtgggatggggtggaagagagagtgaggaggagacttgccctatggaaacgtcaatatatatcaaaaggtgggagaattacgctaataaagaccacgatggctagtatgccattgtatcaaatgtctcttttccgcatgccaaagacagtggcaaggaggttagaaaagttgcaaagagattttttgtggagagggggtaatctggaaaagaaaggccacgtagtcaattgggaggtggtttgtgcggttaaggaaaagggggggctgggcttaagaaagctaaccttattgaacaaagccttgcttggtaaatggttatggagatttgcttgtgttaaggaggatccttggaagcaggtgcttgtggcgaagtatgggcaagaggatcttgtttggaggacaaagaaggcaaatgaggcggttggagtaggggtttggaaggagattctgaaggaatctgcttggtgctgagaaaacatggcatttaaagtgggaaaaggcaccaaaatcaaattctggactgatttttggtgtggatgtacagtgctgtcacaaagattcccgcatctttatgctatggctgtgcataagaatgccacagtggaagagatgtgggaccagaattttggccaaggcgactgaaatttaaggtttcttagggactttaatgattgagaattggatatggtagacaatttacttcttgttttgagggggcataggattactctggaggaagactcggttttttgtaaggaagggagaaacgggcagtttagagtcaagaaagcgtacagcctgttggcaagccccaatgttgccgttttcctaaaaagtaacgtttgggtggatagagttccaaccaaaattgcgttcttcgcgtgggaagctgcttgggggaaggtgcttgctctggataggctccagaaaagagggtgacaacttcctaattgttgttttttgtgtggttgcgaagaggaaactgtaaatcatattctaatacattgtatagtggccagagtgttgtgggatattgttcttgggttgtttggtgctcagtgggtttttccagaaattgtaaaggaggtcttatttagttggaggggctcttttgtggggaaaaaaaggaaaaaaaatttggaaatccattctgttcattttttggacggtttggaaagagaggaatatactagcttttagggtaattttttagggggggggggttgtgttagcaattcagaagcttaaaaattcttttgtttgtaatttatggggttgggctaaattgtatattggagaggtgccaccctcccttatagactttttggaatggttagcttccaattaagggttggtgagttttttgtttatctttctttggttgtgaggccttagctgccttgtatactccctgtatgctttgtggctttttgcctcttgttaatctatgctgtgcttatttataaaaaggaaaaaaaaaaaaaagaaagggtttagtcctagatgaaggaaatggatgagaggctgtttgtccagagtatcttttgtagttttagtgaatggaaatgctaaagggtgggtcaaggcatctagaggcttaagacaaggcgaccctttatccccatttttgtttactttagtcacagatgtactgagtaggatgttattgagagcagaagaaagaaattcgttgaagggtttcagggtggttaggaacagtacaaggatgtcccatttgcaatttgcagatgataccattttcttttctaacactagggaggaagatttgcagactctcaagagtttattgctagtgtttgggcatatttctgggcttaaggttaaccttgacaagagtaatatttatggcatcaatcttgaacaaaattatctttctaggttggccgaattgcttgattgcgaggcttctgggtggcctataccctacttgggtcttcctttaggagggaatcccaagacttgtgacttttgggatccagtgattgagaggatctcgagaagattagatgggtggcaaaagacttttttatcttttggaggtaggataactcttatccaatcttgcctcacccacatgccttgctacttcctttccttgtttaagatacccgcttcagtggctgcaaaaattgagagattgcaaatggattttttatggtcaggggttggggaaggtaaaagagatcatcttgttagttgggatgtagtgtgtaagccgaaggcaaaagggggtttgggatttgggaagatagctctaaggaatgtcacactcttagggaaatggttgtggaggtaccctagggagggttcagctttatgacataaggttattttaagcatttacggatcacactctaacgaatgggatgccaacactatagtcaaatggtcacattgttgtctttggaaggctattgcacaagtctttcaagagttttccaagtttactcggtttgtagtaggagatggggaaagaattcggttctgggaagacttgtggtggggggatcaacatttgggttcccaatatccaagactatttagagtagtcacggataaaaatattcatatttcttcaattctcggatctactcgtcccttttcatgaaactttaatttttgctgcaacctatccgatgctgagatagaagatttagaaggcctcatgcggttatttgattgtctgcatttgtcattttcggttctagatgcgagatcttggtctttatcttctttagggctttttacagtcaaatctttctttcttgccttatcccaatgttttggttctcctccagttttccctactaagtttgtttggaaatcccaagtctctttcaaggtcaagtcctttgtctggttggtggcacacaagaaggtaaatactgatgacttcttacaactaagaagaccctacaaagctcttaatcctgatatttgtaagttgtgcatgaggcatggagaatcaactgatcatcttttcctacattgttctttgacgatggggttatgacacagattatttcagttagccaagatggattgggttcccccgaggagcatttccgacatgctgtccatcaattacaatgactttggtttatcgaagagagggatagaattgtggcaagttgcgtgcatagctttaatttggattgtgtggcgggaaagaaatgcgaggatttttgaggataaagcaaggaattaagagaatctttgggattctattcatttccttgcttctctttaggcttttgttccaaggtttttaaggggactccccttattgtgttacaacttgattggctagcggcgtgtaattcctttgagttgctctagtctagagagtttgtttgttatcacattgtattttcttgttttcgtattcttgtagtttagttttctttggtgggaggatttctcatccttctcttctacttctcttttctattaatatattcctttgtcgtttcctatgaaaaaaaaaataaaaataaaggcaaaacataagaaacccagaatagagaaaatattagagcctaaagatgcctttccacctcatattgaagaagaatatgagttgtagattctttccttttggttagacagtacctgttaccaataatctacctttatgccttaattggtcaaatgtgggtattttttcccaggccacttcccatattaaaaacaccccacttgcttaatatatgtattttttgttgattttagtgtcttttccttttataatcatttaagcttaagagtcttgttttcagatt

SEQ ID NO: 10633 - DNA, 10775 bp, Vitis vinifera
  Intron number 1 from transcript GSVIVT01030706001 (locus G SVIVG01030706001) derived from phytozome v7.0 (chr-ID chr1 4; pos 14125063 to 14135837)
actcgcctcagctttaagcttcttcgatatcttgggtattatttctttatcattaggctctgttttgtttcacagaaaatagtttcagtacgagttttctttcaccaggagcaatgtgcttttatttcgagggttgatgcgcgactcatataatttatgatcaaatgattagggggaatttgtctgaggtttttctctcagtttttcatttttcaaggagatatcgatttctctccattcatttttctgtcaacttagtttgtggtgttcatagtttagatctttctggcctttggggcttgctatgtcgattttgttgcttttctgttgtgtgggattcaactaagaatttcacaacctgattgttggagttatatattttcccttgaaatatgtctctgacttgaattcggtttctgctttattagaatttctttgagctagggagagatttaaattatgggactggaaggtaaaggtcagaacatatgcccttgagggctgatcaagtgacaagggttagggtggaggggtgggaggttccaagttcaagccccaacaaggaccaaaaatagatatcttacctgttgaaaaaggatctagaatgcatgatacaattgcaaaagaggtttttttggttgaaagaccataaaatagaatattatccatccctactattggtctttgttatgactttcacttatcaatcccaatttaaatgcaaacatttttggaagcctgatacttaagcataattctttttgctaatggtataaggttggtctctgcttagggaatggctggatcattaatggtccttctaaagaataaaatagcaaattgagattgttatgctgtgggttattccttccttggacaaaaacttatggataaacaagctttaaatagtttggatagataggataaggtggtgccttttgagttccatttcattttttctaggttgttttggagcttgacttctgttgaaggtggcctttgttgcataataaatggccagtttgaagaagagtgagctctttcctatgagtaagcgctatatgtggctttgttgcttggttttaaggtggtcgagttactttatttttgggccttcccttgggtgaccatttcaagtctactttcgtgtgagatggagtggaggaaaggtttcataaaaggttggtctcttaggaaaaaaaccttgtctaactggtgaaatcaattcttatataagagtacttcttctaatttgcccatttattgtatgcctctatttgcgattcttagaatggtccacctaatgctcaagaggattcttccaagagagggattgttttatggcaaaacgcgtgcatcgcgttaatgtgggtggtgtggtgggaaagaaatacaaggattttcgaggacaaagcaaggaattctgagtatctttgggattctatttgttttcttacctctttttgggctttttgttctaaggtttttaaggggattcctcttaacatgttacaacttgattggttagcggcgtgtaactagagtgtctacttttctcttcttgtactttcttatatttgattacttgtagtcttgtttttctttgatgggaggattcctcatccttctaattgattgtaccttctttttatcaatatattcctttgtcgtttcctatcaaaaaaaagaaaaagaaaaaaagaatggtccacctaatggtcaagaggattcaaagccactttagttcttaagaccgcggctagagaggaaattacattttgccaaagtggttggttgtctactaagagaaagtttatgggtgatttaggtattagaaacctatcaatgctgaacaaagtacttcttactaaaaggttatagaaattccagtggagcaaggttttttttcaaatgctagggagaggaggaaggtttttggagtaggtttttggaaaatgactagaagggggttcaaatactcttcattgtagaataactttattgatagaagatggtcatatgtcaaaattctggctttatgtttggtgtgaggagttttcatggagagttctcttctttctctttctctctcgtgcgtgctttctctttcttgttctttacattgaacattactttgtataaagatgcttaaattgtggatatttgggttaggaggggttggtagggtcttctaagccctttcttctagatgagcttccatgcttgggagttggagaaggtgtgagtttcttggtgtttattcggagcggttgttaggatagtttggtttggcagtgtgacaagagtgggaagtttttttttttggtcaattccatctgtgtgacctataggtggcttctagtggtttgttccacaaaaagaagtgtgaaagttctctcaaaagtgggcttctatgtaagaagattttggctaattaactaacttacaagaaagggctgactttggttaacgagtgttgccgctgcatgcattgtgagggatgattgaccacatcttgatccattttgggaaagcttgcttcttgtggcaaccttttttccctccctcattggtatttcttgggtgcttccttagtcaataaagtagttgttgaacaaactattctatggcctcgccaaataaggattacctttcgtctaggagcacaatcacaggcaccacccgaaaagttagctttagacggaaagccatagtcatggcctaaaattggaatctccaaaacaaaaatcggagtagggacttgatctgttgtaggcgctgctgaagcccgagctatagctgtcatgtcactaatctatctgttggcatgagagtttgtgggaaagaggagcaagaaagtgtataataacacctttgtgcttgttttaatggttttgggatggatggacccacaaaaacttcgaagacttagagagttgggatcgggttttaaaaaagactcttcacaaaccgccttttgagtgatctaggaattccatggtggtttctaattcatttttcgggttccattggtggaatggaggaagattaatctggtataggaccttttttgtttttctttttatttgtttgggcactttgtatatttcctatactgtttggtaacctgctaccagttttcctgattgtttctacttttctggaatagatttagaaaatgaaaactagttaacacatgcttggatgagtatattgaattccaatgcattaattaggatgcttatggtgatcacgatgattgtaccctcgtcagcatggtgcaagtatattggtgatgacagtggcagctgtagtagtggtgatatttttgttgcttaggtgacaatgatggtggcaacaactggctgttggtgcaatggtagtgtggctatccaattgagcatcgtgtttgtttttttcccagacataaaaatcatgttaaaaaatttagcacattgtggagaaaaattgtatttcttttcatatcttgaaagtatacaaccaatgaaatatatatatatatatatatatatatatataaataacaacggaaaggaaagaaaaaggaagaaagtaaagaataaaggagaatccctacaaattagggattatcatagttttaaaaggctcaaggcgcaaagtccttctggagcttgagacgcaagacacacctaaggcgtgggctttagtgaagtgaggcgcatcttatttcacatttatatttttatataatttaatcaagtgcccaaaaattttcctctaattttccccttcttcgtcttcttctctttttctcactgtttaggaggctagggcatttttttgtgtttcacaggtccaaaatgagcatatattgggttttggaagaagaacatgccaaaatggtgttgtttttgccttttttttcccctaaaaagactaggcttctaaacgatgtcgttttggtcttaggaaattaaaaaaacaaaactctcgtcgttctccctttgttgctctacaacttgttgtcagagggtgagaagatgactagaagaagaagaagatgacgacagaggatagaggtacacctattaggggcgtcgtgcttggccggaggcgagtgccttgcgcgcctaattagtgcctccgtgaaggggtgacacttgcagtcaggcgaggcgccaaagtgtggtgtcgcatctaggcacgcctttcacaactatggggattatatatatatcaaatatagaaggagaagaagaagatgatgatgacagaggatagaggtgcacctattgggggtgtcacgcttggttggaggtgaatgccttgcgtacctaatcagcgtctctgtgaaggggtggtgcttgtagtcaggcgaggcgccaaagtgtggtgtcgagcctaggtgcgcctttcacaactatgaggattatatatataaaatatacacctagctacatgcatatatatagttgtacacacaactgtacaacttacacaattgtatattacatttgtatatcttttgcagttgcatattacaaccgtaataatatttgatagctgtaataattttcaatactcccccttaagctggtgaatgaatattatctattcccgacttgccaataaaagattgaaattccaataaaaaataatagattgaaatgcagtacgactcaattctttagttagtacatctacaagttgacccttgattgacacaaatggagtacaaattagtccgctatctaatttctcttttataaaatgcttgtctacttccacatgcttggtgcggtcatgttgcacaaggttatgtgtaatatcaattgctgacttattatcacaatatagcttcataggtccttttcaagcaatctttagatcttccaaaattattttcaatcatagaagctcacaaactcctaatgccataactctaaactcaacttctgcccttgaccttgtaactacattctgcttcttgtttctccacgttacaaggttacctccgagaaatgtacaataacctaaagtcgatcttctatcatcaattgatctaacataatttgcatccgtgtatgcttccaatgtcaattcattaccttttttaaacaacacttcctttcctagagtaccgtttaagtattgtagaattcaatgtgctactcgaagatgtactttttttgggttgtgcagaaattgactcgccactcctacaacataggttatgtttggcttggtatgagaaagattgtgattctgtttaatgggtgtctccactagtttacacctagtttccttgtttcaattaataaatctagcacatacttttgttgggatataaagatcccatgtcaagggtgagccacttcaatgccaaggaagtattttaacctgccaagttctttaacctcaaattcttgcaataaacaccttttcaatgccttcattccttgcaagtcacctcctgttaccactatgtcattcgcataaactaataaaactgtaactgtccctaaagcggaatgtttaacaaacaatgtgatcaccctaacattctttatgtcaatttgctgcaaactccatcgacgattagttgctaaagataataggattcttatagtattcatttttgcaacaggagcaaatgtttcaagataatctattccataagtttgagtataccccttaaccactaatcttgccttataacattcaagtgatcaatctgctttatgtttcacagtaaagtcccatttacatcctactaacttctttcctagaggcagttccaccaagtcccatgttttgtttttctcaagtgcatccatctccaccttcatagcttcttttcactctttaattctcattacttcagggacagtttttgggatagttatagtgttgaggtggataagaaaacttttatgaccactagataacttctcataagacacaaagtgagacaattgatatacaggctgttgagtacacttcctaacaccctttctaattgctataggaagattataatcatcaacaatagacacattactttcataatcttttgaattaggagttacctcaatattatttgcactagagattggttctgaattatgaacctgcattagttgaataaggggttcctttttccttgaatatacctacaatgggcaagtaacactttgaatttgtttatccttggccattggactgagagtacttagatctaactcatttggtaaaggaccgaaatcaaatgatgatggagaagatggaggattttgattttgtgaggatgggaaggatgaaagatcaaacaaaaacaaatctctatcattatcttccatgaatgatatctctccctgaagataaggattaggaaagtaatttttagtttcaatgaatattacatctatagagtcaaagaaccgttttgttggaggatgataacacttgtaccctttttgtgtagaagaatatcccacaaaaatgcacttaagagcccttggatcaagtttcccatggttatttgaatgaatataaacaaaggatatacacctaaagactcctaggaaccaagtgatttattgttttgaagttaggaaatttttttgaaaatagttgcatggggctgttataatcaagcactcgagtaggcaatctattaatcaaatgtgtagcagttaagacaacttctatccaataattttttggaacatttttttggaaaagaaaagctcgggtagcagctagaagctgaccatttttccgttataccacaccattttgttgtggtatattagtgcatgaagactcatgaatgattcctttttcttcgaagaatggtgacaacacttgattaaaataatccctagcattgtcagaccaaactctttttatctcaaccccaaattgatttttcaccatgtggaaaaaattttgaaaggtgaaactgacatatgatttttgttttaggagaaaaacccatgacactcgagtacaattgttaataaatgagataaaccaacgagccctaaagatattatgaactgtaaaaggtcccaaaacataactatgaataagagtgaaaggcatcgaagctcttgtattacttattggaaaagaagcaagcttatgttttgcaagttcacaaacatcacaatgaaattgacccaaatcaaatcctttaaacaaactaggaaacattactttaagaatactaaaagaaggatgatcaagacaaaagtgatataaccatattctatttttatttgaaggggaagactcagaaagtagagacaatggaataaaacccttagtgttatttcgtccatcaggttccttaagaaaatagagtccattcttctccttagcaagtccaattgtcctccccatgctccagtcctgaaatttacacactgtagaagaaaagtcaccacatagtttaaatcctttgtaagcttgtgaattgaaactagattggtagataattttagtacatgtagaacttttttaaaacaaggttctaatttataattacatccccttaactaacaactgtaaccaatgttctatcagtaggaaaaattttcttgttactaggacaaggactataagagacaaacccatgagaagattgggtcatatgatccatagccttggaatccactacccatgcttctttggagatcaacacattaagtgcatagggctgagaattacttgaaaaaggcaaggaacaagtaccacttgtaggtttctctaatgtccccataaagatctctgcttttcaatatcttctctattgaactcaggtcactcttaagagaattctttttcacctattgattgtgccaaggttaaacgtgtctgtccttgccttcctccttgattactctttgctatctaagaagtatttagagtatttgagggcttattgttaacccctaaaaccaagcatgtcagcattgtggcctgatgtgggtaacaccctgaccctatgatcagatcgcgagcaacacaaggtgcaatgagtgggatggaagcttcagaagcacacttaagctgctggcatgcatggacagcagtggtgcataagcatgctagctcgacaacatgcaagacccgtgcacatgcacaaactaggtgcctttgtgtggcgcaacctatgggcacgatggcatggggtatgtgggaacttggttaggatgccttggccaaggggaccctgctgcagcacggacgagcatagcatcaacaacaaggccttgtgagatgcgtgagcccaaaacgcacacggatgatccatagatgcagcaacatcatgctaactcatgtgcatgcaagcatgagcagagatggtttaatggcatggcttgagcgagactgactcaaggcaagcacggtggacttgagttggatcatgtaagacacatcttggcattagggcaagcttaagcaagatgtgattctccttgggttggaaacacaatgggctaatgcatcagatttatataggcaagagtcctgatacacaagactcctagtcagattaggagactgagacctgatgcaggaggagagagactcctaacatgtgaaaactcctagtcgggatgggaagcagagtgttgatgcacgaggagacaaagtcctgtggcacgagaacttgagattgggtgggagtcaaagtcctactcagggaagcatctgttgagcttgagtcaaagtcggactaggactcaaacaccaattccctagtaggattggactgcttggtgcaacatgtataaatagagtgcttgtgtgccttaaaagatcaagtgaactactcgatgttcttgtgggagtccttgttagtgagttccttgtattctattgtctgatcaataatatataagttggggggagccttgtaacttgtgtgcaatctcatgggttggaaaaggttggtttagatagcatctaagtgttgcacatacgcaaaaatttggacccaaggtttgtgtgtgtgacacttaccatggagtttctagcacctctccatggagtctttatcacttgcttttgatccttctgatagcccattattacctcctactccactggaataggcatttgactgctactggtttgattttacagctttgggatttgcatcttttgtaaccaaggctgaaccatctgttgattgaggctccatcataacccctctttgtccttcttctccacgaattatggcaattatttcattgagtgaaggaacttcttcctttcctaacacttgcacttgaacaagattgaactcaatattcaatccagcaagaaagatgtaaatcttccatttttccataaaacatttaagaagggctgcatcatcgttgcacttcatctcaatacattgattatgatccaactcttgtcataagttttgtaaaatctgaacatattcaatgaccaaacgattaccttgtttggtagatgagatctttgtcataatttcatagatttgtacagcatcttggacattggaatgcccatacgattcccaaatttcctttgttgttgtaaaaaacatgcaagtattgccaagttttggcatcatcaaattccacaatcaggacattaccatggagtcttcttcatcccatgcaacaaactgtgaatcatttggtttcagtcccgtgctaagaagatgactcagtttgcccttccctttcacgaaggttcgaacaaactgagaccacttcaaaatttttttgccttttgagatgtaaacctggttggatattctgcagctctcttgctggagtgttgatgacatcatttgttgatgttggattagagactttcttattggtaaattctgaaaccttagactgggcagaagtggaagaaatcaaataaaagttaaggtaggattgcagcaatgcaggccagaacaagaaattagagcaaaagttttgccaaaaaactaaactaatccaagtttttgaaaaaaaaaaaaccagcaatgacggctggaaaatcagcgattaacgaaaaaattagaaaccctgaggagtttgatttggctttgatgccatgtagagaaaaattgtgtttcttttcatttcttgaaagcatacaaccaatgaaatatatatactctgatagaaaggaaagaaaaaggaagaaaagaaagaataaggaagaatccctacaaattagggattatatacataaatatacacctagctatatgtatatacaattgtacacacagctgtacaacttacccagctgtatatcttttacagctgcatattacagctctaataatattcaacagctgtaataatcttcaacacacattgtttcaaattgcttcctaaaagtggattcagatcatgcatatgataattgtttttgttcccccacgcaaagaattttagaacacaaaatggaaaggttgacaaatgaagaccaagtggttttgacttattaatgcacattatgcaaatttgaagtagggaattaggccattcttcaggtttatttattctcattcttcattgtgcttagttattggtcaaatatggcacaacctaggtcatatccacaacaatgaaaattttgtttgttcgttggtattcgctgaaaattgaatatttggtcttcaggtttctttttcttttttccaaaatgtttctatcaaactggaaatttgtttatataaaaatatatggtaacttgagatgctttctaatcatttattttcattcagggtaggctaccggtgg

SEQ ID NO: 10634 - DNA, 8338 bp, Vitis vinifera
  Intron number 2 from transcript GSVIVT01034269001 (locus G SVIVG01034269001) derived from phytozome v7.0 (chr-ID chr9 ; pos 13817154 to 13825491 reverse strand)
tttggctgatctattcacacaggtactgacttttgccaaaagggccggttcaaattcatatgtttatgtgttcttgtgttaatgattagataggtctttgttttgcaatttgtttgcggaagttttattatatatggatccctggaactccatcttttgtggttatttaattcctacttcctaccaaactgatgtgtgtgtccatctgacttttgtattatttgtcactgtcactacaaactgattgtcctgaaacacatagctaggagaatggaaggttatcgaaaaattaagatgtttggtaatcttgctaatggaaagaagactactagagagattagacgcaagtaagacagaggacatggagagtggggggaaagtgagacattcttaactcttgaaatcggcatgggagtcccattagcaatctgaaggtgagggcattaaagtcaagtatggaagaattactagtcatatgatcattgacctctgaattaataagccaagttttagaggcagcaaaaataaaggccaaaccagaattacattattgagaagataatcgagaaacctaagaagcaggtggagtggcattggtaagggtgacctaagttgatttcttgtttttcctttcaacttgcttaagcttgtaccactctagataactatgtttcttccaacaaacatctattatatgtttggtgctattgcaatgagggtggaagcaagaacaggagttggtaggagtaaaagatgttggttgtgtgctattcttatggacaaccattgtggaagccttagagtgatcttctgttcccatggtgacctacctctacacttcacaatgaactagtgaataagcttcctctagacttggtaaaggagaggtggccaaaacattactactaacttgatccaaactgtgataaagacttgtaagaaatatataaacctgatcctcaatagtgctgatgtaggacaaccttaggatggttggctactctcaaataggtgggctaggatttttatttttaaggtataagaagaggaacaaggaataaagtttatggtaaagaaaaataaaataaaaaaatagggagaaaggagatatgacgaagaaaagatggaaaccttagagtctcactaaggtttattaggagtttcacctagaagaaaatcaatggagtcccaccattgaggattgcaatacttgcaataaaaaaacataatattattaatattaaccaatccattactttgatttacatcgattagcctaatttataaacttctctaagaaatccaaagtttactaggattcttattatgtctctaatttttattataagatttaaagtttactaggattttaataacctattatgactcaaattctaagtatattataacggaactagctaatcttactttaatttcaacaaatactaatcctaatttaactccaattaatattaattttacttaaagtttatttatgtctttcatttcctcattgaatagactttaaaagacttttccccatcaattccctctggcttgaaagaactcagctccgactagttagatgcttgatacaattcatagagattggggttaagcttatgaaaatctattgttgtaatctatgtattttcaaagtgtggtttgccttgccatttcgccaaaaatttttggtatccaccttgtcgaattgacacaagttgatcgtcaagaacatactcaatctcaagatgtgggctaagattagatggtaattgaagatccaattcttcacttacctcgttttaatgaccatggtagacaaacaaatcttccacattaaatattaaactaaaatgcaattttaaaggaagctctaacaaatatacattctcaccttaccactttagcacccaaaacggacccattttcttagcttgaagtttttgatatgtgcctggatgattttagttgatcaaacaaccaccttgaattttcaatggagagtaagccacataaatctagaaaagtctgaagccaggatgaatggaacaaaattgctaaccgtggatccacatttttcacgtgcgtccccacttgatggcgagattcgttttttattatgaaaattaatttttgaaaaagttggagtcgctacttattttcgtgttttttttttttttaagggaaaacaaaataagtaataaaaaccataaaaagtgactctttatgaaagtaaaaacatgtctatgaaaatcgaatctaagtataggggttaggttacttattggaaaggtattgtagggtagcatccctctaagccttaaagaggtttctactaaacaatggagggaactaaagtaattgactaatagactaatggataccaaaagacaaaattacatatatacaacaaggcaatggtgatgcagagcaagagcatagtaagagaatacttagagcatgtgatgaaaattgaaaagctattatggctactatccaagtagactacaaccaagttattccaaacaccattggagtcgagatttcttaaggaaaaatctaggaaaaaccctttgcataagcttaaactagaaagttctggttaatcacttcttatattttttctagataattatcaaaagtccttataataagtaggtttttcccctaaattgtttgaaaggactctcacaagtacatgaatcagtttggttgtgtaaccacccttatactacgacatgacacttgtttgctagaattgtcaaggctggtaggcattggatccataatattatgtgttgttgtggggttgttatttaatgctctccaatcggcaacacttctaaacttattacttatcatatagtcttcttttagaaattagacaattatactaacaaataacttatggttgacctgattagaaaagtaataaccccttgttccttttggataatctacaaattaacatacttttgaccttaatctcaacttatctacatttggtttcaacacatgtgccgaactcctccatatgcaaacatggtgtaaattaggtttacaacttacccacatctctataggagtcaaatgtaccaatttaaatggaactaggttaagaaggtatcttgtaatttctaaggcatatcatcaaaaggatgtaaagagtgttaacaaactcattattgatctcactatgtctattagagtttgatttcttctttctgccactctagtttgctatagagttctaaggatgctcacctaagatataatcccatgctcctttagcaaagaatgaaactcacttgacatgtactgaccacctccataagatcgaagtaccttgaggtgtttacctaattatttttttgattccaacttaaattccttaaatttatccaagacattggattttctatgcattaggtaaacatagccatacctagagtaaccatcagtaaagatgatgaaacactcatatcctcaacattttttttttgataggaaacgacaaaggaatatattaaaagaaaaaagaagtacaagagaaggatgagaaatccttccaccaaagaaaactaaacaacaagaatacgaaaacaagaaaatacaaagtaaaaacgaacaaactctctagactagacagactcgtatcctcaacattcatagacattaaaagacccacacacatcaatatgcaataactctaaatattctttgactttaattcctttaactataaagggcttcttggtcattttaccttatatacaagatttgcagattggaagatcctttggaattaaaaagtccaatgttttagacttaattagtctttggatcttgtttaaattaatatgacctaggcgaagatatcattagaaggtttgattactgttcggtatttttttgtttaatttcgattattctcaacacatggtaagataggagtgatacgatacagaccatcaacaaatgggtttaagcaaataaatgaactaatctttctaataaaaacctcttttctctttgataaaaaaaaaaaaaaaagctctctgagaatgtaaaattcgcataaaaagaaagatcttatttaagtgaaatcaccgatgaaactaacccctgggagactgtaggaaaggacttgactgaattgcttgcattggtagacatctcgagggcaagatccttccatggccaaagagagagacagacattcctactatctaagaagtgtgctatcaagcattcctactttcacttgagcagcagctatgagaccaataagagcggattcaagaccttagtggcctttggttcgcactcacactcgaactcgcactgaccgatagtatgaataagaaagtacctcttaactagccatagactatcctaagatagatctctataataagaaagtatctctttattgaaataaattaaataattgcttttatttaaactagaaactgaaatgaggttctgtccagacttaagtacataaagacaatcctggagttgtagatgacatttattatctaatactagggtaacatttcccatgacttgcacaaatatcctcatgttagaagctagagttaggtacatatccctctcattcaaccttcttcttaattaaaatccctgtaaagaattacagatatgaccaatgatcctgaaatctatccaccatataaagcaatattcaactaaaagtgaatgaaacataccttcctttttctttaagtagtcaggacattcctttttctagtgacccttcttgccacaaaggaaacacttgctctttctttttctcttttctttcccagctttggactttccctattcagtatttctatttttgtggttgttcttcttgttggaagaccttaaagacctcttgattgccatatgaacacccctttgatctttgagaatcaccccaaccatatggatttccctcttaactcgggcaagttcattaacatcttattcatataatagttgagattgaattgcctgaaggaattcaacaagatctctaaaatcatattgaccttggtctcaccagtgatttcaacttcatggattttcatctcattaaaaagttcaatcatatgaatcagatgctttctaatgggagttccttctattatctttgtgttcataatagttttaataacaacttgtctagttgacttgcccttgtgaccaaacatctcttatagactaaagagaatctcataagtagtggcaatagacataaaaggaaagtggattctcttagacttttaaatattttatttggtaatatgctctcatgaaaatttactttccatgagaaaataaaaaattatccttttaaaatattttaaccatgttataaatttccaaactatacatacatgcataaataaggaaataatataagatatggaaaaataactttcccatagatctgttgcgagggattccaaaaattcttagggatctgttgcaaatttggtaagcccaatttctggaattccaaaaattccaaatttaccaaaaggaccttgcaacacaaaatatggttagtaaaagggaaaaccttaaaatatctttaaaactaccaaatctgatcctttaccgcttacaatgttggaaggggcacttgaacactcttagactgcttgagcactcaatgatgatgcttgaaccctcaatgctgcttcatcctctgcaccgagaagcctttttctcctttttccagctactttgccattgcaaaacttacctttatggttgactttctccaccatcgatgtccctagatgctttgattgctttcttgcttctcttggtttacaaagatggattaagaataaaaaaaatttcaaaatcattggtctggtcctagatgtagcttttcccccgggcaagatgcctaatatttacaatgcgctggtagttaagggtcgagatattgtcggtcaacttgaatttttattttattactaatcagttgtattgtagacattccctcatttccaccctagaacattttttgtttcccatttatcgaaaaaatcccaagaaatttaaataatcacatccagacatatcatattaacatccatgcaaacattcattcatccctaagaccatgggatgaaaaggaaaaactgttccaaacaagtgagcacactctagaatggttataacatgcttaatcctaacagagggctttgataccagttattgggaaaactcgaatatctctatctattcgcatccttggacttgttagagtgcatgcaaaatgtcataggggctttagatctaacaagcggaaaaataacatcaagactttaaatctagagaatgagtgctttacctgtgatctaaatgttctcggattaaatcctactgatgaagaatcgatgtgattctagcacacaaggaggtggaatttttctttagagtagtggaggctatggctcctctctctggatgcctaaatgataagagtgttgaagccctaaccccaaaggttacataggtttccttgtgggattaagtgactaagcctaaataaagcgcgggtcacctaatctagcccccctgggtcttaattaattaattagagctattgggttttgattaattaattagcccaatttagaaaaactattcataagtttttgtgcaatcttgagtatttgccaaagtgcctttatgcatatatataaatatagaaccaaaaaatccataaaaaaattttgccaccatggaatttgagtttgagcagggaccattaggaccgatagtaaaatactggctctcttagaatcaaattctgaagttgactcaatatcccaccatagacactcaattgcgctttagtatcatataatattataataagatactaacctcaagttcgtgctacaagaggttgccatgaaaggagaaattatcactccatatgggagcaataagctttggttgctagcttgtgtaactactgttacaggtactgctttttattcagcaaggcaagaaagatatacagggactaaagggaatgccactactggtagggccacgaaaacttcaagtagtactattggcaaggcacatcaatatgctttacacattggattctttcaaaagattcttgtttgagtgtccttcatcgtccttagagcggaaggtcaagctgcaacctattactttttctcaatccaagacaaagataaatagaagcccttctctgctcttgtagatgctgcaagagcgatgacacatacgggtcacagagtagagatccactgattctcctcttctaagaggaagaaaagggctacgactcaaaacaggctttgtttccattaaaaaagataaaaggaattcaactttgctttgttaattgaggcatgactcacaccaaaagactttaaagggagtgcttgattcttaggacaaccctagctcaaaacagaggggcttgactactcacaatgggcccttcctaaagaggttgaagagggcaccaaatctaaagcaaatgaactaggatgggcctggtctctagaagaacccgaggagctcagtcacctttctttgtgttttcacctaaaatacctttcaagttacaagacatgtgatcattgctgtttccgttataaatctttaaagcttatatttgttttagtgacaattaatgtactgtgacaaccatgctataattgacattgctaatactcttgtgtatcatgagagaatgaagctcatcgaggttaatcatccttttatcatagaggttgtcatgaaaggagaaattatcactccatatatcaagtcaaaagattagatgtagacctcttcaccaaaaccggtccaaggcgtttttagtatgtctttgctccaaactgagcattgaaaatatgtaaaagctctagctttaaaattagaaagtattttcttcctattttatctctatcatttatggtacaaaggcatttttattttgttttgtgattctgccttttgctttaagctttctgatttaatttatctttttgtgttaggagaatattttattttcctttctattgagagaatgtcctatttttcttattctgaattaggagaacaagtctctatattcagcagccaagtgcacaattttgtatgatgcatgaaaatcattacttttttcaacataaaacaatatactactatgttttctggttaacctttgttgtaatttgactttctaattggcaccaacctctggatcctactttgtgcagataagctctcagaaaaagaaaacaggggtaattgc

SEQ ID NO: 10635 - DNA, 5350 bp, Vitis vinifera
  Intron number 11 from transcript GSVIVT01014637001 (locus GSVIVG01014637001) derived from phytozome v7.0 (chr-ID chr 19; pos 8059931 to 8065280 reverse strand)
aaaactgaatctgcacttaattcccattacttatcgtcctttgcctgttgaataagactagaaaaaagaaggtataaatggaggcttattttgtatggtttgatgctagttatctgaaatgcaatgtccatgtaagctagaactacttatttgctgatcgtgagcttgtaaatgttgtttgatgtagacgtataaaatatgaagatgaaatatttattttagtattttcctttggagattctaccccaaagttctgatacgtgttttccaactcagaagaacactctttgagacattgaaattgttcgaacccatttgataaatcgccatccttgtgtgttcaagcttcattcttacttttctttttagtgaatcaactctttatcatgggggcatccctgatatgaatccagtgaaagttaatcacactacagtttgacatccattatactctgattccatggaccttgaaggataatgtatatgatattccacattaaattgggaaaaaattcttaatgctatatatgtaatgagctccctttaactatgtaattgtattttaaagttataagggcctataggcctaaagctgacaatgtatgatctcaatatgagtctttgtcccgtcaaggatcatcaagtatgtcatgtttgaatggtggggtgatcatgaaatccaagattggattgggaaaaaaaacaaaattatttctaatactatataggttgtgagctcctcttaattatataagcatgttttaaagtagtgaaggtccaaaacctagagatctcatcttcttccactattttgtcatcatttatatatataaaaaaatgagaataagcaaggggggaaagaaaaagaatgtagaaaaaaacccaaccatagaaaataaagaaacttacgtaaagaaaacattaagaaaactatttggaatgctaaatggagaagaagacattattacaaatctagaggaaggcatcgattagctttattggggaattagctacctattacatgtggcgtaatccaagcacaagatgtgcaagaccacattgggaaccaccattttggaaaagggaattgtcactgcaataatcactctctctcatcatcatggctacctagatttttttttttggggttacccctgacctatgacttattttgcacattgccccctcaaattcgaaatcgaataatgtatcatttattctttataattacatgtaatgtgcatttttttaaagacgactttagttttttggacggaaatgcacatgttgttcgtgtgactaagggtaaaaatgtatttttcctaaaaatccccaatttgcagtctccctctcaaatccccaaattgtagcccatttctttcccaccctgttcttccttccttccttcgaaaccctaaactacgaatcctagaaagctgctattgaaaccttagataatttctccttgttcgtgaggtggaaaatttcaaaatccccaatctacagtcttcttctcaaatccccaaattgcaacccgcttcttcccgacctcgctatcatgccccaaaacccactccaagagcatgacggtcatttcacacctcaagcccaaagactcaaagtggaaatgacacaaacattcgtattgtaatcaaaactttactaattaccaaattcctgtttagagtaataggataaaattctaaaatctccaactatcaactttttttaaaaaaatttaatacatcaaccaaagtgttattgttcaaagaactccaactcaaaataattcaaacgagaattaagtttaacatctaaacaatgtccaaaataaagagagtttaaacaaatgtcctaataaagtcaaattttcctcctaatggtcactccttgtccgaactaaggttatttgaaaaattatcaacaaagggggatgagctcaaagcttaataaggaacattaatacagtttcatggatcaaacattttcaatcatgcttgcaaataggaggtataacatatatttattttcataaaaacttttgagttcaaaatactaatacattcaaactttttgacaaaactttctcatatccatttcaaaacaatttgtcatcaaaaccaaatcgaatacattcaaaatatctttactctagttatcaaataacaaatactgcccaattaagtgggacttcacaaatgagtggctaatttcaaatttgttctaattaacgtgaacaaaaccaaatgtcaacaattataaccagttgaatagaaccataaggtcaactattataactcattgactagggtcatagaaaccagagtcaaacacttcatttcattaattcaaacttacaaaacaaaatatcatatctcctcaattttcatttttcataaacaaagaaaatgctcaaacatattttcatacaaaacatatatttgatccatgcataggaataaaaatgatctttttacacatttcatcatatcatataaaaataaaactatttcaatttacaaaatctgcattaatttcccttaccttgaagaagtgctcaaaaacttgaactatttaacttgatgaatttacttatcacctaacataatatcatgcacaattatctaaaggtaaaaatttgacaatcctaaaaaaattttatttagtattagggatcctaattaatttctcatgctaatattattactacctaatattattttcaacttcttaaataataataatataatttaatgaatttccaaattttttgtaaactcatatttcttccaaatcttattctaaccatttatttttatttcttttgtatacttaaattaaattaaaacttttattaaaaataattactattattattactatatttttcaatacctggcaacatccaaacaaccctcctatacgttacttacaagcatccaaatcacaccattcttattattattaataaattattattatcattatgattatcattagcattattattattattattattattattattattattattattattattattatcatcattattaacaactccaacaaccccatcaactctactcattattattattttaatttattcaactaccacccttttgactctcacggttacatattagttttttttttttttttgtcaccccaacacggtgcctcaaatccaaaatccagaaacatgcaattcttcttcttattattttccaatccctcaagccacatataatcatatatttatttgctcctttaatttttaaaatttcattgtttagatctattcatctaaaatttttttgaattttcctattttcatcaatgaaacaacctatattcataatttcaattttttgatcttaaaataaattaagtaacctaaccctaatctaaattaaaattttctaaagaatatctaatgtgttcaaaactaactaaaaaatataatatattaatctagggttagaatcttacttgaaaaaatatgaacttcaaattctagaccttcaaacctttagcggtatgttattcaattctttgatttttggttaatagagttttctgaataaagaaaataggaggaaaatctaatttataccaagtattattaattgtaaaaggattcttttacctttaatgagtttaattaattaatttataatttactattttacccctaaagtttattttggggtgttacacaactcttccttccttctttcgaagccctagactacgaatcccacaacgttgttgctaaaaccctagataatttctccttgttcgtggaggtggaaaattttaaaatccccaaataatttctctagccttataatcccacatagctcatcaaagcactcattgaaggttgaagttgaagatttgtcctagatatgtatattttttttctcccattttttgaaggttttttttttttagaaaaaagaaaccccattttcttgaatatggttttagtttatgtatataaatttctagaattcgtgaagggaatccaaaattttagagatttttttttaattattatgatattttaaagcatatataaattttttatgttggtgaggggatgtggtggaatgtgagtgtatgcaaccaattttctttttgtttttatttgatttggctttttgtgtgtagatttggagattcaacttctacaaggggtagattcgtctagaaatggacgattttatgttgaaagaagaaagaaaaggattggtgtctttcttgtgaagattttgagctgaaattggattgttgttggcctcttttgaatgcctcaacttgtttgtgtctacccattttccctcaaaatctaatgggctatcagggcattttatgggaaattaaatttttggagagttaaggtgggttttgggtcgtttggtctatagcttgaagctcttcgaaaaatcctcaatacaagtacattgggtttgtttgattctcaagaatttggttttggggtttgtttattccatggagaagatgagtagagaagccttttccctacttttcccgatcaactgcatctccactgattcttctccatccttttgccctcacttgaaaaagacatttttgccctcaatcatgctgagagcatgtgtctttctgtccaataaaataatgtcatctttaaaaaaattgcacattgcatgcaattataaatgatgagggctatatcacttgattttgaactcgatgggacaatgtgcaaaacacactataggttggggggtaaagtgtaatttttttttttaaaaaaaaaaaaaaaaggagagagaagaaaagaaaagtgggaaaaagccctccatcatttgttagaaggagacttcaccaaagagttggggtggggggtggcgcggtgctgggggcggtggtgttgtcgcagacttgggtaggaagaatagaacgcacctgacaaaagctaaatgtcgcagacttggaacaggagaaagtttgcgaaaagccaaaaccaccatgctaagcaacaagtaaaaatcaactataaaaagggaaagctaccaccattgtaacccaaggagaaattcttgtttctaatacaagttttttttgcatcttcacgttttaattttgggtcctattattcttgctaaattagagtccttcccattacatatttgttcagttgtttgtttaaaccaaaaaatcaacatttcctttatgagagaaaaaaaaaaaagacagagatttggcattctgtcggttttctttctcttctgaaaaaatcaaggaaaacagagaagatcatcattcagtgcgtcctgttgctgtactg

SEQ ID NO: 10636 - DNA, 4062 bp, Vitis vinifera
  Intron number 4 from transcript GSVIVT01010524001 (locus G SVIVG01010524001) derived from phytozome v7.0 (chr-ID chr1 ; pos 21442763 to 21446824 reverse strand)
tagatcaattacaattgtaactgcaagtggaacaggttcagttttaacacattttatatatgaaatctgattctacgcaggcatatccactatatattgtgttttaagcgtggtattgagtcttataccttgaggctcacttctgcctcaaggcaacaccatgtaacttagccttgaggttgtaacctcaacattgtgtaatcaaggcttaaccctcaccttattgaggtgatattgaggattaattctcaaatatttaaaggatttaattggtttaggacctttatgagatttttctatgtattttatgagaggtttaagcctcaatattcaatggttttaatgagttgtgcttttttgaggttttgttatggatttgtgagttttgtctgaggtccaagattaggattaagccttttacaaagtaaaggcatagttagctaccaatttaccctttaaaaggagagggaaaagataatgaaaagaaaaagtaaagaagtaattggccattgtagtagttagctcatatataatcatgatcttattattgatagttaaaggaaaaaaacccattgcaattgatggatggaaaagaagaataggtgaatattaacactgattagggtataaaagagcaattggatattattctgactccttaaggatcctactagggatacttacagtagtgctgaagattatttgatgaaatcatgagggagagttggatttagaagagataaaaggaattaaattagaaattattaacaatgacaaataattaattttgttattattaataatatgattttttattattattattcaaatttcatgtggttttatttgtatttgttcaatgattaagattttttcctatttattttttaagttgaggcttatcccttgttttgccttgagacttattttttgcatcataggaaaaatgccttagcactacctttaaccttttaaaagatatatctgtatatatatgtgtgtgtgtgtgtgattagcaaaatgcgcgcaatgataaacacaaatgaaaactgaaggttactcaaaacactaacattttgctattggtatgcttgagtttacatatttctacattgtgatactctttgatttattctttaaaatttaggcaaaatatattgttgaactttacaacacctgacattagccataaacatggcttcttttattttgtttatttattttaaaccaacacctgacattagccacggatgtgaacctgagttctcatgtttttgtgttggacaaccattcactatattaaaagactggactgacgaagagtgcatctaggttggaatccccttttactgaagaagagatttctaaagccatttttaagatggatagggataaagcaccgaggcctgatgactttaccattgcagtgtttcaagattgttgggatgtgattaaggagaatttagtgagagtgttcgatgagtttcacaagagtgggattattaatcaaagcactaatgcgtcctgcatagttctgttacccaaaaaaagcatggcaaagaagatatcagactatagacccattagcttgatcactagtctttacaagattatagccaaagtgttagcagggcgtctaagagggatacttcatgaaactatccattccacttaaggagcttttgttcaagggagacaaattttggacgcagttctcatagccaatgagatagtggatgagaaaaaacgatcagaggaggaaggagttgtcttcaaaattgactttgaaaaggcttatgaccatgtgagttgggattttttggatcatgtgatggagaagaaggggttcaatcctagatggaggaaatggatgagaggctgtttgttctcgatgtcttttgtagtcctagtgaatggaaacgctaaagggtgggttaaggcatttagaggtttaagacaaggagaccctttatccccttttttgttcaccatagtagcagatgtattgagcaagatgttattgagagcagaggaaagaaatgccttagagggtttcagggtgggtaggaacagaacaagggtgtcccatttacaatttgcagatgacaccattttcttctctagtactcgagaagaagacttgctaactctcgaagagtgttttgctagtgtttgggcatatttctggactgaaggttaaccttgacaaaagtaatatttatggcattaaccttggtcagaatcatcttcataggttggcggagttgcttgattgcaaggcttctgggtggcccatactctacctgggtcttcttctgggtgggaaccccaagtctggtggtttctgggatcctgtgattgagaggatctcgagcagattagatgggtggcaaaagacgtatttatcttttggaagtaggataactctcattcaatcttgtctcactcatatgccttgttacttcctttctttgtttaagattcccgcctctgtggtagcaagaattgagaggttgcaaagagattttttatggtctggggttggggaaggcaaaagagatcatatagttagctgggatgtagtgtgtaatccgaagatgaaagggagattgggtttcagaaggatttcctcgtggaattccgctctcttagggaaatggttgtggaggtatcttagggagggttcaacgctgtggcatcaggtcattttaagcatttatggatcacactctaatggttgggatgccaatactgttgttagatggtcacatcgttgtccttggaaggctattgtacaagtctgccaagatttttccaagtttacttggttcatggtaggaaatggggaaagaattcggttctgggaagacttgtggtggggggatcaacctctgggggtccgttatccaagactacttagagtagtcacggataaaaacattcctattttttcaattcttggatccactcgccctttctcttggaactttaacttccgccgtaaccttttcgattccgagatagaagatttagaaagtctcatgcggtctcttgatcgtctacatttatcaccttcggttccagatatgagatcttggtctttatctccttcataacttttcagagtcaaatctttctttcttgccttatcccaattttctggtttgccttcagttttccctaccaagttagtctggaattctcaaattcttttcaaaatcaagtcctttgtatggttagtggctcacaagaaggtaaatactaacgacatgctacagttgagaagactctacaaagcacttagtcccgacatttgcatgatgtgcatgaagcatggagaaacagtagatcatctttttcttcattgctctttgacgatggggttgtggcacaaattatttcagttaacaaagacagattgggtccctcctaggagcatctttgacatgttatttaccaattttaatggttttggattttctaagagagggattgttttatggcaagctacgtgtatcactttaatatgggtggtgtggcgggaaagaaatgcaaggatttttgaggataaagtaaggaatttagaaaacctttgggacatgattcatttccttgcttctctttgggctttttgttctaaggtttttaaggggattccccttaatgtgatacatcttgattggttagcggtgtgtaactccaatgggttggcctaacctagagcagttgtttgtttctactttgtattttctcgcatttgtttccttgtagttttgtttttctttggtgggaggattcctcatccttctcttatacttcctttttatcaatatattcctttgtcgtttcctataaaaaaaaaaaaggctggactgacatgtttttctcaaggcatcaagggacaccctcttgtgcaggattgtttgtattttcattttttctgacagtcacagctcctacctattcatttatttcattagttcttgtagcaccttgtattataccatactagctcttgaatgttttttaacttatttttatgatgtgcaggtaaaagcaaat

SEQ ID NO: 10637 - DNA, 3776 bp, Vitis vinifera
  Intron number 4 from transcript GSVIVT01021522001 (locus G SVIVG01021522001) derived from phytozome v7.0 (chr-ID chr1 0; pos 6567371 to 6571146)
atccagcgtacgatcttgctgttttgaaggtatatttttagttctttattaattttaaggcaagttctgttaggtacttcaggatataagaagtacattgcaaacctcttttttttttttttttccttcttcagttgtttaaatacattgttaacttgtaaattggaaatcctcgcataagcctttctaagagctgcattatatatgttctaagaaggctaggaaatgcagcaacatggaacagtgaagtagagaaatcatgcggaacaatgctttagtaagattcatatatgctattccaccctctccaatttggagaacaaaacttaacaaataaaaacagagaaaagtatttagaaaaaacaaatcaccttcaatacaacactattaagtacaggtaaacaacatttaagggaaaaaaatgagggcactatttagaaaaacttaaagtactttaagggggtgtttggcacgtcagaatagggaatggaaataatattttgtttcctttcctatttcttaatggaatggaatgaatttgatgattccatttctaacatttggatgaacttaggaatgcaagattggaatgattatttgtttccattcaaatatttgataataataagaatggaaatgaaaaagaaataaatttataataatatccttacatataatttaaaatattttttaatttttacttttatttaaaaaaaaaaaaaaatttgagaggttttttgttattaaataataagactaaaaaatatatatatactcaataaataaaaaattaaccataaaaaatcgtataaccctaatgcacaaatattcaattattatttttattaaaaatttgaataatttgtcatgcttaagtagttataaaattatatttttttaaaaaaaattatttattataatatttaaattttcaaagctagcaaatatttttcctattttcaaaagaggaaataaaagaattcaaatttattattaaaaaaccaaaagttttgtttttgtttgtttttttctttttatatttttcctaaccattaaaaattttcaatattgtaaacacgtgaaatcgaaaaatctttttccaaccatttcaatttttctctccagtttccattaatacaagataaagaaacatcaaagattccaaacataaattaataaaaaaaaaattaatcgatttatagagaagaagaaacacatataaagaagtagaagaaaaaagagaaaataaggtaaacctgatcgaagatgtagaagggagttttcagaacctagttgcagcaaacaataacgaatcttagatccaacaatcaaaatgaacatccaaaaccctataaattagaaattgattttttttttttaaatatcgtggaagatttaattgattcaatttggaagaatcacttgttgtagagaattggatgatgagtgggtctctagctttgcaaagaagataagaagtggatgatgaatggatttctacctttacaaagaagataaacatcgggtttgaagaacaagataagagggtaaaatagtaatttaggttattttatattatcaaataggtttaatgaatcagaataccacctacttttaatgaatgcaaatccgactcataagttagatttgatttctgccggaataattttttatttcatttccgccttcttaacatttatccaaacataggaataagggagaaaaggaatgagatgtctattcccactccctattcccgtgtaccaaacaccccctaaatttaattgaatgggaatttgtaaaatttaagataaccttaagttaaattatgcttaagatgttgagttaaaacttattacctaattcttaccttaagtattaagattgtttgctaaaaccaacttaaattttttctaaactatcagattgacatatttaccctcattgatatttagtaatgagattatgagagagaaataaagggagaatgagacatgggttattaaggcaaaggatgtttaggatttataaaatttgattgactactttaaatcatttttaactttaatttgtaatattaaattattttattaaacatacttaatgttcttagtaacataaattaagtcataagtaatattaagtcattaagttgattaacgaaacacactctaaatccaaacaaattttttaaggagcaagcttattttggctgtattatgcttctttctttttatcaattaggccatccaattttgtcaggtgtatcattgatatgaagtttcaaacagctgtaaagccacgaaaaattatttaaccatcaaaaattcgttgtggttatatttgtatggcatgtgaagtggatatttgtaacagaaggcaagttttaagatgtgaagtgaatgtcttatcagaacctcacatcttgaggtgttcagagcctcacatcttgaggtacagttttttctgttcaattaaacctcaaggctgtgcattctatgtgatttccatgagttgttccttgagatgtggcttgaggacaaagccacaaagccttttagaatgtggttatacacagtaaacaagggaccaattccatttaatgcctgaggtccaaggcgctagttataggaaaaatcaaggtatggaaagtcctccacttttcttctgtgtttctctcatgttgaggtgtaggcatcaaggaggctagaagcaagaatgagggtgggggtatggagtgaaggagagttgcttataacccatccatggtcaagagaaatgtgaatcaaagggaatggactcttttctaaaatatctgctcttgcaattatgttgttgctattgcaggtggatgcctacccagatggtgaggaaaaaagggtcttagcataagtcgataccacacaattcaggggcaaacaaaagtgagctagcatcctttttaaattggtctttttatacttactcttctggcaaaaaattaacttaaagaacgtaatgggaaacattcttgggttctattaagtggtctttcacacatttatgatatctaatatagcttacttttagcaactagaggtttgatagagcttgcacctattgattgtaaggacaaataaatggaatcctgttcaagccaatgatgttgaagtgaaaagcgaatttgcctattggactcaaaaggttttttagtactattactagtggtattttcaagcacccatcttatcactcttaatacatgtgcttcaacatgagttgacatcataccacaaagggggaattcggaaataattcttgttggaaaaagaaaaggaactcaatgcaagaggactcgcctaatagtgccagtgtgatggggaaaagaaataaataagaatatcaacagcaaaggaaaatagacatgtggtaagaatatttcgctcttttaatcaaaacgaaatattaattaaaatcccactagtactattctaatgaacttttgtttatcctcctcttcatttgtaggttgagttttactacctctctctctctctctctctctctctatatatatatatatatatatatatatcaaaatctcaggttgcttttctaataccctatttatattcttacaatggtacaatttagtatatgaatatggagcacctactaaaacgagttgcatgtgtatatgtatcttgcattaagtcccatgtgtcatgctacttttgcaatagtatgtggttgaagacacttaaccaactgttttgttcaggttgatattgaaggaa

SEQ ID NO: 10638 - DNA, 2991 bp, Vitis vinifera
  Intron number 1 from transcript GSVIVT01034200001 (locus G SVIVG01034200001) derived from phytozome v7.0 (chr-ID chr8 ; pos 14481801 to 14484791)
tggctgtagtttagtggtaagaattccacgttgtggccgtggagacctgggctcgaatcccagcagccacagttttcaaattcttttgatttttactagttctaatacaacgaaactatctatatacgttaaataatttacctgtactcactttccatgtcctcatacaaaacttcttgtgcttcttagcggatttctcaaagccttgtcaaagttacataataaaatttccgaactttgtctagtcgaaagttactctaaaaaaagttttttaaagttttaaagtttgataatcaaactttttaaaaataactatgctttcttaaggtttttaaaactccaccatcttttaaataaaatatttatatttataaaacctattttagaattatagagagtttcttaattataaaatatttataaaaaaaaataccaatttagagataaacacgattttaaaacttactaaaaaatattttaaaaattattttttagaattaaacacaaatctaggggtaaacataattttaaaacttacaatttgttgaattaaaaatatagtaaaaatcaaattatgaaatatataaaatattttatttctaattttttgtattattaatattttttgaatccgaatttgatgaaatctaaaattattttaagataaaataagacataagaaagtaagttgcatttaattagtaaaaaattaacaaaattatcaactagataaaatataccaataaataatattataataccatttttaaaaattctaatttttaaaattaagagagaaaacattaaacattaatgtttattttttaattaaatgagaccattcttctcaaattttgattttttaaaaataagaaggcgagaatgttaaacattgatctttaattttgaatagataagaaaaaggattttgaatgctacttagtttataatattttttggtgatttgatttttttaattctcatttttattttgcattaatgaaatattatgatcacatttattattaaattttgttttttaaagataagaagagtattataaatgcattcaatatgacaccggatgaccaacatcttcttcgtccgatgactaaccaggtggacggatgagggaacgactttatagtttgggacccacaataatgatattttgttcgacgagattatgtttcaacttcttggctaaaatccttatcatgccccataacatagattgatgatttcttcacgtaattaggtttgtcctttgatgtaacaaaatcgatccaaagccaacaccattgttagcacctcagctacatgttccatggatgcaacaaaacaaaggactcgtattcatattctaatttgttaaatggagcgggatctttgtgcttcaatgcgtgaagtataaattaaatgtaaatagaaggaattaaatttttattcagtattacacttatttttcaacaaaacgacgtcgttatactgaaaatttgccaacatatgtacgctcactgggaaggtccagattattctaggaaagcgattcttgacgtccccagtagttacgagtccgtcctccgtttggcggctgagaaaacaagcccgaggaaggtacgagaatttccgttatttgtattatattattgttggattggctcaagtagaaaaaaaaaaaaaaaaaaaaaaaaaacaaaaagcccttagctaaataatctcactaggtactgttaggtttttgttttcttgatttctgtctttttcttctctctgccaaaaaatggagcactaaactcaatttatgcgaattttttttcttgtaaattttcttgttctggagtagtagctcattggcgcttcactggtttgagaataactgcaggttttggtgaggttcgaaatggcaacggaacctaaggcagcggctgagaatgtgaaaattgacctactcgaagatgatgatgagtttgaaatcaatgaaggtgtgcaacacatttattcaatttcagttttgatttgcgaaattgcgatttatgattgattcacggttaattttttaataccttattaatctttatcatgtttggttagttgaatatagtataaaatatgataaaaaaaaattatatatataacatgtttgattgatggtgaaataagataagttattttatcacttattttatttaattatatgttcaactaaatataaaatatgataagtggtgagatatattatatcatccataattttttattttttattttatcatatagaatttataagatataagatatgaatatctcatgtatttattttaattttttatatatttatatttcaaaatattttttttataaattaaatttatgattaaaaaaaaaattaaaaaattatatttataaaatcactaccaaactcactcttaatatttaaaaaaaagaataacaaattaatatattttttaatttcctaaagtatcagaatttatcataataatataaatttttataccgattaaatgtataatttgtagaaatttggtaattgaataataattataattttaattgtgaaaaaaacattagaaatttctaagttaatacttgtttttaaaaaaaatctttaatttagaaaaaaaaaaaaaaatcttaactttttattttttaaaattattttaaatcgtgattctcacggataaataagacgaatgtgaagtttatactttatgatcgttagaaccgacaattggtattttattttggttttgttggtgccaatatgttgaataatggcattatagtaattctagtaaaatcaaggtctaattactaagtcccgattgatttctgacgttttggttttccgggttccgagtagaataaagcccaaattcctctagggtgggtgagagtgagagagaagatatcgtgattgttcaccgggttgaagcaccgaattgaataatctactgcgcagcactgtaa

SEQ ID NO: 10639 - DNA, 5679 bp, Vitis vinifera
  Intron number 1 from transcript GSVIVT01014516001 (locus G SVIVG01014516001) derived from phytozome v7.0 (chr-ID chr1 9; pos 4716045 to 4721723 reverse strand)
accaaccaaaattgtcttattctattaagtcaacagtaaatcagctctttatagatggtgagataatcattggagcaggtggcaactttaaactggggtttttcagcccagataattcgatccacaaattcagactttagggatatgatacaggaaagtgtctatggagactggtataattcccactccgccaatttataggaattcaaaggaactctttccattcccgggtgttgctaatagcataatccattctgcagagtccaaatgctcagattttttaatttaaaaatcttgtcataaaatttgaaataatagtgaacttcccatggcagagttttgattgtccatgcaacacacttaacaatggaatggcgttcgatttagtgggtttcctctattaacaccaaacccagtttatacatatgcttcctttttttttcctttttcttttgaagaaatggagatgtatctacttatgagcttgttaatagctcagttatcatgaagcctttcaaaatgtgagtgtatggaaggactactccactggatcatcagataagcgacaggttgtaaagtgatctggtatgaaactcccggacaggcaggattcctggtttaatcaaagtatgaacatccaaaaatgaaggctaagcctacagtgaatgaaccattttttaccattggcatgtttagattcataaaattagttctcaaaataagtgaccatgttatgccagagatttgatcatccagaaatgtctgcctctacctttcaatattctctagatttaatcatattagcttttgacaccatgtttttatgttttgttagatataaagagccttagggataaatgcatgcaccctacatgatttgggtccaggaatagagcaatctaggtttcccaacaatcatcattcccgttaaacttagaatgatttcccaagttgttggggttgaaagtgatatggtgtaatgccttagagtcagtcaaccaatggtaaggatttgacctaatttgagtggtataatttgcttatggtgctttaggtgaataccctcaaatttggtagtagtgtttggcattgtggccaggtttgtcacaattgacacaccatattagattgaggcttggagtggttctgattacagctttgatgtccatgctcacaatcagaagttgggttcatggtgcctttagattgatacctttattgtatgatcccttggattagagattggtgggctcccttgatctttgagagtaattggtagtgaaaggtgagtcttttgagagagcttctttttctttaagggacctttcatgttcaatcaatgcatcatgaagctcttcaaaggtcatgagaacttacaatttcaaactatagtgcaaacatctttggactccttcctaagaccatgaagaacatgaagtaacatcatcatcattaatatgaacattgacaagagccaatccatccattgtgcactatatacatgtactcagtaatggttttgtctcctttatttgcataggtaagcttgtccttaagatccatgattcggactttagactgattggcatacaaggttgctaacttggtccatgcttgattagatattatggctacagagatgagggatataatggcatcggaaagtggtgcaaagattgccaatggatatggaaacattctctcaagatactccaaataatggtagccagtgggcatcttttgggctaattagtcagtccaaaagtcttcctagcacatcatgacaagtcatgaaagctactcttcagtattccttgtatgcatttttattttcaatcctaccagtggctgtgagttgtaactaacctatcctgtaaactttggtaaggaaagagggttgctacaacattcattttgttcttggtcttttttacttcaactagtaattcttttaggttatgtttggttcttgaaaaatttaagaaaaaatgtgagaaaaagaaaatagggagaaaaaatgtcaagaaaaaagagtgaaggaaaaataaaaaataaaaaatcaaagtcaataaattatttttatatgctttttcaaactcattttacttactttcctccattatataaagattaaataattttaagatgcatgaatttctaactaatttaaattaattttgattttctttcatattttccacaatgaaaccaaacatgagaaaaccatttccctccacagtttttttttttttttcttttcttcatactttccatgaacaaaacatagctctaaagaaaaggtgaaattggtcatatattgttgtaatctaggatattagattcaaagggataaactaatacctagtccattttaagaggtatagaaaaatcaaatttggaggcaggagaagatgatgaccattggataatgagtccaacgatggatgttactgataggcacatatgtggaggtaatgttcttctctaagtcaaacaaatcaaacccaatgccaattcttaggagggaaaggaaaatataaggagacttggaaaacacctaaaatatgttattggtccttacttcaacttgtaatgcttctaattaaagaagagataagattggccatactaagtagtataaactaatcccttgtccattttcaaaggtatggaaaattaaatttggatgtggatgcgatgttaattcatatattcaactcaagggaccacaccatagaatacaaataaaaaaaaatggaatgaatagatttcccaagttatggttgaccaatggaaagttacattgactttgatgtatgaagaaatgtgtgacaaatcttacagggggaagaaaaatataaggagacatgaaaaacacctaaaatctcaggcattccttatctaggaacaactatgaatgctcttagaactgttgtatttgtcttctcctatgtattctccctcataagaatctctattgcagtagacaccataactgtaaatcaacacattagagacggtgagaccatcacttcagcaggtgggacctttgaattgggtttcttcagtccaggtaattccaagaatcgatacttggggatatggtacaagaaagtggctcctcggacagtggtatgggttgccaatagagaaagtccactaactgattcatcaggtgttttaaaagtcactcagcagggaattcttgttctggtcaacgatactaatggaattctttggaattctaattcatcacattctgcactggatccaaacgctcagcttttggaatctggaaatcttgttatgagaaatggcaatgatagtgacccagaaaacttcctatggcagagttttgattatccaggcgatactcttctaccaggtatgaagcttggaagaaacagagtaacaggccttgattggtacctgtcatcatggaagagtgccgatgacccttctaaaggtaatttcacttgtgagattgatctaaatggatttccacaactagttttgaggaatggttttgtaataaactttcgtgctggaccatggaatggtgttcgatatagtggaatacctcaattaacaaacaactcagtttacacatttaacttcgtttctaatgaaaaggaggtatatatattttataatactgttcatagctctgttattttgaggcatgtgttaaatcctgatggttctctacggaagttaaaatggactgataaaaacactggatggactctttactcaactgcacagagggatgactgtgacaattatgcattttgtggagcatatggcatctgtaagattgaccaatctccaaaatgtgagtgtatgaaaggatttaggccaaagttccaaagcaaatgggacgaggcagattggtcccatggatgtgttccaaatactccattggattgtcagaagggtgatggatttgcaaagttctctgatgtgaaactgccagacacgcagacctcctggtttaatgtaagcatgaaccttaaggaatgtgcttccctgtgtttgaggaagtgcacttgcactgcttatgcaaattcagatatcagaggaggaggaagtggatgcttgctctggcttggtgacttgattgacatcagagaattcactcaaaatgggcaagagttttacgtaaggatggctacatcagaattaggtatgaacttttctttttcttacttgagaaacataaatctgatacaaatttcatggtatatttattcaaaggtttttaatttttcaccttgcatttgtgcctctagttttatcccttgattttgcggcttaaagctttgcctctgtctcaattgttgctagtgtgaaaaatctgagaccaattactaagcacattatttcatggaataaaatacttagagtgtgttttggagtgttttctcatgagtgtttttatgagaatcacatatcaagtgtttctctagaaaatattacaagtgatttttccatactacaagtgatttttcaaaattttaaaaatatttcctaaattttggcaaacatctaatgttttttcaaaaacactttttaggttaaaagtgcatcctaaaatcattttccaaatggactcttattttttgaagactagagtgtaaaacagaggtctactcaaaagttggaatattttcttttagatttcaattattgtgtagcagatgctataacacagtaatacaccaactgatttgtgcccttaaatcctatgaaaactacagttccttgaactcctactttcatggttgtaaactacaaatatattttggattagtggttactactcataggaatttatggtttttctattttatttcttggctttcctgcttaatttctttccatctgtgtcaagatgttttttcaagaaaaaatagcagctccaagaagaagaaaaagcaagccattgtcatctctatatcaattacaggaatagttcttttaagtctggtcttaaccttgtatgtgctgaaaaggaagaagcagctaaggagaaaaggtaagtaacaaattataatgcttgtatcactaagtgtattagttagaagtacttccacatgttatctgattatgtattactaaaaaaaggagcaagagattgacctagcttattttgataaatgtagaaatgatctagtcttggaaatagatcaagttcatggtttctgtatataggatttatgcattctttaattcttcattccattctccattttttaggatacattgaacacaattcaaaaggaggtaaaaccaatgaaggttggaagcatctagagctatcattatttgacttggatacattattgaatgccactaataacttttcgagtgacaataagcttggagagggtggttttggacctgtttacaaggtaagggtataccctacaacaacttacaagtttttgagaagttattgatgtcctcaatcctcatagtatctaaatgaaaccacatttagatatatgccttaatgtcttgaaaccagtacatgtgctaatatttttgtgccactaatttgtttagggcttctcattttgaatattgacaagtttcatttaatacgcaaagctttggaataaaaagaattttatatttttagggaaaattgcaagagggacaagaaatagcagtgaa

SEQ ID NO: 10640 - DNA, 7827 bp, Vitis vinifera
  Intron number 1 from transcript GSVIVT01010162001 (locus G SVIVG01010162001) derived from phytozome v7.0 (chr-ID chr1 ; pos 16601805 to 16609631)
tcttgtatagtatgtttcataaccttaaattgatagtaatggagtgccatttcctgtttgtattagacctccataggctttccagccacttctgcaggtagttttcatctatgataccattgcaagagaaagactccatttacaaagcctgaagaattcctaggggtaagcacatatttacgtttggtttttttttattttttataatatacgaccattcctacttccatgaacgcatgtttcctcttatgagcagtggatgaagttaatggtctctttgtattgtgtaatttgtttatgttgcatctagttgacatggcaaatcgagcaaattattttctttgttgtcttatcatctagattttgtataaatccatctgggtgttactcttttcattctgcaaatttttttgttgccctatttaattacagaaacatgttgatgaatctgcgtttttaacggtatttcaatccaaataaggcctgaaatttatcggccaatggtaggaaattttgggtcattgttaaaggcattgtattaaatttccatattcagtcccatctctgaatggaggtctgagcttcaccttcaagtttgaacctaaatgaaaaatcctatctctaattgatagtttattggaaattatgaatatacccctttaactactctcacaagtcttattattttcatgggttttgttcttcgaatacctttttctcaccacatacattactctagcacataacaaattagtcaacatgctcttaaataaccacatagattaatgtagcacaaaaaaaattgttaacattctcttctgcctggcttggttttttaagataatcaatatgttcctcaaagtttgcttcttctaacccatttgattgattaatttcatttataattaatcaaatttaccctactaggctttggttatgctgacttatgtactattaccaccttccttagtttatcctaccctactcttccaaaacattgacatattccaatctttaattttagcctcaataatatcagcatatgggaaataaaagatcaaccatcaggttccccaattgaatcttcaaatctaaaataaattaatcaacttcattccaacattataaataaggatcttcaccttacattcccagactaatgaggtgtaagggtaattttagaaataccgcatttatgcggattgataatatgacttgaagttcagtataaatctaaagtaaagccaccattaaggaacaacttgccccaaacttacctgcatacgttaatcttcatcttataaaaaggttttgagatagcaaagaacgtttatttccattgacaccttacaaacttttgtttatgctcattttgcctaataagaaaatagcattcttctctgtatggagaaagaggaagagggagagagagacaaaaaagcttcctataaacgcttctacacaagcataatgaaaaataggtctgaacccccaacatgtgtgcatgattgaacatgctataatggaaatgtcatctcatactaataataataataataataataataataataataataataatcttaaccgggttgtacatactaagtatatttgcatgatgtataaaagatacactaaagaaaagaaatcgcttaatctacattttttgggttcttctaccaaaagggtccttgaaaaagatatgttgtccacaaaaacttgagtgtgaattattcaagttttggtatttagagtggaaaatgagaaaaggaaaaagctcaatcaccatgattagaagagacaggaaaatggtgaccatgttctatactgttttttcctaaaaaaataccagctaactcatcactcgcataaactgaaaatttaggccaagtaatgcaagctgcagtcgagggatagagggacgcactcgcaggaaaggcaaatgctctaaaatagccaatatcacttcccaactgataggtgacgcgtttttttccatgttcattttcatggtatatacctaagggggtgaaattctcctacgatcgtttatactctctaataagcttcttggatgtatttgcaccattctcctcaaggcatgaatgtgatattttcgtcttttatcttttattgtttctggtgcaaattcaaaacaaggcaacccataacatgcatgcaacagattggaactttaattgctgtaattattttattactaggacccagcattttgatgtctggctccgtgtcctttattggcacatggtgcatatgaagatatatttttaaaacaaccaattaatgaatgcttccttacttttattttcaagaaaaaacacttgatctcaaattttgcttctggtttgagtactacacagattttttagttccaaaattgtaacctgcatttgctctctctttaatagaaaatccctcatggtatttgcatcaatgaagtttcttttaattctaatccaatgctgcaacgaaattttttctctttacaaggtggcatgattacaacttctctatgtaaaatttcaaatcttctttctctctcttccatctgcaatcaaatgaagcaggactgttaaattaaaaatttacaattatatgacatacatgcttcacaacatttggattgtacgaatctgtcctttgaatgtgctttaataaaatttattatttcccaatcagttttgtctgtattaacacatgcaatctaattaatttcatttatatttatttctatgtttgtttagatgtttaatcaattaatgcctatgtccatatgtaatgtctttttatttatactaatatatcctatactttcttttatcatggaatattgggccatttaatttgtaatgctcagcattatccaattcacagccttgttccaaaatccacaacttataagcttttccattgttttttccctatccacatcaacttgttttgaatcatacaccatcagttcactttggccttggactaatggtttgtttggtcggcttgatctgaaattgtttcaaactaagcagctcatatgatctacgcatatggatccatcaaaagatggttgtaaccactttatggcatcatacgcaatgtatcaccaagattgtattagcatcaatttcatcagccatgtccaatacatggttcaaaatggaatataaaatgaaaatattggaaacaatatttaatattaagtttcttttataaataaacttattattattattattattattattattattattattatgtttggactttgtgcactagttcacttatattgttttgacatttttcacttttacttaaagttgttttctatcttaagggttgaaagggccaactgttttatgtaaactttatgaactttctttgacctctaaactcatttttattatatttgagatcaattctgatcaactaatacaactacaacactatacatgtggcattttaagattgttatgctattaatgaggaatacatatataaaactgctcatttcattgtgcagatgcagcatcgaccccttatattgcaattgtcacagtgatgctccattcaaaatttcttggtgcataattttccccaactgctagtctacatcgttgctgaaaatactcaagcaaaagaagcacttcatttaataaacacatggatagcagacaaaggaagcggagaagccatgttccatcaagatctgaatgataaaatattcgatagccctttaacatacttttaaaactagtgccttgatggcttaactctggaattgcgacatatttgtaatatattttccttctttcatgttgtaggttaagttaccaaaatcccgctgctcgagaaagaaattcctatcaatcatggatactctcccattggatgagaaaaatgtgattagcaatatgggatttgggggcttgctgcaacttggctgtaaagaattgaattatgagctaataacgtggatagtcgccaattacggcattggttaccaccgcttatgtatgcaaacaaaagttgttgtcccagtcatgcctaaagatgttagagaggtactgggcatctcggacaatggcattgacattctcatttacaataggcgcggcacacccaaccacacattcgacattaaaatattggaagctaatttgcgtgatctaccaattggagaagaattcatgaagtccttcatctttttcgcatgtgccactatccttgcccccaactcaaaacaagaaggtatgcatgacttgtgggacatggtttgggatagtgaagtgggggtgtgcaaaaattgggccaagtttgttctccaatatgtcgagaataggataagggactatcgtacaagtcacccgacatacattagaggttgtgtcttgtttcttcaggtattcatttctcaacctctccacattaatgtcatatgcgtctaccaaaataatttcttcttttgttgatattgtaatagcttctctaaccaacttatatttgattcccacttcacaatgactttccaagttgaagtccgcagtccactttctgctgcatggacagataagcaagtcaagaggcgcttggctgccgaaatacacacctatggcaattatggccatgtctaggtatggtaaaattcaacaactccataaacgtagtttggtgttatcattaatttatatttcaaacgtaatcatcaatgtttgtttgatgtatgggcaggttatacagggaagcgaaccttctgcacataatgatggacgtccatacgaggcggccagctcacactctgatgacccaactgaggtacgccatggcactacgactttattacttcacgaacaaacttgagcaccatcctcattctagttgaccgtgctaattgatactccttttccctaatactagaccattgaagcatggctaagtcggaattcagaacatcttatgagcctcgtttcatctgtggcacaagacattgccacactatatgcaaggtccagtagaggacaaagtggctatgcactcacccaactagaagaagctatgaatgtagaaagaaagaaaaacgaaggaagcaccagtgtgcatccttgtagtaatgaaatgatgggaaaaggaatcgatgtcgcaagcactcattctagccagcaaagagtcactggtgcaacaatagataatggcccatgtattgaccaccacacatgcccaccttcacaaaagagtgttgaatcacaatcacctaaaggggtgcaaatgggtgttcaagaaggctgtggtagcaaacaggttacacctacccctaggtggagatttaaacacacagcgaaaaggcttgtcaagccagccaccatttgcaaatcccccttcgtctctcaatgtgttcaactatttcctaaaattagccaacaagaaaggttggttgtagattatgcgttgtcggaagacggtaagccaaggtacatgacatgaattcaccatttattgttaaagtgaacattattgttaaagtttatgactgttgacttaacacatttttgacattacagcgagatcttgtgcgatatgcatggcacatacataacacgggatgagctttcttcactcaatggaggttgttgggtaaacaatgcggtatgtgtcaaagatttcagctagggccatggtcgttatataagaagcacattattatgttttttggtcattcacatgtgtacattttcaacttatcggagtggtctgccgaatgatgaatgtagaacaagctagaccatcgcgcgcacactatttcgacccatcattctccgtaggccttaatcataattttttaatatgtttttctattattttaaattggagactatgtggtgagctgtaagaacaaatggacaggtggtgctaaccagccttatgacaaatgccaaaaagcatgaaatcacaaagcggtgtcggatgttccttcatgctaaatttgtgggccatgatttctcaagttgtgatctggtatgtcaaacctagtacaatggaatcatggccaaagccattgtttcatttaattatcatattatagtgccctactaacctattaatggcaatgtcatcaatatgtgtatagctattttttcccgtctacgacaacaaccattggcacgtgcacgtggtcaatattccagcttcaagggtcgaaatcttatcttcgttgcctttaagaaggggtaataggataagtgtcgtatcgagacgcttgtctgagccaattgaaaaagcattccatgctcatggcatgctcaggcgattggaggtctcaaaattcgtgcatgtgcaaccccaaattgtacaacaactaaatgcgtagattactttaaccgttattattttacatatcattaaatatgcggtactgatgtatttttcttttatgcttgatgtatgcatataattggtgtaatacaattggtggtgtagatatgattgtggcatgttcgcaatcaagtacatggaacattggaaccgggcaacactagcacattcaatcgcggaggtaagtgcaactaagactttagaaattggtttatttgaatttttaccaaatcagcctatgattttggtgtgtgttgtgcaggacaagatgcatctatatctattaaggctggtcattactttggttactaatgtggcaaacaatgctagagataaggtcttgaatgcatgtcgaatttgattaatagaggccaccttggacaggcaaggttaatgatggaaccgtacttgcatgagagtggggctggtggtgtctgcagtgcataatcaaaaggtggagccctctattttttttttatgttgtttgtttctctagaaaatttatattttagggaattaccttttcaataaaaaatattcaagcataaaagtagactttttcctggaatcacaattaaatacatatggactaagccaatagattagtgtccttgcgagttttgacaagagaagacacacactagaatgagtaccctgtgaagtattttatttattattttttttaatttttgataagtaccttgtcaagtgattttgatagtttattactgaaaactttataccataattatatttgctgaaacatatagaggcttattgtttgaatatttgagcatttaggctttatcagtggaaatttaatggtgcagaatttggaggtggttcgtaagctgggaaagcactaagaaaagaagaacaagaaaagaccaaggttctcctcattaatgcgatctcacttgcacatgccaattgtaagttctcatttcttggatggtttggatctttatgttaaagttgttagtatcatgtgaaagagctaccatcatactattgacttcctttttttgttgtgttgtgaatttcagtaggtgcttctgttttctgctactttcaacgatacaaataaaaattacgttacaagaaaagcttcctaccatcaaatttttgtaaaaaaagaagaactatccttgcagtctgtgaaagtgtaaagtgaaatgccctgatgaactctccaagatgcttgtgattaaagacaaattttttgagttaggacataagctggggttatttttgtcaatacgaaaaatagtgcaagaatgttacacaaagcacttgtggatttttgagtaattttttattccctatactgataatgaatttccatgatggtaattgcttcgaatttgtctatgaaggtgaatttggatgtcaattatgatctgccgcttaaatatgggacacaggcagagtttgact

SEQ ID NO: 10641 - DNA, 17736 bp, Vitis vinifera
  Intron number 4 from transcript GSVIVT01023507001 (locus G SVIVG01023507001) derived from phytozome v7.0 (chr-ID chr1 4; pos 10767719 to 10785454 reverse strand)
acaagaaaagcttgattaggtgattttacatattggaagttcttttgctgtttttgttattttttatttgttgtggcaatattattactttgataataaatgaattaggttaaggaaggggattgcagttccaaacttcttcatatggtagctaaattgtggaaggaagaaaaagttaatcaaatcttttataaatgaagatgtggttatgttaaaaaattagtataatatttttagggcttgctagattggatagaaactaaaactcttttctaggcttaataaaagggcctgtacatgttcagctaatcttgttaaaacagcttataagttaaaaaggatcataatgtgaaaactagaaagatgttacgtttcatagaagctctattttggcttattagaaacctatttcatgtttaataaatattttgcaagaacaatattaccggttgaaaattttggctttggttttaacttctagctaaaacaaaaaacagaaagttatcccaaacaaggccttaaggagagcttgagttttataggaggctaaatgaaaagtcctaaaagtttaagagtctgcaattttccctcatttctaatgggagttcaggtcgggtggagttttctttctttgaagacaaattaaaaaaattgtggtctttgaaattgatattaaagcattatgtttttatgataagaaataaaagatgcattaattatggatgaaaagtacatgagtaaggatgagggggttctccccacaatatataagaaactgatcaaaatatgactaaactcctctactatacaagaagacctatacaaaaagttctagatcacctaaggacatacataattgtcatctccttaattccggactaagctcctctcattgttatccaatccttttcatttacaaaccaaatcccaatttatctaaataacattgaatggaatgccattaaaggcgttggtagaagaggcctagaaagaagaataaaagtggagtagatctcacaacctctttattgtcctccacttttccttaaagatcttaacatttctctctcgttacacaatccaaggcaatgtgagacaagtgattttccataaggtgttgcttctaaaggatctccttcaacccctatatgaaatggtcatcttgtcgcatatacccccaggtggaacctaatccatcttaactaaattgaatagcttgtgccatagtgccaaagttatcaagcaatgtagaaagaggtggtcaattgactctccacatcccatgcataagatgcatcaattaggactaagggatttataaggtcttttcaatcatagtatgtcattggttcttaccttcttgtgtgctactaaccaagtaaaggtcttgatgttagatgagactttagattttcataaaaatttaactggagagaaaggaattgcatctaatacattggatatggcaaaaaagagtgattttattgagaataaacttgaataggataaagaccaaactctcgtatttgcaatagatggagacaagtaaataagagtgagtgaggacatgagtctttcaaagttcttaatttctaaatcagtgaggttgtgatggaagttaaggtttcaagaaagagaagaagaggtaccaatgatagctgatatggtgagagtttttttcttttgcaaagacctgaaatttgagaacacaatggttgattttctcattataagttcttctaaaaatgatttcttgccccatcaccttccaagcttccacaaagcaagtgtgtgaataaaaatcctagaagaactgtgctatggcctcctaaggacatcgatgtgaccgttttattagaatgttggcttcccatcaattagaatgtgtcccacgaatactcgaaataacctgatgccaaagggtagaactttccatagggactctccaaagccacttccttaagagagtaaaattcttcagacaagtctttccaaaacataaacctttagattcctttggcatacacaccatatgccaactgataagatgatcttttttatcctccatagcccctagccaaagaaaattcctttgcaatttcttcatctttaaaactactaatactagaatcttgaaaaagcataaatagttagaaatgtgagagaagcacgagtgaattagatatattcgaccacttagtgacaaaaaggttttttccatccatctagtttccttgagattctatcaaccattggatcccaaaccctgcttgccttcggattccctcttattggaagaccgagataagataaaagccagtatgagactttacaatcaagcatcaaggccaacttggatacgagatcttgtctaaattgatcttaaaccttgatatttgtttaaaaaacaatgagattagcttgaggttttttagatctaccatggaggatctagagaaaaaattgatgttatttttttattttattttattttattttgattggaaacgccacaaagatatattaatataaaaaagaagtacaagaagagggatgagaaatcctcccaccaaagacaactaaattataggaaaatacacataaaacaaacaaactcccactaaggaccaatccctatggagtacacaccgctatccaatccagttgaatcacattaaggggaatccccttaaatgccttggaacagaaagcccaaaaggaagcaaggaaaacaatagagtcacaaaggaactttgaattccttgctttatcctcgaaaatccttgcgtttctttcccaccacacaacccgaattagagctatactcgcagcttgccacaaaactatccctctcttagaattaccgaagcctttaaatttgatggacaccatgtcatatatgctccttgggggaacccaatccatcttagctaactgaaataacttgtgccacaactcaatcgtcaaggaacaatgaagaaaaagatgatctgctaattccccgtgcttcatgcataggatacaaatatcaggactaagggctttgtagggtcttctcacttgtaacatatcattagtattcaccttcttgtgtgccactaaccagacaaaggacttcactttgaaaggaacttgagaattccacacgaactttgaaggaaagttctgaggagatccagaagattgagataatgctagaaaaaaggatttgactgaaaaaagccctaaagaggataatgaccataatctggcatctgggactgaaggagagagatacaaatcatcaagagactgcataaggccttctaagtcctcaatctcagaatctgataggttacggcggaaattcaaattccacgagaaaggccgagatggaccgagaactgaagaaatagaaatgtttttattcatgactactctaaatagtcttggatattgggttcccaaaggttggtccccccaccacaaatcttcccagaaccgaattctttccccgtttcctaccacataccaagtaatcaaagaaaacccctgaaagacttgagcaatagccttctaaggacagcgatgtgaccatttgactaaagtgttagcatcccaaccattagagtgtgaaccataaatgcttaaaatgacctaatgccaaagagctgaaccctctctaggatacctccataaccattttcctagaagagcgagattcctccaagaaatattccccaaacccaaaccccctattgtcttcggtttgcacacaacatcccacctcactaaatgatcccttttgccttccccaacccctgaccataaaaaatccctttgcaacctctcgatttttgcagccactgaagcgggaattttaaataaggaaaggaagtaatttggcaaatggataagacaagattggataagagtgatcttccccccgaaggataagtgggccttttgccacccatctaatctacttgagattctctcaatcattggatcccaaaagccacacgccttagggttcccgcccaaagggagacccagatagagaataggccatccggacaccttacaatcaagcatcacagccaatcttgaaagatgagcttgatcaagattaatgtcataaatactactcttgttaagattgaccttgagcctagaaatgtgcccaaacactaacaaaagactctttagagtctacagctcttcctcccttgagttagaaaagaatatggtgtcatcagcaaattgcaaatgggacaccctagttctatttctacccaccctgaaaccctccatcatatttctttcctcaactctcttaagcatcctactcagtacatctgcgactaaagtaaacaaaaaaggggataaagggtcgccttgtcttaatcctcttgatgccttaacccaccctttagcactaccattcaccaagattgcataagataccgaagataaacatccactcatccatttcctccatctaggactgaaccccttcttttctaacacatgatccaaaaaatcccacttcacgtgatcgtatgccttttcaaagtctattttgaatacgacgccttccttccctgaccttcttctctcgtccactatctcattcgctataagaaccgcgtccaatatttgtctcctttgaacaaaagcgccttgagaatagtggatggtctcatgtagaacccctcttagacgcccagagagcactttggctattatcttgtagagactagtgatcaaactaatgggtctaaagtctgatattctctttgacaaactctttttgggtattagaacaatgaaagaggcattagtgttttgattgataattccgctcctatgaaattcagcgaacactctcaccaaatccttcttaatcacatcccaacactcttggaatacggcaatagtaaagccatctggcctcggagccttgtccctatccaactgaaaaatggccttagaaatctcttcttcggtgaaaggggagtctaaccttaacgcactctcttctgaaataggggaccaatctaatccttcaacaccccaagactctcctgtaggatttgtgtaaagcttttcaaagtaatgtaagatatcctctgtaatactctcggcattcttcagcactaagcccctctcattctccaactccttgatatatttcctatttcgcctgccattagccactttatgataaaacttagagttgcaatcatcttccttgacccatttcactttggctttttgtctccaatgaatttcctccctcaatattaattcctcttgttccccttttcttgaggctctttggcttaacaaatcaggattgagacccccttcctgctcaatgacgtcaaagttagctaaatcattgagaatactttttttcttttctttaagctctccaaaagaaaacttatttcactccttcaatttagctttaacatattgaagtctcctcatgaacttatgaccttcccatccgtttccttgaaacccactccaccaatctctaaagttctccttgaaattagtgtgttgtaaccacatattctcaaacctaaaaggtgttggcccccacataaacgggttggtatccataacaattggccagtgatctgatgtccttctgattaaggcttcttgaaggccttgggggaagagcagcccccactcatttgagtagagaaaacggtccaatctcttacacacgggagactcttgcatatttgaccaagtgaatgaagcattccgaagaggtgggtcaaacaattcacattctctaataaaactatcaaagtccctcatgcttggagttaggctagaaccccccattttttctgagcttctccttatgacgttaaaatcaccgcccacacaccatagcggataagttaatccataaatgtcaaaaagttccacccaaaaatccttcctaagtgagggattgtttggaccataaacaacagaaatccaaagaggtccacaaccgtccaaagagaacttgattgagaccgagaaagatcctattaccacctcctctctatgcagattttttgaatcccagatgatcaaaatcccacctaattgtcacggacttagtcgttcactaagctcgtgcggcacttaggcaagtcaagacgcttgatcttgctaagtcagccttgatccccaatgcttagcttgctcggctaagacactcgcgactcgaaagcttaagagattagtaggcaactccttaaagaatggaagctttattatctcaagaaagcctttacaagtgcttggatgctcacttgcttggtgccttggccaaatgaggccctcacctatttataggcaccaatggaactctctagaaccttggagggttccttacaattcatgaatattctagaatgtcctacactattctagaatattcaagagacttctagaatgtcctacactattctagaatattcaagagacttctagatttctctagaaagctttggacccttctcatgccttctaccatagtgtagagatgtgtggacatctctaggcatttctagaaccttccacactcttcccaccaatggcttagtgtagatggctctaggagtctccagaagcttctctcctcctatataagcccttggggagggtcatttgaagcatcctgtgacataatgccccagacgccgaaagagcaacccaatccttatttctgaccgtccagacactacccacaaaccttctatcacaattctccttttttgtttcctgaatcatcacaacatccggattctctgacctaagaaaatctttaactatcctacgtttattccttgaacccaaacccctaacgttccagctaataattttcatgggaaaacacaaagaccctaaccttccgagccaaaaccaacatgtctcaataacctgtgggccctctgttcttcctcctagaatataccttaatgtcaagagagcataatacctctcgcactttggccattttcccgggggacagaccatcaataaggaaatcacccgaatcctccttatgcgacctgacaatagattccttaggggtacaactctcggtcatctggttagataaaacacactggttctcctcctcaacacggccaggtatgtcaccatgttttaaatagtcaacaccacctttttcataaaatttttttgagatgccttgattttccgtaggagactgaggaagagggactgaattgggaagaagtggaccagagggattcgtcaaaggagaatccggactacaggaaggaaaagaaggtgactcgggtggctgagaaggagagggctgacatacctctaagtttttggctcctggaatttcacaaaacccctcaaagatgagtcctttacctctgattattgaattagaaggtgaaaccatgtctgaatagccacgaggatcaaaccccactcgtcccgttagccctcctttgacttcaacgcggctcgccgaggtgtcctccttcgaaagattaccaaacagaggacatctggagagaggattcactctgattcctcgctccatctgaaagcccatcccaaactcctcttccatgttgcggtcttcacttgacaacgacgaaccccgtgtgaaaataggctcactgctacaccgatgtccctgtcgtcgatcggcgcttggagggaagagggtagaccacgtcttctttgaaattgctgtctcttcctcctgcatagcatctctcgtgtgaaccgcgggggctttccccttcctcgcttcgatttcttcccttcgcgaccagacttccatactagagggcttcgttcctcctaagttttgacccaaccccgacgggcctttaaacttacagcccacggtgttgtctgaccatggcctagggttgggaagggactgggcctttagctcaacggcccaaccttcttctccaaagaaaacctcggcgccgacccttgcaccgtctggacagagcatcgcaatcacctttgtagaagaagcagctcgctggggagaaagggacgaagccgatgcagactggtgggcttgaggagcttctgggccatcttgaagcccacgatgcctcatcccactttgggcactaaccttgtgggctttaaaagaggactccctaataaaatttgagctgggcccgatctgctccatccccctcctatctcccctttatccgccaaacacgtccttgattgccgataacgtgcccggggaagacgcctctttctgtagcactcaatgtccctaacactaccttgtagcccttctgcagcttttgacgactgagagacgcaacctcccactctcacccacttgttcctgctacggtttatctcagacgtgacagcgtcggcatcttcatcttctccggtgactgaaactgctattgtataggaccattccccatcttccacctcaagcaacgctggtaagacgatgtttggaagcatctccacccacagcttcaccctcgtcaagtccaccagcttcaaagtttcctttgccaccttcgttaccctcccccatttcttcaaaatgaaattcaactgaacttcatcccacaaatggaaagggagacctttcaatactagctagcccctcctgaactttccttgaaccaccatattttccttaggcgatcatttccttagcagaatcgtccttcctttcactgaaagtcttccctgatcatgaaccctttccgctctccttgttgaactcacaaagaagcatcctttgaaagcggaaatggtttatggacaccattcctttcatccccatcatcctcgcaatggctcttccttcgtgagtccagtcttagactttttcttggctttcacatattacagctttgacccattttccagctgacaacgtacctccagtcctcaaactagcctctgccaccacttctgcatatgaccgtcctcctctgaaagtgtccccattcatccggatatcaccattcttctccttcgaagctcctccgtctcgtttagaatactcttgcactgataggatcgccttcctaagatcttcccatcctttccctttgacgccctcggggacgacaagaaataaaggtttcctttttgtaacaaattgtgtaattttcatgaacctccctctgttattgaagcatatctccatcaagagggtcttagtcttgcccctgatctttcgaacaaaacccctggaagcctccacctccacagctttcttcaaatgctccatcaaccaatccagctcctccatgtcaaatcctattgaaactacgaaacctcggctcctctctgttatcgatacgcaagttccgccagtcaaaccttcaaactttacctgaaaagactttttctccacaataatcctttcaactttgcacttcatcttggtcagtagtccaatgttattattgattttggggaaggctattcttcagctgcatgacttaggaagtcaataggatcacttgagagtgattccagctaaaaggaacccaagggtggaattttccaaaaaaaattgatgttattttcaaattgtaaaagagacactctagtcctattcttgtccactgaagcctttgatgagccactctcctatctgagcatcatcttgcttaagacgttagctgcaatagtgaaaaggaataggaaaagaagatcttcttgttttaacctctagttgcctcaccctatcctttggcatttccgtttactagtatcggaaaacatgttgaagataagtaaacccccccctcctcttttgagacctccattttgtgttaaacccctttttctctagtgctagatcttaaaattttcaatccacatgatcataggccttttcaaaatcaattttgaagattaccccttcttcctttgaatgccttttctcatccaccatttcattggcaattagaacaacatccaaaatctatctccctttaacaaaagctccctaggagatgtagatggtttcataggaagctctttagataagccattataagaccttagctatgatcttatacagattggtaattaggtttgataggtctgaaatttgtttaactgttttttggcacaatagcgatgaaggtgatattggtacttttttttatcagaaacagataaatgtattaaataagaataaaaaacatgaaaatgatgagaaatcctcctcatgaaatacagacctaatcaaatagagctaagtaaacctcctttatacaaggggatatacaaaacgtacaaaatttatagaggtatgacaactcctagtcctgtaggccctttcctaaggggtgcaaatcgataaccaactaagttgaattacactcaaaggatagggtttaaaaatgtctgtacaataagcccaaaaagaaacaaagaaatgaagcgcatcccacatcatctctggcgtcttccaagtgtccttaaagatcctagtgttcctctctctctacacaatccataacaaagagaggcacgtgattctccaaagagtcttgcctctaatagaatttccaaaacacttgaaagagatcaccatcatatcacgaatattgtctggttgaacccacgccatcccctcctatgagaagatcctaattggacaatgtaagaagagatgatcaactgtctcattactcctcctacaaagaatgcgcctattagggctatgggttttaaaaggtcttctcagctgtaacatgtcattgatatttatcttcttatatgccactaaccaggcgaaagccatgaccttagagggggctcttgatttccacaaaaaatgagcagggtagaaaggaatataatctgaaagattggataagactaaaagaaaatatttgattgagaaacctcctaaagatgacggaatccaagctttcgatctaggataggagtcaaatgaacatgggaaagtaaagacattagtctttcaagatccttaatctccacattcgttggattgcggcgaaagataacatcctaagatgaagaaaaattattacccaatatggctgagatgacaagattttttgttgtactttgaacagtcttggaaattgtaaacaaaatggatgatccccccaccatagatgttcccaaaaacgaattttggtcccatcacccactacaaagtgggtgtgtataggaaaaacctgaaaaatatgtgtaatgaccttccaagggcatcgatgtgaccatctgactatattgttggcatcccatccattgggatgtgtcccatagatactcaatataacctgatgccagagggcaaaactttctagagggtacttccaaagccacttccgtaaaaaagcttggtttctcagagtaattttcccgcaccctaaaccaccaaactccttaggtctatacactatgtcccaactggctaggtggtccctttttccttccccagacctcgaccatagaaaatctctttgtaatttctcaatccttagagctattgaaattggaatcttgaaaagagaaagaaagtagctcgggatatgcgtcaaactggactgaattagggtgattctacctcctaaggacaagaaagcttttttccaaccatccaacttgctagagactctatccaacactggttcccaaaaggaaaacgaatttgggttccttcctaaaggaagacccaaatatgttaagggccacttagaaacaacataatcaagcaaggaagctggcctggtagtttgatcattactaatgttgatcccagaaagagtgcttttgcttagattggtccttagccttgacaaatgcctaaacaccaacaaaatttgcttaagaaattgctactctaccaaggatgctctagaaaaaaggtgatattggtactttgatttattatcccatcattttggaactttaagagcaccatcataagatcccctttaatcacatccctacactcttgaaagagtgcaatggtgaaacaattaagcttgggggccttttgtttacctaattgaaaacgacaaaatgtacctcctcttctgaaaatggccagtccaactatacaacactctctcttgatatgggagaccaatgtggcctttctttcctctaagaatttcttgagggcttggagtatagtattccgaaaaaatgcactatctcctttgacactagggattttataaacttcctattttgcctaccattggccacctaatggaaatacttggaattgcagtctccctcttttatccattataagaccttagctatgatacaccattactcttctagtttctcctttcttaaggccatcattgttgaaagtttaggagttagattccttttctgctcattgatatcaatccaaacaatgtttgaacaaatgtcttttttttttctttctttttttcttttttctgtttagatttgacaaaatctagcttcttcatgaatttataaccttcccaaacttcaacttgactctcatgccaccaacaacaaaatccttccttgcttgaattctgggtgaagcaaccacatgttttcaaacttgaaaggagctggactccagttaaatggaatggtatctaggatgattgggcaatgatcaaaggtttgtttaggaaacacttcttggaggttataagggaaactttgctctcattcatttgagtatatgaatttatccaacctcttgcaaataggaacatctcgcatgtttgatcaagtgaaagacgtgtttttaagaggaggattgattaattcactttcacttacgaattcatcaaaaaatctcatgacatcgaaatccctccctccccctccccttccccccctccccaatttgaaaagggtagaccaaaaagatcttgaagattcacccaaaaatctttcctcaagttggatttattggggccgtaaattgaggtgagccaaaaagtttcctcttcatccgcaatcagcttaattattaccgaaaaagaccttagtaccatatttgaacaactaaacttgtttgatttccatattatcacaacccctcccaatgtcccacaagctgaaagaacaaaccactcttgatttgtaactttccacacgctacccatgaacctcttatcacttgtctgttttcttgaagcatcataatgtctaagttttaatgacaaaaaaaatccccttcttttctttctagaacccaaccctttaatattctgactaatgatctttatgtgaacgcttaaatgcctgacaactacaggatcaaaacctaagaatcaccaaaaaaaatccaagaaaaggtctatacttcctcctaaagtatagcttatccatagtttgtgcactgctattgtccactaggatgacattcttatagtacttgactaacttgatgttcatagttgccaaaatcgattgtatattgaccattttacaaggcgtgagacactttatgtgaaatccttccaacgaagaggttggttcttgaggttgaccttcgatcatggaatgggcctcactagggtcactaggtggtgacctgtggaaaaaaatgccctttagctcttggttagtgatatctctaagggactccacatgttaaaaaatgggactgccaacattagacataggtgttgagacaaatttattcattgaggttacggttagggaaactaaattggatccaaatggtttcatcaaagtaaacagagactggtcatatgttttgatggtgtttctttaaccttctacttattggacaaataatttttctaaatgcttaagctattaggatttggacccataatatgtatcatgctctttaacactctccctccataactgcatgtgtagagataaacaaacttatagacaaataaatcacaacaatctcctttgagcttgcatgcatgtggagagacaaacaagaccacgagcaaacggatcaagacaagctcctttgtgttctgtgcgtgggtttactaaattgaggaaataaatatgtgatgatgaggtttgaacttatgacctcctagtaaatgaggtctaatacaaaataaatatgtgatgtggtttgaactcatgacctcctactaaacaaggactaataccatgtcgagcaaccaattttcttaaaagcttaatgtcacggacttagtcttttcctaagctcatgcggcacttagacaagtcaagatccttgattttgctaagtcaatcttaatcctgatgcttgacttgctaggctaagatacacatgacttggaagctagtaggcacacgtaggcaacacttgaagaataggaagctttattgctctcaaaggatgctttataagtgcttggaagctcacttgcttggttaggaagtgatttgggtggtgccttagccaaatgaggccctcacttatttataagcaccaatggaactctttggaacccacaaaggttccccactatcctagaattctctagaagaatctatacaaaatctatgtacaaatatttacaaggcatgtctggaagtctctagaacatcccataggtttcccttgtcttccacccttgatgtagagaagtgtgggtgtctctagccttttctagaaccttccacactcttcccaccaatggctaagtgtaggtggttttaggagtctccaaaagcttcctgtcctctatataagtccatggggagggttatttgaacaggtcgtgacattaagctattagaaaaattagttgtccaacaactgtatatgttgagccacttaatggaagacgtgtgaaggggtttttcagagttctgccatagtgggttgctaacaaaaacacagatgctgcatttataacacttgttctgtagaaacccccaccaactaaatttcaaattccaggcccatatgtttagtgacaactctctacaaaaccatcaccaatgttccagtcaaacattttttaagtggcaatatagtcaattttttcactttcataggcaggctttatgagagtagatagattctgaatgtggtagaagttgctaataagttggtcgatgagaaactataatcaagaggggaaaggaatggtgttcaaggtcaatcttgaaaagacatatgatcttgtggattaggatttctaggaccctgttttccatagaagagttttctgttctaggtggagatcatggattaggaattgtgcatcattggttagtttttctgtgcaaattgttatgtagaaggtcagttaaaaaagtctactgtctgagacaagctgacccacttgctcctttcatttttatagttgcagttgatgttgtaattgaaatgacagcccaaaggacaatggtattttggaaggtttttggatgggtagaagttgtatcataatgtcacatgtacagtttgtggatgatagtgttttcttcttcagagttaaagcagagggtatgtgcaacagtaagcttattcttttagtttttgatatgaatttcaaggcctaatataaacctgaataaaagcaccctttagtgtactaatgtcaattacaaccatctctttggattagcttcactctttagttgtaggagtcaattgacctttcatgtacttgtgcctttaagtgtgaagtttagaacaccaagcttttaggatcttgtttttgaaaggatcttttatagtttggatgggtggaagaaagtctatctttaggaggtagaaactcgtacaatcttgtttggctcataaccacatgtatttcttgtttctctccaagattctagttaagtttacttttagtgtcagtaaaattctgttgaactttttgtggttaagaatcagggaaggcaagaaaaatcatcttataatttggaattgggtttgtagattgaagaattaagtgggcttgagcattgagaagatttctttgaggagtaggactcttttagacatgtggctttgtaggtttcatacagatttacactttatgataagaggatgtttaggacaattatggtttatactctaataaatggaatgccaatattgtggttagatggtcacaccgttgcctatagagagacattgcccaggttctccctgatttttcttgatacatctggtttttagttgtagatggttgagattcatttttaggaagatttatggtgggaatatcaaccttcttgagcttaattttctattctctaattgatcttgaggcgtagagattcccttatttcctcaatccttgaccattcctcttcccttttgtttcagaatttcaattttgccataatatatctgtcaggaaattgacaatccgtcattacttaagcccttttttccttcatgtttattgatcaccctcttttcctaataagaggatagtcctggacccctttaggattgctttcctcatggtttttttctaaatctgttgacccttataacttgcttgcaatcaatttgattggaagtccacctaaagtcatatctgttatggttttaggcaataatatagtcaatatcaaagagatatggtacagttattgaggtctttgaagatctttggtcctgatttgtttgggctgctggaaaacttttaaccatcttttcttacattgttaacttgcacttcaattgtggtacaacttatttaggctttctgggacttcttggttttcctccatgagtgttactgccatgatggtcatgttcattctttggaggacataccaagggcaaggttcctcagtggttgatcatagtcactatccttgggttaatgtagcttgagagaagtgcctgcattttcaaggacaagttgaggcctgaggaggcattgtgagaagacacggtgtactgtcctatctttggatatcagtgactgctaccttttttggtccttcattggatgttgtcttgttgacttggagctgagcttgttccactggctaagataatggaagtgcagacaaggtggaaccctcctccaatgggtgcacttgtgcttaagttttatgggtgttctttaggaaacttgggttggtgagtgattggttgtattctcagggatcacagtgacagagagggcagaacattccctgaaccttctgggagggcttattagcagaggcaaaaacagtagcctggttggaaatcttgcttcaagatctttgggtattgttatctcttggtagaaggggattcaatcactattttagtactggccttagaggagaagggaggttcatggaagtttaattgttggttgcacggaattatagatattgctagaggattggatgctattattatggattcattatttagctaaacggatagaggtttggctagccaagaaaggtgcatcacaattaaatgttcttcatacgaatttgataccaccttgagttgtagtcctatagtctttgtttggcaccttggtttgtattggcagtctttcttttatttgatttgtttttgtaatatccttgaagaataactcatccttgtactttcaaattcgtatcaatgaatttttggtacttatcaacaaaactgccattagtggttcatttggacattttagacattggttaattttcttttgataaagactgatgaacataactttttaaatatttatgctcaactcatgaatgagtgtattttctttgcagtttttgttt

SEQ ID NO: 10642 - DNA, 11196 bp, Vitis vinifera
  Intron number 10 from transcript GSVIVT01012857001 (locus GSVIVG01012857001) derived from phytozome v7.0 (chr-ID chr 11; pos 6242349 to 6253544)
tttggtgcatctgaaaggttctctctctctctgcccctctcttgccctctctcttgatcttctttagttgtttgttttatcttttaactttttttctatgttacttattctgccaatgttctctaagaaaacagaggctatgcttagttaagaaaaacacccaaaagggggggtgaattgggtgtttaaaaaacttttcaatcacaataaatttaaacaaattataagcaaagtaaagagatagagtttagagaaatcaaactcgggtttatagtggttcggcacttccttgcctacgttcactctcctcaacctcctaaccgagtgagagttccactaacttgaaacttcaaccaagcttccaatcttctgacacttggattccggctccaatgggctcttacacaacctcttcaagattcaaccctcttgaaggctttaacactcggattgttataagatataatcactcaacctagcttaaagatggctcaaatacaagacaaggctaggatgacaaacaagagtgcactaaaggatatgcaagtggtgatttaatgcacaatgaaagaaatgagagcttttttatcaagaacaggtaggtaggctttgaatgcaattgttctcttatcaataaatgaagtggagctctcaatatataggtttctaagctcgagagtcaaaatcagcaaaaggcaacctcgtccggtcgagctaggggtcgactggttcattagccgttagagcatttaatgcatgacaggttaccgttgcctcaaccgaacctcgaccggtcctcgactggtaaaggaatcacttcgaccgggaagagaagactattgggagagagagaaggtttttaaccttcctcgaccggttcctcaaccggttgagcatttttggccctgaaaaacctatttttgattcctttcttttctaacacttaggcaaggtctttaggtaaattagtaagccaattttgaaacattttgcctaaggtaaattagttaaaaactcgggttttaatgaagtcgacgttttaaaaaataaaccgagttttctaagatgcatgaaaacgtatgaaaatcctaagtgcacttatgcattcatcttacattagtttcctatgatctcaagtcttccaagcgtctcgatcttgtatccatttggtcatttgatgaattttcgagtttatacctgagattcttaaacattaaaccaattagttacttaaccatggtttgttatcatcaaaacctgattaggagaacccttgggctaacattctctttttcattttttttataagattatctcatttttaaaattatgttatgtagaacaatataccttgttaatttttattcggattgttatattgtgttacggtataattaactttatcatttctatttatttttgtattgtctagaacatttaattattttctatgttaatgatcgatatatatttgatcttctttagttatgtgttttatgtttgacaattttttttttaatatttttttttatattatcttttgtggtaaatgttctcttctactttttgcaactatctattcacttttaaaatttgttacgtacaaaaatttaacttgttaataattattttggttattatattgctttaggatttgtttattttcaaaacaaagaatatggaaccaaattattcaaagaaaaaagaagcataggttaaaagaaaaggttggtattcaatgttatttgaagaaaaaaagagagaaatatgttgaaagagaagagaaacatatgctaaaaagaagtcgaatcaaaatgtagataaagtagagaaagtaagagatgatattataatattgatagtatgagaggacatggattaggtattattgtcaaattcttttaatatttgtatttatgagatagaatctatccatcaggtgattacagtttttgttgaaaattcttgtcatggtattatgatcgaacgaccaattgacaaaggaaaaaaaatatacaaatattcttagtacttttgaaattggtgagatatttttcttttggtataaataaaagcattctaaagttcaatgtatatataaaaaaataattagtcattgttgatcgtttatagggtcttcatcgtgccaagatgagttttatattaactaatgtccacctaggacatatgtaacaggtaagaataaattactacttgattaaaaaaaaaaaaactatgcttcaagttagtatttaattcttatatattgtagatacctattgctgaaaaaaaaggaacagaatctataaaaaaaaaatcactatattgaaaatcaacctatgtagtaatttcttttgaacttggaaaacattactgatttagaaaattataagatccatataagatcaaatgttagattagatcaaagagtttataatgctccttcaacattacaaaataaataaccaacctattatctattttaaagcagttgatgatatgattgaatgcaaatttcatttgacttgttacatgatgatatacatggatcagtattgtaatttttctacctaatagtgcattgggagttgtgatcttatagagttttaatttcatattgttaaattgtgaaattgaagaacatagattatcttattaaatgtaaggtcaatgtatttagagatgatctttaacgacaactttgggttacatcgacctcatattccaagaagtaagtcatgatattttttcaacttcacaatatgacgatattgaattaacattctataagatcacaactcccaatgacacttttaggcagaaaatctacaatactaatccatggatcattatcatgtaacaaggcaaatggaattggtgtgttcaatgatatcattagcaactatataatcgacaatgaagacaaaaacagttacaacaagtgagttgatagatccccctcttagaaatgtgacttttacatggtcaaatatgcaaggtgttcttatttgtaggaggttaggcagatttttgttctcaaatgagtgggatcaaatttcccctcaaagtctctaagaagtgtttcctagatggacctcaaatcatagcctaatatacctggatacgaatccttttaagtggggcccgactccattcaagtttgagaatatgtggctgctacatctagaatttaaggaaaattttaattattggtagcaggagtgttaagttggtgattgggaatgttataaattcacgaggaaactaaagttcgttaaatctaagttgaaagatcggagcattttttttggagatttaaaagaggaaaaaaaatcgtttctgtcaaacattgttacgattgatataaatgagtaggaagggaatttgactcctgatctctcaactttgagagcattaagaaacgggatctagagggattattgttaaaggaagaggttcattggagacaaaaatctagggttgaatggataaaagatggagattgcaataagttcttccatagagtggccagtggaaggcaaaataggaaatacataaagtctttggtatttgaagaagggttattctaagcaacattgaaagtatttaagagaagtgatttcactccaaaccctcatgtgtttcttggagggttgaaggtttagattagtgttccatatttggagagtaatattgggctagattgttccctttctaaagaggaggtatgccttgttgtcttccaactgaacaaggaaaagacccccgatcttgatggttttactattgcaatgtttcatgagtgctgagatgtgattaaagaggaccttatgaggtgtttctagagttctatagtaacgagataataaatcaaagtactaatgtcactttcattgcttttgtgccaaataagagtcaaactattaaaatcttaaattttagacctattagcttggttacaagtttatataagattatagcaaaggtcttatcaggaggtttacatagagctctccatgaaacaatctatagatcctaaggagcctttgttgaagggaaacaaattttggatgttgttttgatagccaatgaagtggtggatgaaaaaaaggaggtcaagggaggtaggggtagtcttcaaaattgattttaaaaaggcctataaccatgtggattagggttccttataccatgtgctagaaaggaaaggtttcaactcaaagtggagatcttagatgaggggttatttttctttaacaagctttgcaatcctagttaatggaaatgccaaaggttgggctaaggccagtagaggtttaagacaaggagacccttttttttctttcctttttaccatagtagcggatgtcctaagtaggatgatgatgagatcagaggaaagtggtttaaccgtgggcttcatagtagttaggggtaggactagagtgtccctcttacaatttgcaaatgacataattttcttttataaatcctctttggtttttttgcaaaacctcaacctaattctgttggtttttaggcagttattagggttgaaaatcaatttagagaagaacatcttttttggtattaatggtttttgggcagttattagggttgaaaatcaatttagagaagagcatcatttctggtattaatttaagctaggagttgatctttaggttgacttcgatacttgattgtagagtttcagagtggcttctttcttatttgggtcttcgcttagaaccccaagacactaagattctgagatctagtggttgatagaatctcaaggaggttggatggtgggaaatggttttttttgtctttgtgaaggaggataaccttaatttagtcatgtgtgtctcataaccctagctactacctctcttttttcaaggtcccaatatcaatagcctcaaagattgagatgttacaaagaggcttcctatggtcagagactggggagggtaagaaagatcatcttatcaattagatgtagtgtgtaggccaaaagagtttggaggtttggggattggtaagacttccttgagaaatcatgttcttttagggaagtggctttagaggtttcctaaggaaagttgtggtctatggcatcaggtaattgcgagcatttatgggacacatcttaatggatgagatgccaatatgttggttagatggtcgcacagatgtccttagaaggctattccacaagttttttaggacttttccccatacatctgtcttgtggtggggaatagggagagcatttggttttgggaagatttatggtggggagatcaacctttcttttcacaatttttaggcctatatagagttatctcagtgaaaaatctctctgtctcaaccgttcttggtaattcccatcctttctcttggaattttaacttttgttgcaatctcattgatatagaaattaaacttcttaaagatgtgtcttcacttgattcattgcacttgtctccttttttcgcagattcaaaagcctagtctttatcctcaagtttaattcacagtaaattttttttcatagccttatccaatttcttaaattctattccattcccctaagccgaatttctttggaaatcaaaagctccttcaaaggtcaaagcctttgcttggttagtagtacataggaaggtcaacaccaatgacatgttacagttgagaagaccatacaaatctcttagttctcgttattgcattttatgcaaaggagatggagaatcgattgaccgccttttctatattgcctatccactttggggctatagcataaagttttcaatatagcaaggatggattgggttctatgtagaagtattagagatatgatgattatgtcatttaaaggaccaaggatttcaatcagaggcaagactctttggcaaatcgtttgcctcaccttattgtggatggtatggcaagagagaaatgctaggattttctaagacaagtggagattgaaaggaatgttgggggatttacttcatgtctactcctcattgtaggcctcttatattgttacttttagtggagttccacttaatgttatttaactcaattggctttcggttgtgattcaaaagggtgtggataacaataagaggaggtgacttcagttattgagatagtttgtgtttttcagggtttgagacaattggtggatgcctttgtgtatagttctatctagtggggttgtctagtttcattttgatcaggttttgtttttgcggaaaagacctctcatttttctcttgtacttttattattatcaatatatttttcgtttttgataatatatatatatatatatatagataaagacaatatatccttcaattgtttaacctcattgatttctttaataaatattcctcctagaataaataattaataataataatatttaagtttacttctaaaatatactttgaaatcttataggaaaaaattaaaaactaaatataagtatacacacatacatagtttacaaaaatacataaccttttcatatgaatatgagcaggcatatagaggaatttgcactaattggagttaatatcccttccctttgcattgtggtttggttattcattttataaaacacataacctttttatatgaatataagcaggaatatagagaaatttgcactaattagagttaatatgccttccctttgcattgcggtttggttattcattttgtgatgttgaagaagcattatgaactctttgatcttataattttctagataaggtattttttttaaagtttgaaagaagttactatatgggttgatttttaatcttatatggatcttattactactactactactactactactagaactacaagcggatcaacacaggatctatgctccttctacctttcaaacactgttatctaggctaactaaatcgttcatagaaaattcaattcgaactaacttaggacttaatcaatgattatagattgttccaagttgtaatattagttagttcttaagcagaatttgactttgataccattttgatctagatctcttaggtttaataatagttttgcatgttcatttgataattttgcatatgcatcatcatttagtgaaaatatcattaatagtcaagaaataaatgtagctcaaatagaaagtcaattacataattgatcaattcctcatatgaaaattaatacaatttatcaacaaggaaaattaaaattgagtcaaagttattcaattaaaattgatgaacaaactatttctttacaattattgaattagggttattgtagataatttttggtctttaaaaccacaaagatttccaaaccaaaatttagaatatgcttatggaaaaactgtgtcagccttggctcaacatctccaaaatcttcaaaatcaacttattgcctttgaaacccaaaaatttcaaaacctcaaaattcatgaaaaccaagaaagattgataaaagatctgaaaaccaatacaacatcaaccagtctaattagtttagatagtcaacttgaaatgcttaatttaattaggaaatcatctcttctttttgaacaatatgaaaaacttcttgttaaaaacctaatcggggttgataacaactctttcattgaaactttctttctgaaaactcaatataacaaaatatttaaaaatcaagaactcctatataaacattttaaaacaaaaagcgctagaataaaaacagggtatgtagcataccacgaccctgatttcttctttgttatacatttaacttatgtaaatatgtctattgtgaataaagaaattcttgatcttgtaccttagcttatggattagggaatttttaaaaatgttttcatgaactatgtatctcaatttgaaaccattccacccttattcaaaaccgatggatcaatagtgttagcctatcaccatgtttacataaagcacaataaagaaccgcttattcctcaaaagaactaagaaaggtttgattacaagttcaaactctggaacttgaacttgatacaaggtttgattacaaagaaatgttacaaaggaaagattttttgaaatgagagggatacaaaagaactaagaagggtttttgcataaacactcttatcaattcttcgtatttttcactctgttttgtgatgaacttgatgactctatttataaagaattttgacggatttgaaacttaatgaaattcatagatttgatcatacttgaaatccaccgacagcttcttgataaggttttcttttgataacttgtagatgaaatcttcaacatgtcatggtttttatgatagattcaaggtgctaggaatcttgatcaaattttcaagaagttaagaaagttaccatttatgaatagtaacttatctccatttatcttttctcatgttttgagattgcaaacttcactatttacctttcaatatcttctttttcatttttttttttttacttaacatctataagatacaaatgtataggtagagacttcaccttcttaaagtctcttaattcatttcttgaaggaaacgattttcaaaatattttttggcttgactttttttgaaatattattttttataaaaatcaataagataggagaattgagattgataaaaaaaggaatctcaggaaagttagttgaataaatgattttttgaatattatcttctacaatgagtttataattagaagaactataaatctcaaaatctaattatcttgcaatcattctagatcttcaatgacgaatttgttttttgagacttgatttatagggtcaagggacctcttttccaaataaaagttgtttcctagaacgagctttgagaaaaatgagatgttgatctagataaactcctcctttgtttgatcacttaggaggcttgcttttaataataagctcaatttattcgaccacttgggagacttgattcaaaacacaagttgctaattttcttccaaatccatcaatttataatttgcaaatactaattgattagccttgcaaatactaaaagtgagtgcatacttataatttgcttttctaatggaatttctctacataagtgatcaagttttggatacttaactttggtgttgccatagtgagtatactaaataaaactcattccttcaataagaatttcataagtgctacagttaataataaactgaattatatgttcttgttgtgcttgtcttgtagcttgggcttttaaacttattaattgtctaaagtcttttggaagatttaaaatcttttgttgaaaaaatgaaaatcttgctttttgaaaatcttgaaattcttttgaaagctttggaatctcatttagaaaattttgcaaatcttttgaaaatattgaaatggctgttgaagtttcttggaattttttctttattttcggcattgaagcattcaagatttatatccattattttgcaatgtttacaaattcttgagagggtagtgcaactttctaggttatcattaatctatttaaaataaaaagatatagcattaagagcttccaacttttgaatatcacttcatgtattttagaggttgtctaaaatgcatttttgtgatctgtctaaattttctatgtctttatgaattctaaaagaaagattacttttgggaaatactagagtaaatttcccaaaactaatttcttcttgttccatctataagaaaaatctaagtgttagtacagtacttgacacatagataaatatctaagcaatttatatttaatatatcaaaatggaaaatatattgaatctatgaatagtaaatgcttatttaatttttgaataatataaatgtttaatgggtttttgtattcttttgaaatcaaatttattgatttatatgaacatgcacaaattccattgcattcttttttattatctgatccgtcttgacttgattcttcacttgatatttcttgagttaatatttgattttcttcttttgattctgagtcttcagttgtgtcatcatcttctttattaatcattaaattgattattaaaattttgaatttgtcacttatttctaaagaattaattttattttctaattgacaatcttttgaataatgacttacttttccacatttataacatgttggagttttctttttgaaatttgatttgcaagcaaattttgatttattattgggttttatatttttcttttgaaattttgattcatttgatgttttatgactctttgtattattttgtttattctttttcctttttgaaagagttgctaatgtattgtatccatagtatggacaaaattttcctaatttgtttttattatcttgtttttcttttttcatttgactctttagtttgagatctatacatagagctagaccttcattatttataaatgtaattaattctccataagttaatgacttttaaggaattcttccattgtctaaatttataattctttgtctaaccttttctacaaataatgtaggtaaacttgatataaatttttcttttcaataatgactttcacaatcaaatatggtcatgacattgactaaaaacatatctttgtaccatttgaaatcttgaagtgtttaacatctaagataattgagaatttttgaagttctttcttgaaaataaattagatctcctataaaatgttttgttattgtaaatatttaagtattggtagcatcttcttcataagtttggattgatgttccttattctttgactattttctttgcatttaatatgtattcactttcattttgactaagatgatgatcctaccatcctttaagtaagtcagtaaatcctatgaccaatgttctagcagcatgatgattagaattattggttttaattttatatgcatttgcagccatcatcatttcatgaagtaaattaactatttgatgttcactcataccatctatatttcattcataaaaactgctacgatcataagtagcagttaattgataatttctttcttctaattgtacatcaggaaaagagggttttgaattgttccttgcagagaagttatggatttgtttatttgatttttctgccttccaggtttaacaaatttggagagcttgaacctggattcg

SEQ ID NO: 10643 - DNA, 7063 bp, Vitis vinifera
  Intron number 5 from transcript GSVIVT01016531001 (locus G SVIVG01016531001) derived from phytozome v7.0 (chr-ID chr1 3; pos 3061198 to 3068260 reverse strand)
attcatcaatttcatctatttttcaagagttccaggtatctttttcctctgttttatgttttttttccccattggcagattatgttttactgcttttgttaatgaaattttgactttcttgagatagtcacttattgtgggcagaatgacaatcatttaaagaatgtttctgtgtttattaattttgaattttcattctcttagtgtcagattacgctatccatgagtgttttgttctattgagaaagaatggctgtttcaggatcaggtcatcctatttggttttgttgtgtataagctctcatacttatgactaaactgtatgccatgttatatcaatgcgtattttggcattttgcattgtcgcttaatacaaactttgaaaaaaaaaaaagttgtgtgtagttgagttaaatcaagtaattgtgggtaactggatgtatatctgcttgaaatccgtaactccctaaaatttaatattgtcagagtggatgatcaaggttcaaaatttcggctgatattggtatgactcaaccaagttgtattggcctcggccatcaccattatgatatattgataccggtaaaccaagctcaatattttggtgaataacaaaacaacttgaccaactcagagatgaattgctgatctcagcatggttcatgtgatgactctgagacaataccaagattgagcatcctggtattgaagaaagtagtgatcggagggatgggctgtggagattaggagaggaagagcatggaaatgtagaagattggaaggagagggagacaacaatatgcatggctttgggacccttgtttgcatctctatgcttcaactagatccttggctatatccttatggtcttcactcttctgtacagagatgacatggagatgaaattggaaatgaaatgggtatttggtagagcatggataatgcgtaatgatccaatagtcatttgatgggtattttggtttaaataggtaataggtatttgataggaatttggggttctatgaaatgggtgataggtatttgggtttatttgaaataaataggatatggacattgatataaaaaatggaaatgaatataggttaaaaaaaaagtgaatatgaaatttgtaacaatatatttatttttaaatgtgttggttcaaataaaaataaaataataaaaattttattttttataattgttttatattgagaagaaaaatagagttaattttttttttaaagttgattcatcatatagaatggttgcattttctaaaactagaaaataagttttaaatttttcaaaatacttgtttttaaacaaacttagtgtaaaatataaattcatgttttttttcatctttatttttaaaataaaaataatttttatttagcaagctacaattgctatttgttttcaaccaataattaaaaattgatattggatataaaaatgggtatgataatgttttttatggggatggacattaatattaattggaattaaattagaattagtatttattggagtcaaattagaagtggttaattaggttataagagaattagaattaaagttataataggtttttagaatcctagtagaatttggatttcttagagaatactataaataaagctaattggtgtaaactaaagtattgattggtgatcaagtaatattattattatttttttgcaacttttgcaattcttaatagtaagactctattgattttcttctaaatgagacttctagaaggcgttagtgagactttgaagtttctatctcttcttcttaccttctttttcaatatttcttatttaattttttgttgatataaacttcatcctgtgttcctctccttaactctaaaagataaaagctctagctctaacccacctatttgattgtaggcaaccatcataaggttatcctacatcagttttggtatcaaagccaaaagttattggcttgaaggtaatgtaattgaggagtagagcaacttatgcaagcatgaattcaaaaaatacttctaacaatcaagatgccgctaaaatacacttagaggaaatatttaccatacaacaattccatcaagatgttgtgatatagctaaatagaaaacttgatgagatcatgaagttattagaaaagaataaagaaaaacagccaattcaagatgagattgcaagtcatcatttcaaacctcattcaccgtgtgaagaacaagataattttgtaatgggaattcaaagaaggggcgaaatctttgagcaagatgatgatgtgacaacaagggtacaccttcaagctgctgaattttagggaaaattaaatccaactacattttttgattggattatgttaatggaaaattactttgattggtctgttatgcctgaaaatagaaaagtttgttttgtgaagacaaagttgaaaggagcaacacatctatggtgacataatattgagaatcaactttatagaattggacaaccacctatagacacatgagatgagataaagttgaagatgaaggagcactttatcttagctgactatgaacaacttatgtacacaaaattgttttctcttaaacaaggtactgagttggttgaacaatatatggaagaattccatgagttgggcattcaaaatcaagtgggagagagtgaggctcaacttctagcttgttagaaagttggacttcgaatggagatttagcttgagatgatagctgagacatttatactgtagatgatgtttatcaactagcccttaaactagaagaagggctcaaatttggggcttccaagcatccaagttcacaaattggaagcattttctctaaccaaacaatgagcaaactgttaagcttaacaaatttccaaacttctaatcatgtgcatgttgggggtagtaatcaacatgcttcgaatgtgcctaatagagatgctaatgaaggtaaaacttcaattagtattggaaataaaaatgtaggcatgacttctttaggctttaagtgtggtgggcatggtcattatgttgttgtgtgcttaagcaaaggtttatacttttgtgttgaagagccagaatctaaattggaaaattattcgaaggaagaggagactcaaaattaagatgaatttagcaaagaaagtgattactatgatggtatgatagaaagttatagtcttgtaatgcaatgtttgttagttgtctcaaaggtgacaagagaagaagattagcagtgtactagcatttttcatatatgtatctattgccaggggaggttatatactatgatcattgatggaggtggcggtttaaacataacttcacaagagcttgttgagaagctaaaccttaaaacaaagaaacttccaaatctatttggagaagcatgattaacgatacctccattccaataagttttcgttgcctgtcacattcttttttgactagggctttgaagagtttgtatggtgtgaggtcttactaataaaagtgagtcatattttgcttgaaagaccttgtcttttgatataagggctcaatgtgatagctaagaaaatacttagactctcatacacaatgggggtaaggggatccttcgtccaatgaaagaagttctgatagttaagaagtcaaaggaggccttatggaatatccttgatgaattttctgacttgtggcttgtagaattacctaataaacttcttcttatgcatgtcatacaacttaccacaagtttgttgatgacacaattattttgaaaaccactagtttgtttcacaatattggaaagtcttttgaagtttggtacttgtcttgcatgaaattgatgaagtttaagagatcttgagatcctatcttattgtggtaagagtcaacgaagaaaaaattgcttaggatttcaaaaaggtggaagacattgcttaggatttcaattaactatggacaatcactaaaacttgaggttaatttttttttcaagttgggggaattgatgagggtggacaatagtattagttgaaattaaattgagattagtattaattagaattaaatgaggattagtatttatcggagtcaaattaggaataactaattgggttacaggagaattaaattagagtcataataagtgagaattcaagtagaatttgggtttcttacaaaacctatcgataaggctaatggatgtaaatcgaagtattgattgatgattaaataatgctaggttttttgcaagtgttgcaattctcaatggtaagagtccattgattttcttttaggtgaaactctaagaaggctttagtgagattctaaggtttccatctctttttcttttttatcttctttctctctatattttttattttattttttgctactataaactttatcccttattcctttccttaaccctaaaagataaaaactctgactcacctatttgattgtaggcaaccatcttagggttgtcctacattagttttagtaggaaatgcatatttgcatttttttttttataagtaagagaatgtattaaaagtgcaaaaaacacacaagagtacattggaagtatataaggaaatgcatatttgtattggtattcaacaattggatcataggctaggtaatgggtagtggctaattgggtcatgatcaatgtaaagaaacttgtctaatgatatgaaattaagattataccagagtttaatttgattatagtttgtttaaaattaattataattcattagaatacaattatatgaaccatgtgaatttagttttattgtttttagcataaaatgatattacaaattaataattacttatatcaactttaaatcaaaagttataattaattttatgaataagactaaaaataaatttagcataaagtgatgaaataaaaaggtttttaattcttaatgttattatagatcattttaaacacatatttttataactatttaatcaaagttacacataataaatgtttgttttgttaattttttagtctatctaattatatttatttatttttgatcaattttatgattttttttagaattttttgagattttaagttagcataatttgcttatcgtctgatactaaattgaaatgttgagacctaggggtgtcgataaggtcatttcatggtttttggaagaaaaactgattgaaccaacataatctgttcatgtagcaaagacccaaacccaacagatttgcattggacaaccaaaccaaagcaagccctttggggtcggtttgattcggattttggtggatcagttttttttaataggtaaacaagagatgcattaaaagcaccaaaaaggaagcgcaccaaagtacataggatgtatacaacggccgccaaaagatgaccaaaaaacaagagggaaacaaaaaactactccctcccttagtgaggaccccatcaatcgataaagtcataaagggacatagggccaatttcaagacttatttttagcctctggcctaattgaattttaaagtaaatttgtatttattttgagcccaaagcccatttaatttgggtttatattaaggacttcttgcatctcttgttattaatcccaaagcccattttaatcttcttcaccaaaagtccatttgaatcacttctttaaattgaagtggcctccttatacgtttgttcgagatgctgttttgctgtaaattggtgaaacatgaaaaagtggattaagtaatgaaaaagccttttctggctgactggcagcaataataatattgagatgaccaccaatagcaaaaaattctttaaatgcctaatacaagcattgcaaagataaaaaactttcagctcatgcaacactttgaaaaaacacacattacattaatggcaaaaaaaaaccctaaataaaacatttttaaaaaatgggtaaggaaggtacagagagaacaaattgttcactaagattaccatgctgatcaccttttgagagggagacaatgagggcaagaactatcatggaaagatgtgagcggagggatcatggaaaaagggatagcaagagcatgcttgatgcacttcaaaaccctagcatagatgaaagaaccttaatcacaaatagtgccgaccatcggcaactatgatccctttctcatagaccattggagatgatatgtgcctcatgcatttttaatttttgccgagtggaggggtgagattgaaaatgaaacagcaccatggatgagagatgagagaaacagcataaaaaatgagagactgagatgtgagaaggttggcacttaaaaggatttactatttgcttcaagacggataccattttacatggggtcagcttggttccatttcttattattattttttattcaaattgaaccgattcaattggtttttcaatcccaataattgaaccaaacattattatagttcaaaactgacgcgattatgttggtttggatttgtttgggtcaatttggttgattttgtgattatcacttacatgcctactgagaccaatgagccttaggacctcttgagtcaaggactgataccatgactttgaatcatgtggatgattggagaaacatcaggataacgtgttttagtgtatggcaatagataatgtttcagatttcttctttgggaggaatacagaaaacattaaaattctgtaccgcatttgaagaaaaagagtgaattggatggagcatcatgaagaccctaagttaatttgttcaattttctgatactaaacttaccgtttttcttattcttaagcctgaataacaagacctttttatgccactggaaaattattggctattttctaagatggtaggtaataagtttgcattcaacatttttattgtttgtttgacttggttatctgtcatcaatttttcattttctcattgcagacaattatatgtgaaatgtcatggcttcttgtgcatgaattgatgcttatcttttagtgtattgctaggattatattagggatcccgacaggagatttgctgc

SEQ ID NO: 10644 - DNA, 760 bp, Vitis vinifera
  Intron number 13 from transcript GSVIVT01020844001 (locus GSVIVG01020844001) derived from phytozome v7.0 (chr-ID chr 12; pos 1166836 to 1167595)
agaaaagttctcaaaggagaagagaccaccaattggtaagtgcaagttctagtttaattttggcaagcaagtagctgatatgagtatggcctcacctggtttaaatatatttgactattataagtctgtagagttggtctttaaaaagattaaatttggaggtaaaacccaaactcaggcttggtaggtggttcttcgaaagattaaaatggaagtaaatccaaaatttggcatgaaattttttggacctgatctgataggatgatctatcaaattctaaccccaaaatcaaattatttgttactggatgtctgatccctaccaacccctgaaagaaaaagaaaaagaaaatggaaaaatgagaaaagaaagagagagagggaaagattgtaattttgtgtacaaaaaagatgcacagagattgcaattctgtgctgttctttgtgactttgttttacccctctctcacacatcaaataggttatattggtatcaatgataaaatctggtttctttacgttgtttatggcccttgctttctctctctctctctctcacacacacacacacaccaaatgggttgttggtataatgataaatctggtttctttattctttgcaaccttatctgtaaaccacttaataatgaccttttgaattagatttaccgttttctctgcctctctcctgcagtactgataaactgaatacctctgtatttatcaaataggttatcggccttttgtggaggcttgcattg

SEQ ID NO: 10645 - DNA, 8716 bp, Vitis vinifera
  Intron number 1 from transcript GSVIVT01015733001 (locus G SVIVG01015733001) derived from phytozome v7.0 (chr-ID chr3 ; pos 16584545 to 16593260)
cggtcagaacgtcactgtccactgcactggatttggtttttcccttctcttgtctctcgtctactgttgtttgcttgctgagaaagtattgatcgtgtttagtgttgcttgctttctgatgaagtaaaatgtttttttcgctattttttttaatgattcggaatccatgaaatcacaatgttcgttcaattgatcataaaaggaagacgaagctattccccgatcggcgaacctgcttctgtttcctcatcagacaaaagtgttttgtttaaagtaaatacataaaattaatattttgaattgctgaagaatgatctaatttgttaaataatactatggtttctaatgcatttgggaattcaaaagacgaggggtcagaaagaaaatgagaaaaagcatgaaataggagaagaagacatacttttctcatagaagggtttgattaacttcttgttttaagtgcatttgccttttgattaacttcttgcatcttatgggcgaccttaacgcattaatgaatatctttttatgaaccttttgttcgggtggttaggaatccccttagggaaggggagactacccttctaatgggaagcaatattcagcaagaatagtttagtaattttagtatttcatagttttagttcaagtctgatttttatttgttagaattgatttcagttgtttatttttgtctgatttttattgtttatcttttattaatatttctatttattttgctttataatatgataaataaaaagagttatattcctactggaaataaaatcttagtcttattaggagaaggagttccacaagtctatatacacctatgttgtcttttaattttagtgaaaagaatttattgagaatttagtaaccatatagcttcttaaaggtgtgattttgcctttctttggtgtgattacttaggaaacttggtgtgattgttaaggatgtatattcttttctttacacctaggtgcatttggtatgtgagaataaaaatggtaatggtggtgaatcataataccatgtacaatagagaaatcaaaatcctagatagaaggatatttattttcaataacaatgaattttttactcctattcccattatacaaaaacaatccaaacacattaatgaatgagcatagaattgattttccattcccattctttactcttaaccttcaaaacgtggcctaagtgtgattgcttagaaatccctaggggtgcatttggtataaaattcattattatggaaatcagaacacactcatttaaggattttgatttttttcttctacattgtatgctaattcacctccattctaatttttactccatttcctattcttaggtactaaacatactctaggtgtaattgcctaggaatcttggtgtgattgcctaagattcttttttcttttgtcatctttgatcctttatctcactatacagcaaaataagatcttctatagtgctagaaatataaagaacctgcataaccttggtagagtttttttgggctgtccttaagatgaaggcttcatcttctcttttatttgttattttgtttttggagtaatccacgtatactttccttgtaccttgttgcacctcatttcagctcttttgaagttaattttgacttatctatcaaaaatgatgaaaaaagaaggagaattcagatagattacccaataaattgaaggcttgagggataagtcatcacaaattttagatcttgatgcatagcattctggccatgcatttttaggcaagtaagtgctctttgtaactctataaagaaattcctttgaagcttctcaatttttctagaagttgatctaggaatcaaacaaagggagagaaactaatgagagagagctaagagctattatgtaatcaagactcaatgcatagctccttcttgtaaggaaaaaaaaaagtttgtgtggagaaaaattgtatttatcattcatattttaaaagtatacaaccctagaattacgtgcgacaacaaaaaagaaagaataagaaaagaattggaaactaccctattaaatatttatacaaataaaggattatatacataattataactataatatataactatggaagatttacagctataataatcttcatatacagttgtgtatatgattgtaataatcttcatgtatagttgtgtatatagttgtaataatcttcaatactccttttcaagttggtgaagagatattatccattcccaacttgataatgatttcttgaaattgggaattgattgatccttttgttaagatgacgactaattgacttctagtggacacatatggtgtgcggattaagtcactatccaactttttcttaatagaatgtttgtttacttccacatgtttggttatgtgatgttgcattgggttataatcttgagccaaagcaactcatagattccttgggccattgcacgaaactctgctactacactagatctttcaacaacattttgtctcttactcctctaggttaccaagttctctccaagaaaagtgcaatatcttgtggtagacttctaattaataattgatcttacataatctgcatcagtacgagcctccaatgatagctcagtgcttttcttaaacaaaattcattttcttggagttgcttttaggtagtataggattttgtatacaacctgtagatgaacttcctttaggttatgcataaattaactcactaggctaattgcataggttatgcttggtcacatatgtgagaggtggatcaacctaccaaccgatctctggtacatatacttgtctatggctgcatcctcacttgcttctccaagcttgtgattcaaatcaataggtttgtcagctggtttacatcttgtttttcctatctcttgtaataagtcaagaacatgcttttgtggggagacgaaaattctcttttttgagtgagccacttcaattcctaagaaatactttagtcttccaagctcctgtatttcaaactcttttcctaagcacaatttcattgcttctctttcttcaagatcatttccaatcactattatatcatccacataacctagttgggcagttactcccattgaggttgagtgtttaacaaagaaggtgtggtcatcgtgactttgtttgtagccaacgtttatcatgactttggcaagtcttccaaaccaatctcgcggagattgttttagtccatacaaaactttcttcaatttacatacttttttttccttccaagtgcatattaaaatcaggtggaagatccatataaatttcttctcatagttttaaaaggctcaaggcgcaccaaggcgcaaagtagtcctggagcctgaggcgtaaggcgcacctaaggcgcaggctttagtgaagtgaggcggaccctaatttacttatatattttctcctattttcccctatatatatatatatatatatatttttttttttttttcctcttcttcttcacttctccagcacggctgaggctagggcacgattgggagtggtctcgggttgagaaagaccaaaaaaaggggctggaatggaggaataggctaaaacggtgtcgttttggcttgtttttttttttaaaaggaacagggtccaaaacgacgtcgttttggacccttccttttaaattaaaaagggccaaaacgacgccgtttggtcccacaaattaaaaaaagaaattagggctaagagttctgcagcccgacgggaggaggaggaagaggaagaagaagaagaagaagaagaaggagaaggagaaggagaaggagaaggagaaagaggggtgcgtacctggtcggaccgtcggagacgactcaggcgagcgcctcgcgccttgcgcgcctaagcggtgccttcctgaaggggcgtcgcctgccttcaggagaggcgccggagggtggcgtcgcgtcgccctgagcctaggcgtgcctttcacaactatgtttcttctttgaactcttaatgcaaaaacacatttttcacatcaaactattgtaattcctattaaaattgggcagctaaagagagtaaaactctcatagtattcatcttggctactgatgcgaaagtttcttggtaatctactccatgtgtttgaatatagccttgggcaatgagcctggttttctatatttccagagaaccgtccaccttgtactttactatgaattcccacttgtaccccattggactcttctcacttggtaactcaacaacatcccaagtcccattcttttcaagtgcttccatctcagctctcatgacttgtttccactccttgccatttggtgcctcagatgaggtcttaggtatggacatggtgtttaggctggtgagaaattttttataagatgatgattatctttcataggacataaaatgggaaagtggatatagaaggtgttgagtacatgttcttgtgccttttctaattgcaatgggcagatttagatcactaatatcaataaaatcaggagaaatcttaggagaaaatgtatcatttacttcataggaagtggtcgattctgactcttggacttgcacaagttcagtgatggttgctttcttccttgagtaaaccaaagttggccttgtagaattggaaacttgtttcctcgaaagtggacttgtagatttaggaatttgtgagtgcccatacacaaatgattgtgattgtgaggctttagacacaaatgggggcaagtcaagtaagaaaaaatctcctatatttgtattttccatgaatgatgtctctccttggagataaggatgattgaagtagctttcatgttcaacaaaggatacatcgtaagagacataaaattgtcaaatgggtagatgataagcatttgtaaccttttgagtagatgaatgccccacaaaaatgcacttaattagatctaatttccctctgttatgagtgtggatatggataaaagaaatgctacaaaaacccttttgaacaagattggtagacattgtaaagtttgggaagtattttgaaaaaatttccattggtcttttgaacctccaaaaatctagatgaccactgatttataagatgagcagctataagtactgctttcccttaatatgatttagaaacattttttctgaaacaaaaaagctcttttaatagcaagaagatgaccattttttctttcagcaaccccattttattggagagtaatgcaagatgattcatggataataccttcttgttgaaaataaggaaatatgacttgattgaagtaatcctttgtcttatcaggcctaagcttcttaattcccacttcaaattgagttttgactattttgtaaaaattaggaaatacaacactcaaatttgatttttgtttaaaaagaaataaccaagttactcgaacacagtcatctataaatgaggcaaaaaacttgaaatagtaggaattgttgtaggacctcaaatatcattgtggactaatgcagaagggattgaaactcttttgttacttattggaaaagaagcatgacggtgctttgcaagttcacaaatatcacaatgtaatttttctacatcaattccttataataaaggaaacataattttaagaatgccaaatgatggatgtttaagacgatgatgatgaagccaaatcttatcttttgttgtggatgggattttagaaaggaatggtaagtgtacctggttctcagtcttgttttgaccaaacggtagctcaagatagtaaagcccattattttccctagcatgtctaatcatctttcccgtacccattcctgaaatagacaatgacagggataaaaattcgtatgaaaattcaattctttggtaagttaatgaatggaaataagattggtggaaagcttaggtacatgtatcacattcttcaaaactatggatttattcaggtaaacttccccttgactagccacgatggctagagagccatcagcggtggctattttccatttctaggacatgggctataggtactcaatttttgtgaggaatgagtcatacgatctatagctcttgatttgatgacccaagagcttaggaaagacatatctgagacactaaaagtaagagaagagattcatctgactgagtgagagagcaagcaccactaggactcttaagggttcctaggagattctttaatttttcgatttcttccttgttaagctcaaaatgttcattgccaatagaattcaccctcttgtaaagggttttcattgatttgagagttggtgaagggtgcctgcatcagtcccttgtgtgtctcggcctcttgtagtagttacaccaaatagtgtccttgttcattgttctggacaagtctgccgttgatagaggattcacgttgttggacttgtcaacaatctcaaatatggtgggtagaatttggaaataattttagagaaaaatatagcagagtgcctttgaatggcaatgaaggctgttaaactgggtttcaaaaaacagaggaaagagggtactacaacttagtaataaaggttaaaaagaaaaagtcccaaggagcctaatttagctctaatgccacgtggtgaagaattatacttctcattcatattttaaaagtatacaaccccagaattatatacaatagcaaaaaagaaagaatcaggaaagagttggaaactaccatattaaagatccctgcaaatcagggattatatacacaaatttacacagctggatattcacacacacagaactatatattacagctgtaatatacaactttggaagatttacagctatgcgtacaactgtaataatcttcatatgtagctgtgtatacaattggaataatctttaacaagctgtaataatcttcaacagtttgtgcctgtgcattgggcacgtattaaaagcaactatgagtttctcacagcatgacatatattaaaaggacaaacatggtgaggacattgtaagaaaaataacacactggctgcaaagaatttttaatttcgaggacaaagatggcgaaaacattgcaagaaaaataatttactggctgtagggaagttctaattttcaaattatattgcattcaaattagtttttagaaaataaaaacactgcaatttgaggtggaaagtagtgttccaagtttattatggtaggattgaagtcaaataagttgtgtatgaggtgctttatgactctttgtgttcttatagtcgtttgtattcctagtgttgaattaggtcaatttggaatgttttatttatcccattttatttttatttttgttttatttatttaacttatatccttcttgatataccagctatagggaagatctaattcaaattatattgcatttataattagtttttagtaactgttttaagttgattacttcaggatttaagttaaataagcagttgcatatgaggtgctttacggctcatgttttcttattgtggtttgtattcctactgtgaagtctaggtcaatttggaaaggggtgttttttttgtgtgcgcatgcttgcacgtgcactcgcacttctgtgtgcatgtgttctcctggagccttttgcagtctacttaagaaactagggctgatctttgtttatttagaatgcatttggtctaggtcataaactgagggcattgaatgctgttctccttgggaggtgttctggtcatttaaaaatgtgttttcaaggattaatactctctcttggtcactttctttggagtcttattattgctaagccttctttgttccttttatgtttaaagcatatttggtctatgctatactgattatgattaaattataatcattttcaagttactgcagtgtgacttaccttgatacttcggtttatgttctataaatagttactttccatgtttctgcagcctgaaactggttgagtgacaagtgtgaacttttcatgctattatagcagagtgactaaatgagggtttttatgtcttttggagttaatttaccaagtctaaataaaagttttgattcatggactagggttaatgataaatcaatgaaaatatttttgaggttggttaaggattgatcaatgaccattttactgctttgaagctcttggaaggtgtgattgccttatttctaaatgcgtgtagggagccggaagtgtgattgactatgtttgtgcacatccttctctgtcttgttctgctcctcttattgtcttacccctctctctctctctctctctgaaaattaaccgcttactatttgcgattcaaaccatttgccaaacccctttaagattcatattgaaccttggttcatttgaaaattatatgggcatccctaggagctaaatagcaaaacttaagttacttgacactatattggtgtatgattatttttttctcctgtgtaagttgggtttaatatacattatttttttctacctagaaaaccaaccccatgaccagcccacaattcatgggtcaatgcatgattttgaaccaaaaccaagaccaagattatcccacagtccaatatccaactatatattattgatttttggtcaggtggtccttttgttgcatttcagttttattattttgtgctgccctcatttttattattattattattgttgcaggaaaaa

SEQ ID NO: 10646 - DNA, 16213 bp, Vitis vinifera
  Intron number 15 from transcript GSVIVT01021607001 (locus GSVIVG01021607001) derived from phytozome v7.0 (chr-ID chr 10; pos 7965159 to 7981371)
ccaactagcccttcgtagtcttcgatcactggggggtgggtatattattttgtgaaaaatttcaatactgtagttccattgctgttctatttcagtagctattagctatattttcagattcgatagtgaaaatttgtttgctctatcgcaatattaattgatggtaagttgctattaccatgcttattagtatgcttattgcttgtttgcatgtgcatttggactaacaaacaagctgggtgctgctgtcccacaggaaacccccatacacaaacaccactgacctttgcaaatagtagtcttaatatgggaagtacctatatttccgctggaaacttaaatagctactaactttaggatttaaacatgatgcactaagcatacgtgaatacatgatgaaggttactgctcatgtgtgtgcatgtgcatatgtgtatgtatttgtacacatgtaagtatagttcttggaaatagtgggaatgcaagatcatttagaggctgtggttattttctattgttgcctttgctgaaaaaaggacaaaaaaagggaaaattttataattggaggtgaaacatatgagctaggaatttgcaaatttgaacttagaatctaaaagatttagcagacttagcgtttttctaatcatttatggttgtacactacaagtacttttttctttttcttatttttttggatgacataattatcttttctagcacggatgaagagtggtttgatgactttgaagttgttcttcctgtattggcagtggtgtctggtctcaaaccatatgggcagatgctatttagttcgactctttattttggttctgatcaaccagtgagattagcctatattttttgggattcagatcaagagcttcatgtccttatggggcaaattacatagatgcaagctcgtttagtgtgtatttcggcatattgcctttccatctttaaaatgccatttaaagtagaatttagaagtggaaagggattgataagattaaatggtgtatctcaaaacaagattctcagtgttagcgaacagtgttgccgctgacttctttaaaagctctgtgggattgatgctagggcatcgctcttcctacttatggcattgtggctatcaattgttttttaagaagggttgaagaaaggtggtttaatatcaggtttcaaagtgggaaagaggggtggtgaggagatggaggtgtcccatcatttatttgtagattacattctcatgtggtttggcacagtgtctaggttgaaaattaatttggaaaatagtgtgttccttctattagagtgagtgcgtagtgtggtggagttgactgctgtgtagggcatggggagggggagggtgagctcctcatcatctctacctaggccttatgttggaagccttctttaagttgttaatggtctaagatgtgatgaaagaatagatgtcatgcccaaacttgtatggtgttgtcttgacatgggtacatcaagggagttgataccataacagctgtggtcgttatcgaatgtgaaaagatgaagtgcaaagttgaaaggattattgtggagaaaaagtattatcaggtagagtttgaaggtttgaatggtggaacttgggtatcggtaacagagaggagccgaggtttcgtagtttcaataggatttgacatggaggagctggtttggttgatggagcatttgaagaaagctgtggaggtggaggcttctaggggttttgtaagaaagatcaggggcaagactaagaccctcttgatggagatatgcttcaataacagagggaggttcatgaaaattacagaatttgttacaaaaaggaaacctttagtacttgtcgtccccgagggcgtcaaagggaaaggatgggaagatctcaggaaggcgatcctatcagtgcaagagtattatgaacgagacggaggagcttcgaaggagaagaatggtgatatccggatgaatagggacactttcagaggaggaaggtcatacgcagaagtggtggtagaggctggtttgaggactggaggtacgttgtcagctggaaaatgggccagagctgtaatatgtgaaagccaagaagaagtccaagactggactcacgaaggaagagccattgcgaggatgatggggatgaaaggaatggtgtccataaatcccatttccgctttcaaaggatgcttctttgtgagtacaacaaggagagcggaaagtgttcatgatcagggaagaatttcagtgaaaggaaggacgattctgctaaggaaatggtcgcccaaggaaaacatggtggttcaaggaaagttcaggaggggctggctagtattgagaggtctccctttccatttgtgggatgaagttcagttgaatttcattttgaagaaatgggggagggtaacgaaggtggcaaaggaaactttgaagctggtggacctgacgagggcgaagctgtgggtggagatgcttccaaacgtcgtgttaccagcgttgcttgaggtggaagatggggaatggtcctatacagtagcagtttcagtcaccggagaagatgaagatgctgacgttgtcatgtctgaggtaaaccgcaacaggaacgagtgggtgagagtgggaggttgcgtctctcagtcgtcaaaagctgcagaagggctacgaggtagcgttagggacattgagtgctacagtaagaggcgtcttccccgggcacgttatcggcagtcaaggacgtgtttggcggacaaaggggagacaggagggagatggagcagatcgggccaagctgaagcaaattttattgggccagagcatgagtcctcttttatagcccaaaaggttagggcccaaagtgggatgaggcatcgtgggcttcaagatggcccagatgatcctcaagcccaccagtctgcatcggcttcgcccctttctccccagtgagctgcttcttctacaaaggcgatcgcgacgctctgtccagacggtgcaagggccggcgccgaggttttcttcggagaagaaggtcgggccgttgagctaaaggcccagtcccttcccaactctaggccattgtcagacaacatcgtgggctgtaactttaaaagcccgtcggggttgggccaaaaattaggaggaacgaagccctctggtatggaagcatggtcgcgaagggaagaaatcgaagcgaggaaggggaaagcccccgcggttcacatgagagacactacgcaggagaaagagacggcaatttcaaagaaggcgtggtctaccctcttccctccaagcgccgatcgacgacagggacatcggtgctgcagtgagcctattttcacaaggggttcgtcgtcgtcaagggaagaccgcaacatggaagaggagtttgggatgggctttcagatggagcgaggaatcagagtgaatcctctctccagatgtcctctttctggtaagctttcgaaggaggacacctcgacgagcagcgttgaagtcaaaggagggctaatgggacgagtggggtttgatcctcgtggcttttcagacatgggctcaccttctatttcaataatcagaggtaaaggactcatctttgaggggttttgcgaaattccgggagccaaaaacttggaggtatgtcagccctctccttctcagccacccgagtcactttcttttccttcctgtagtccggattctcctttgacgaatccctctggtccaattcttcccaattcagtccctcttcctcagtctcctacggaaaaccaaggcatctcaaaatttttttatgaaaaaggtggtgttgacaatttaaatcatggtgacatacctgaccgtgttgaggaggagaaccagtgtgctttatctaaccagacgtcagagagctgtatccctaaggattctattgtcaggtcgcataaggaggtttcgggtgatttcctttttgatggcctgtctcccgggaaaatggccaaagtgcaagaggtattatgctctctagacattaaggtgtattctaggaggaagagcagaggccccacagggcattgagacatgttggttttagctcggaaggctagggtctttgtattttcccatgaaaattatcagctggaacgttaggggtttgggttcaaggaataagcgtaggatggttaaagattttcttaggtcagagaatccggatgttgtgatgattcaggaaacaaaaaaggagatttgtgatagaaggtttgtgggtagtgtctggacggtcaggaatgaggagtgggttgctcttccggcgtctggggcatcaggtgggattttgatcatctgggattcaaaaattatgagtagagaggaggtggtaataggatctttctcggtctcagtcaagttctctttggacggttgtggacccctttggatttctgctgtttatggtccaaacagtccctcacttaggaaggatttttgggtggaactttttgacatttatggattaacttatccgctatggtgtgtgggaggtgattttaatgtcataaggagaagctcagaaaaaatggggggttctagccttactccaagcatgagggactttgatagttttattagtgaatgtgaattacttgacccacctcttcggaatgcttcattcacttggtcaaatatgcaagagtctcccgtgtgtaagagattggaccgttttctctactcaaatgcgtggggctgctctttccccaaggccttcaagaagccttaatcagaaggacatcagatcattggccaattgttatggatactaacccgtttatgtgggggccaacaccttttaggtttgagaatatgtggttacaacacactaatttcaaggagaactttagagattggtggagtgggtttcaaggaaacggatgggaaggtcataagttcatgaggagacttcaatatgttaaagctaaactgaaggagtggaataagttttcttttggagagcttaaagaaaagaaaaaaagtattctcaatgatttagctatctttgacgccattgagcaggaagggggtctcaatcctgatttgataagtcaaagagcctcaagaaaaggggagctagaggtattaatattgagggaggaaatacattggagacaaaaaaccaaagtgaaatgggtcaaggaaggggattgcaactctaagttttatcataaagtggctaatggcaggcgaaataggaaatatatcaaggagttggagaatgagaggggtttagtgctgaagaatgccgagagtatcacagaggagattttacattactttgagaagctttacacaaatcctacaggagagtcttggggtgttgaaggattagattggtcccctatctcggaagagagtgcgttaaggttagaatcccctttcaccgaagaagagatttctaaggccatttttcagttggatagggacaaggcttcggggccagatggctttactattgccgtattccaagagtgttgggatgtgattaaggaggatttggtgagagtgttcgctgaatttcataggagcggaattatcaatcaaagcactaatgcctctttcattgttctaatacccaaaaagagtttatcaaagagaatatcagactttagacccattagtttgatcactagtctctacaagataatagccaaagtgctctctgggcgtctaagaggggttctatatgagaccatccactatactcaaggcgcttttgttcaagggagacaaatattggacgcggttcttatagcgaatgagatagtggatgagagaagaaggtcaggggaggaaggcgtcgtattcaaaatagactttgaaaaggcatacgatcacgtgaagtgggattttttggatcatgtgttagaaaagaaggggttcagtcctagatggaggaaatggatgagtggatgtttatcttcagtatcttatgcaatcttggtgaatggtagtgctaaagggtgggttcaggcatctaggggattaagacaaggcgaccctttatccccttttttgtttactttagtcgcagatgtactgagcaggatgctcatgagagctgaggaaagaaatttgatggagggtttcagggtgggtagaaatagaactagggtgtcccatttgcaatttgctgatgacaccatattcttttctaactcaagggaggaagagctgcatactctgaagagtcttttgttagtgtttgggcacatttctgggctcaaggtcaatcttaacaagagtagtatttatggcatcaatcttgatcaggctcatctttcaagattggctgagatgcttgattgtaaggcgtctggatggcctattctatatctgggtctccctctgggcgggaatcctaaggcgtgtggtttttgggatccagtggttgagagaatctcaagtagattagatgggtggcaaaaggcctacttatccttcggggggaggataactcttatccaatcttgtctttcccatttgccaagttacttcctatccttatttaaaatgcccgcttcagtggctgcaaaaatagagaggttgcaaagggattttttatggttaggggttggggaaggcaaaagggatcatttagtgaggtgggatattgtgtgcaaaccgaagacaatagggggtttgggtttggggaatatttcttggaggaatctcgctcttctagggaaatggttatggaggtatcctagagagggttcagctctttggcatcaggtcattttaagcatttatggttcacactctaatggttgggatgctaacactttagtcagatggtcacatcgctgtccttggaaggctattgctcaagtcttttaggagttttctttgattactcggtatgtggtaggaaacggggatagaattcggttctgggaagatttgtggcggggggaccaacctttgggaatccaatatccaagactattcagagtagtcgtggacaaaaacatttctatttcttcagttctcggtccatctcggcctttcttgtggaatttgaatttccgccttaacctgtcagattctgagattgaggacttagaaggcctcatgcggtctcttgatgatttgtatctttctccttcggtcccagatgccagattatgaccattatcctcttcagggcttttttcagtcaaatccttttttctagcattatctcaatcttctggatcttctcagaactttccttcaaagttcgtgtggaattcccaagttcctttcaaagtgaagtcctttgtctggttagtggtacacaagaaggtgaatactaatgatatgttacaagtgaggagaccctacaaagcccttagtcctaatatttgtatcctgtgcatgaagcacggggaatcaacagatcatctatttcttcattgttccttgacgattgggttgtggcacaggttatttcagttagctaagatggattgggttcccccaaggagcatatatgacatgatgtccatcaaatttaaaggcttcggtaattctaagagagggatagttttgtggcaagctgcgagcatagctctaattcgggttgagtggtgggaaagaaacgcaaggattttcgaggataaagcaaggaattcagaggtccttgcttccctttgggctttctgttccaaggcatttaaggggattccccttaatgtgattcatctggattggatagcggtgtgtactccatagggattggtccttagtgggtgttcgtttgttttatgtgtattttcctgtaatttagttgtctttggttggaggatttctcatccttcttcttgtacttcttttttatattaatatatatttgtggcgtttccaatcaaaaaaaaaaaaaaaaaaagatgtgatgaaagagagattccacaaaaggcttgccttgtgaagatgcacctattaaagagaggtaggctcacatcacattgattatgagcaattttgtctagcttgccaatatattttttcttcatttgtttcttcccaaattgtttaggaaacctaggtccctgggaatcttggtgtgattggttaatgtttattacttgtttttcttttgacaatagttcggaactagaaactatcctaaagtagtgggtgattgtacatcatatttatcaaaatgatgatttttaaggatagatggaggattttggaagcaatatgggatttaatttatatatctcctcctctttgggtgtcaacttgttctatatttccggtgtcccctttgagtattatattgctagattggaaccttgtatggagatctactaggttgattatattgggataagtagaattttaatggttgctccttaggtatttcgggatagctaggaattggaggaatgctgatggatcatcctggaatgctagttaggtcattctataaacaggttggagtgggtttgacaattgaggttgagatactagtattgttggaatgtctgaagctagctaaaattgagggtttttctagtcttacaatagagggatattccaaactgatcctttttgggtgaataagaaagaaaagacctatggagttttgatagtttgacttcacccaatttttgatattgctttagagtttggggtgcatcttttgttgggttcctcttttagataatcatgtggcagatatgttagtaaaacaaggagccaaatattggtctcttttgtagggtattttctaacccccaagtattaactttgttattgtaaccactttcggctgtgcagttgccttttctttttaatccaaatattgatctcttttgtaggatattttcttatttaattgtattatttggaaggaatactttagggcaatgatatgttttttctagtaagggaaaaaagaaaatgacctttgcaattggtggatgatgatgatgaatgggtggacactaacatcgatgagaatgatgatggagccattagatatgatgaccattccttggtagaccctaagtgatggttatagtgccatgagaaaaagttatattttggaagagagaatgagaatctaaattggaaactattgaaaatgacaagcaattcattttttattattaattttttttggctttttctgttattcattttttatgtgactctagtagtactttttttgaggttttttcccctttttcttttgtttgtttgtttgtttattgaggcttacatctcattctgcctcatctcatttagacaactccaatttttattccaacaatgtgggtttagatgcacaaaagatgttctgggtatttcaccatatttagggcttcctttttattttttattttttgggttacgcttctgcttcttttaattaaaaagaattttgtgaaaattagcattggggtttctggatattttgttgctgttgtaaatttagaatataaaacaatttgcagaacatgcccttctttctagtttctgttgcaggtttttcctttctttataatgcattatggagttttagggtgcatttggtttgctgacatctaaaattgggaatggaaatcagatgttctaaaataaatttcaggaatgtaatgtatatgagatttccatgtggaatgcttggttaaaattcaaaatttcaaattcctatcaaattttattcccattatagtgtttggttattgttgaatataatgtatgtatagtatactatctttccttgttaatataggtcacatgtatggtagttaggactcctagccttgtatatatatatctctcaattgtaagtagagattacaatgaatgtgaataaggtttttctcctttctctctctctctctcaacatggtatcagagccaagcaagaaaacctaattctttcctgttttccgtgtcatcaactccgggaaaccttccggtgaccgtgtttctttccggtcaccttccccatctcccaatactttccggtcagtcggatcgtcgttagaaaccactcaccgctggcaaattttccggcgaaattttccggcgaactttctggcgaaatttccggcgacctatttttccgacaccgaccataccagagaggagcgcctggaggagatctccaacttttgtgaaggcaccagcaccaaaagagcagccacgcgccggccacgcgcaatctgaagccgtattagggctctcttcgatccaaacatacttcattctccggataagtggatatggctactaaagcttccattttttcctctgtcatatctggatctcctatgattacttcggagaaattagttgggagtgaaaattatctttcctggtctgcctctgttgaactttggtttatgggtcaaggatatgaggatcacttgattacacaggaggcagatatccctgaggttgaccgcgtacagtggaggaagatagatgcacagttgtgtagtgtattatggcaatcggttgatccccgaattcttcttcatcttcaggcctataaaacttgttgtaaattttggactcaggccaaaggattatacacgaatgatatctagcgtctttataaggtggcttctgctattgtccatctcagccaacaggacttcgatctatctacttatattggccagattgcctctcttaaggagcagttcttgactgtgatgcctcttactcctgatgttggggctcaacaaacacagcttgacaagttcttcatggtccttatcttatcggcctccgtccggatcttgagcctattcgtgatcagattcttggtagttcatcagttccgtccttggatgatgtgtttgctcgcctcctccgtatctcgtccactcagactttgtcatctgatagcgcttcagattattctgtgttagtttctcaaactacctctcgaggaggacgcagtggtacccgaggtagaggccaacgtcctcattgcacctattgcaataaacttggccacactcgcgatcgttgctatcagttacatggaagaccttctcgcactgcccatatggcccagtcctctgattctccgctgcctcagcctccgagctcctccgcatctcagacatctcaggcttctattgcctctgttgcccagcctggtaatgcctctgtctgccttacccacacatcttctcttggaccctggattctagattctggagcatctgatcacctatctggtaataaggatcttttctcctctattactactacctctgatttacctactgttaccttagctaatggttctcaaactgtggctaaaggtattggtttggcccttcctttgccttctctacctctcacttctgtcctttatactcttgaatgtccttttaatcttatttccatcagcaaaatcactcgtactcttaattgctctattaccttttctgataaatttgtgaccttgcaggaccggagtacggggaagacgattggcataggacgtgagtctcaaggcctctatcacctcacctcagattcatctcctacagtttgcatttccactgatgctcctctcctcattcacaatcgtttgggccaccctagtctctccaagttccagaagatggttcctcgtttttccactttgtcgtcgcttccgtgtgagtcatgtcagcttgggaaacatactcgtgtctcgttcccaaagcgtttaaataatcgggcaaagtctccttttgagcttgtccacactgatgtttggggtccttgtcggactgcgtctactttaggatttcagtattttgtcactttcattgatgactattctcgatgtacttggttattcttaatgaaaaatcgagctgagttattctctattttccagaaattttatactgaaatccaaacccagttcaatatttctattcgtgtgttacgcagtgacaatgccagggaatatttttcagcccaatttacttcgtttatgtctcatcatgggattcttcatcagtcttcttgtgctcatactccccaacaaaatggggtagctgaacgcaagaatcgacatcttgttgagacagctcgtactctcctcctccataatcatgttccttttcgtttttggggggacgctgttcttaccgcttgttatttgattaatcgtatgccctcctctgtcttacacgatcagcttcctcactcccttcttttccctgaccaaccactttatttctttcctcctcgtgtctttggttgtacttgctttgttcatattctcactcctggacaggacaagctttccgccaaagccatgaagtgcctcttcttgggatattccagacttcagaagggttatcgttgttattcccttgagactcatcggtactttatctccgctgatgtcaccttctttgaggactcaccattcttttccaccacttctgagtctcttcctgtttctgaagtcttgcccattcccattgtctccccacctgatgctatgccccctcgaccaattcaggtttctcatcgtcgccctcgtgtcgttgctcctctcccttttcctgaggcacctgctgactcacttcctatcccttcggcttcacctgccccggctctgccttctcctaatgacttacccattgctgttcggaaaggtactcgctctactcgtaatcctcatcctatttacaattttttgagttatcatcgattatcttcaccctattctgcttttgtttctgctatatcctctgtttctcttccaaagagcacccatgaagctctttcccatctaggctggcgacaggcaatggtggatgaaatggctgctctgcactctaatggcagttgggatcttgttgttttaccctctggtaaatctacagttggttgtcgttgggtctatgcggttaaggttggtcctgatggtcaggttgatcgccttaaggcccgcttagttgctaaaggctatactcaagtttatggttctgattatggtgacacattctcccctgttgccaagattgcttctgtccgcttgcttctgtccatggctgctatgtgttcttggcctctttatcagttggatattaaaaatgccttccttcatggtgatcttgctgaggaagtttatatggagcaacctcctggttttgttgctcagggggagtctggtttagtgtgcaggttacgccgctctctatatggcttgaaacaatctcctcgagcatggtttagccgttttagttctgttgttcaagagtttggcatgcttcgcagtacagcagaccattcagttttttatcatcataactccttggggcagtgtatttatctggttgtttatgtggacgacatcgtcattacaggcagtgatcaggatggtattcagaaactaaagcaacatctttttacccactttcagaccaaagacttggggaaactcaagtatttcttgggaattgagatagctcaatccagttctggtgtggtcctttcccaaaggaagtatgctttagacatcctggaagaaaccggtatgttagactgtaaaccggtagacacacctatggatccgaatgtcaaacttgtactaggacagggggagcctttaggagaccccgggagatatcgacggctcgtaggtaaattgaactatctcaccattactcatccagacatttcttttcctgtgagtgttgttagtcaattcctacagtcaccatgtgatagccattgggatgccgtaatccgtattcttctatatatcaaaagtacaccaggccaaggtgtattgtacgagaacagagatcatactcaagttgttggttacacagatgcagattgggctggctcacccacagatagacgttccacttcagggtactgtgtttttattggaggtaatctaatatcttggaagagtaagaaacaagatgtagtggccagatctagcgctgaagccgagtatcgagctatggctttggcaacatgtgaactcatatggttgagacatcttcttcaggagttgagatttggaaaggatgaacagatgaaactcatctgtgataaccaggccgcattacatattgcatccaatccagtctttcatgaaaggaccaagcatattgaagttgactgtcatttcattagagagaagatcgcatcaggatgtgttgctacaagttttgtcaatttaaatgatcaactagcagacatcttcactaaatctctcagaggtcctaggattaaatatatttgtaacaagcttggtgcatatgacgtatatgctccagcttgagggggagtgttgaatataatgtatgtatagtatactatctttccttgttaatataggtcacatgtatggtagttaggactcctagccttgtatatatatatctctcaattgtaaatagagattacaatgaatgtgaataaggtttttctcctttctctctctctctctctcaacagttatcatatgaattacttgagaattaatatgaatttacataaaacctcctcaaataatattgagaaaattggatctaattataaatataaaaatgaaaatgatttgtccacattccttttaacttcaatgaaatgaaataaaaaataccaaggcttccatgggtataggattttcccattattgggagaatttcatatctaaggaaattagaacttcctatgttatgtctacctgaacatgatggttaagatacccagaaccaaaatgtagctttatggtattttttttgtctcttcttatttaggacagattcttttagtcttagtccaaagttgtccttgtgagattgtgtggcaggtttaggcctaagggcaattaaaacatgttcacttgaatagaatagcccctgaggcctgacagggatatccttataaactggaaacttgggtccttctgagtggcaactagtatgttggtaacatgtttggatttcatacacaaatcttgattccaatgttacttggagcttgaacactgttatggccgtagacgactcttaaactaattgctacctgattgcaggacttaatctaattcagtgaagttttaatggtgcaactactggagctatgatatcataagcgtttgtgtagttgagtatgagcatggatgtaggctaggattagaaggtttaactttctgtgtgggcatgtctttgcggtgcatttacagtcacttgcacaggcatttttcttttccaaagaatatctttggagcatggagctgaatcctctacctttctatgcatttcaagtttggaacttgtagtgccttttgtcacgcaatttcccactatcatcaagtgtatcacttgaacatgagtcagcacttccttgaaaagtcacctggagctactatttaattttcttatatgctcattctgttcataggccaatctcatctatctcaaattcattggtattgactgagacatgcatttcatgtttggaatacaaaatgataatccaataattttaaactgaaattgtatattctattaactgttaggatttaaactgctaggactttaacatgaacatttatcgtaaagttttcagatgtctagcaactaactatttcatatgattagaatatcctgaaaatcaaataatccttgaattggtttaccatccacacagcagtccttcctctctcatttgattttagatttaggttataccattatagccaagtggcagaaaatgagcctcttttgccaactccatgtagttgggattaaggtttcagggaattgagttattatgaccatatgaagatccacagtgtcacatttgggtgttcaacattgaaagatctaccccttgaggcctgtggctcaagtggtaaagggatggggaggatttgtgggacgttccaggttcaactcccaatggggacaaaaatttgcctatcaaaaaaagaaaacattgaaagatgtagcatgatccattggaaaacgacttgaatggatggacatgatctttaacagtatgtgtatgtgcctgctgaatggctcccatccagatatctagattttcttttttctctctctacctttttcccttgcctgtgtgtttattatatatgcatgttttatatgaacatcatgttcttattatttacctcattatatgtgcagcaagccaagtgcacccaaagaactggtatcctatt

SEQ ID NO: 10647 - DNA, 8635 bp, Vitis vinifera
  Intron number 4 from transcript GSVIVT01003166001 (locus G SVIVG01003166001) derived from phytozome v7.0 (chr-ID chr3 ; pos 6044623 to 6053257)
taacaactcgcaagccacaaactctactttgggtggtgagtgctttatttcatggcaacaatgtttcttttgaacttcagatattttaaccttattcttggacattaatgttgacatggtatttttgatgttttttatcagtctcgtatcaaaacatacagcaattttttcctttttcagtaggttttattcaaagtatagttctcatgggctggtcttttaattctatacttggcaatattgacactagtttgttttctttttttctttttcttggagtggttagcctccaagtagggcttgtttcgttatgattgttttttgagggttggtagctttgtatacttcctgtatgccttgaggctattggccgttttatatatatcatttgcttatcaaaaaaatattgacactagtttgtttcatcatgtcaacatatgcacaaagatccaacttattaccttttgataacaagatcctaccaagtatttggaaggtgcatgtttgtgtgtatatctatacatacacactataatttctagtatatgacttttattatttcttttttcctagcttcatacctttctgattttcttgagtaaccccaataacttggtacctgcctataggatggtgctacatacaccatggcaattagtgattgcaaatgacaaaaaatggtcaacatgcattaaatgcagaagtttttggcacccaatcactaattgctgcctagcaaggtggaaaaaaaatgtgacaaaagtgatggtgcaagtagtattttctctatctacatatgcaatatatgatagtgagcaagcccaattgcacttgacttcttacttcttgctcttaaaatgaggaatatctaagaatatatatggataggaagaagtaaagaattgagttagtgatgtatttttttttaattacaaaaatgatggtttcttaatatttggccctttgcttcacatgggaaataaagttttgtgggggaaaaaaatctttcttacagtgatttctgtagttcataatctaccaaaactagatgggttttaaaatagagaaattttgcaaatgtttagacttaagtaattttgcaatgtttagactcaagttcaaatggtgttaagaagttgaaaaaaaatagaagaaattatggagaaatataattataattccaaatttgagttaaaaaattttggaaattggtataagtaatttttaatttcaaaagattgtaagtatttctgccaaaccatgttaaataagatttggtctatttcaccaaaattttagaaatacatacaggttagtttgggtctccataaatggttgaatttcaataagcttccaccttgttccatccctctaagaaaaaacttctggctttgaccctgcttgtaccagtttatttttattacaatgatgtgagatgtcatccattcttggagtcagcaatttgttttagtgggtatcaatgggagctcagtaagatagattgaccctaaagtctctctggacatatcatcaaacaatattctaacaacaaagtttgtatgggcaaataccaagctaaaagctacctattgaatcctaaaaaacctaaacgacttcttggaaaaattggataataatctttgttccaaaattcctgaattaataatttcttgtagacaatagttggttaattctgaaaatttttcattctctcctatggaatttcaatattttattgcattgtagctttctattgattataataatagatgggacactatggaactcaatacagaatcccaatattccaagtttttatgataatttttgaaaagagagaaagatttctgaatagtacttgtatattcactgggtatatttgcaacctatttattatgttttacaatgagaaaaggaaaaagaaattaatctattctaggcctaaaattactcctctaaatcagttgctaatttgaggaaataaatcagttacttaatcgatctctaattacaagaaataaatcaggaaataagtcaagtcaattgtatagtaaagaaaaaaacaaatttcaatcaaatccctacctgtttaggttgtataatttggcaattactgcactgatttccaacacttctaaatctggtaagtaaatgttcttcccctagcttgtttgtgataaattggaatggttgagctgtaagtcccctgagtattatgtcagctaattgtttttattttttattttttaaaaggatatatggggggtgcatactttgatgaattgatgataaacttcaatgtgcttaatttgctcatgttgaactggattgtgggctatattgatgggcaactttttatcacaatagagcttcataaaactttcctagcttattctaaggtcactaattgttttttttttttaaaaggatatatggggggtgcatactttgatgaattgatgataaacttcaacgtgcttaatttgctcatgttgaactggattgtgggctatattgatgggcaactttttatcacaatagagcttcataaaactttcctagcttgttctaaggtcactaagaaaattttttatgcaaagaagctcacatagtccttgcattttgaaattctacttcaagactcagacttagcaaccacggattgtttcttactgttccaagttaccaaattccctcccaaaaaaggtataatagccagatgttgagctcctgttagtggctgatgtataaacctccagtgtcaaccttccagttttctgaagcaaaataccactgccagaagttaaacttcaagtatctaagtatctgagtaatatcctacatgtgtatctcctaacaattgtgcataaattggcttccaacactcatagcttatgctatatcatatatagtacgtgataggaaattaatttacctaccaagtgttgatacctctctctctcaattggatgactctccagtccctcatcgagtttgtgacctgtctcaatgggtgtatctgtggcccacaccctaacaacttggtttctctaaggagatctaaaatatacttttgctgtaaaatcaataattcctcttttaactgggcaacttcaatccctagaaagtattgaagccatccttagtgtttggttgcaaactctttttccaacttcttttttgatctctccatttcttctaaataacctcctttctcaataatgttatcaacatataccatgagtgtagttattttcttattcccaaagtatttaacaaataatgtatgatccctttgcctctgaatataattcatgttctctatttccttaacaaatcaagctttagggcactatgtaaacccacatggagccttcttcaattgatagaccttattcccctttaaattttggtgtctccatatgaacctcctcctctaaatccccatggaggaatgcattctttatatcaaactgctataagggcagaccaacgttagtaccaaggaataacaatatatgaataacattcatctttgccattagagcaaaggtttcttggtagtttattccataagtttaagtatacccaagagctatcaatcttgctttatacctctcaagtgtcccatttgccctatattttattgtaaacacttacttaaacctaacttgtatcttgctaacatgaagatccataatctcctaggtattattttattttattttcaaagaactcatctcttcttgcattgcctttctgcaattcccattctgtaacgactcttgaatagttttgggcatataaatggagttaagtttggtaaccaatgttccattagatgcagaaatattatcaaaaaacaaagttggccaaagggtgttaaatacaatttctcttgccattcttaatggtaataggtaaatcaagatcgtgcaacatattggaattagattcaagtttagtttcagtactttcttcccagttattaattggagtagcaccctaaggttcaggagtagagtatattctcttagagtacaccttactgtagcatatctcttcctctctcttccttggactatagaatctggaataacggacttaggaaccacaggttcagagcttgtgggcttgggtgaatcttgaggatgacttgaggaatgaattggagagcccggatttttgttgaaatattcactggcattatcgggtattaaagtccggatttttgagttaattttggtgcttaccatttcatggaaaacaggaaatataatactagcattcgactttcgttttataaggtagaccgagtaactcttgtacaatcatcaataaaagacataaaccactttgctccaaaaacactttggacttttgtgggtcctcaaacattcttatgaattaaattgacaggaatattaattttttattattcataggaaaagaccctcgataggcttgatggcacttagcaagttcatatatgtcacaacggaaattttgaatctctttgaaacataataggaaacattttctttgataacctaaatggtggatgaccaaggtgaagatggggtaactaaacttcagttttattagacctggaactttcgaataaataggagagaggacttgagcatgttgttccactttcaccttcacagaggtgcaacccattcttctctctagtatgctcaatcatattcattgtatgaaattcctaaagacacctaaaaagtgagaaattcatagaacattcagatttttggtgattttagaaagggataacaagttaacagaaagctttggaacatgcaaaacattttcaatgatgaatctttagtcaaagagatatttccttgactagttgtagtaattgactcgacctttaccctgtgtaagtatataaaaccaatgttttctttacataatagtcttgatcggtcaaaactagagaaaaggctactataatcagtaataagccgggttgtcatccttgggattcaacctaaacatgatttgattattctaatgcttatgttatattgattaagtgttgctaagatctaaatgaactaatctaacaataaaaattggaactttctgaattaaactaaacaaagagatttagtaataatgaaaagatgcaaataaaaataaaatatccagagacaatcttgctcttaaattcgtatctcaagtggagtaggatctcagttttctaaaaatagttgcactcttttgaatttgaatctcaaaaccattgaaaagcttaataatctcaagacctttttgaggggtttgcacataattgatgaaattggtcatcaatgaatcaaacctccagggtaagcattcactgagcctaataagcataaaatatgctttatcttgatagatttgtaaagaatttttatcctgaaaaagttaagaattctgaatctaggaatagggaagttctcctctataaagccctaataacaatatatatataataacacaatactagcagaaaatcctggagaaacaatccttggaaggaaataacacaaaacaatctgacatcagattgaaatcgacattggaatggccttagcatccgaattttgacatcaggttctaatttctaggtggtgccagttcattatcgaaatctagatgcacaaccaatagacaaactgaaactattgccaaagaagatataaaggagtctgccatcagaaatggtgtcggtttaatccgatacaagaccaacattggaacactatacaagccttacccattaaaacaatgacaactccagctgctatcagtttagtgtcagtttcttgtctctgttgtcgaaatggattctccttcatattcaacttcctatgcaaaattcttgctctcacaggtcccaatccacttaaacttcctttgtaaatcaaagtctccttcaatttgtgcacaaatttggattttgcagcttgatatttgaagtctcaactgacatcggatttttgtcagtttccttgataaatattctctagcttctgccaataattcctcaccatcagtttgcaaactgataatggaccgtggtgtttgattcaattccatagaaagaactgagagtgaacatccttgagtatgcttttggaatttttgacattgtctcttttgttattgattcattttgagatcgtgcatcaggcttcaaatctgcactgttcattgcactggagccttatcaaaattttgtgcatgcttctttccattatcaaacttctattgtatagcctcactgtttgaaacggtattggaatgaagttgccaatccaattgaattggccaaaccaacaacaaccttccttcatcttttccatgcccttttgttgtccaattgcatctctaatccttccattgcttcttcaccttggttccatcaacataagatttttacattgccttgaaacttgtatatttttcaccttttactatcttttcacttcattcttcactagatttgaactttagtcctcaaatagggcttaacatacatgtaagttaaaaaatactgattaacactcaaattatatttaaaatccttgttttaaggatgggaaaacatcagtttttgagtgttaaacagtaacaaacgttccatctgctattttatttttttgatttcttaggcatgagctgtgggtaaggaagcaacttgaaaaattggtcatatggtccaagctcttgaatcgatgtcctaaaggcttgaaaactgttcttttaagacatatagggcaagagaaaagttaactgtctgaacaaaacatgttgtcccctttggcttctcatgttgtgacaagaattgtttcaatttttcaatatattctgtattcaatgatccttctcagctaccatttttgtttgtgggtttttcatcaatgttggccagattattttgtggtttatacccttggtttcctccttggcctccatttcctcttctaaaaacatttgaaggctttccatggagttgtcaacatgactctcaggtatgtctcagcttttggtagtgagtacaccactgacaatcaattgaccttctaccttcattccttcctaggtttgtggctgagacaatagtagtagtaccaatggtgggttaatagtgatgataacaaagttttttagttgggtagtgattaatatgcagccattcaaaaagttccgatctagcataacgcctcttcatccttcttcccctctaacagttgcaaaagcttcccttaaggaagaaagaatctttttaccaagaatttgaactctgatatgaacaaaatcgttatgtaatccaatcaaggataaaaaacgctctttttttcaataaattcttgatacatcattgcatctttaccacatttcatttttaaatattaatctaattcaagccacaaccctcataacattgtagttttgaagcactaaaagatgaccttatttggttttatgaattctagtcttgagttcatcaatttgagtaacatctccaacctttgaataagtttgacaggtgaactcccaaatctcccttgttgtagagatgaacatacaagttttgttgatctttggttacattgagttctatgactaagacattaattgagactcctcttcatcctggccattgaatttcaagcctcccttactcatctctagcccgagtaaatgactcagtttcctttttttttcatttcaggcatgtttttgccaactatgaccattctaggtaattgcctcaattcagtttaaatgtgggtcaagtactccgaaattctcctggggtcaaagttggattttgagtatttatggttgtttgggtaatagtggaagagacataagattctatcatcttaggttgattgcatataagaggagattattataatggggggtgacacacaccataaaaaaaggatatagaaaaatgggttctgaaccaaccatgacaatgaaggccaaaaggagacactaacaattcctgcaattaggttggaaaaaaattgaaactaacactggcaattggaatcggtaaatggaagaaaaaaaaaaaagttattgggcacaagactttgctaccatgaaaatagagaatgatctctggataatactggtattcattgataatagttacagcctatttacaatgttttatagtgtgaaaaggaaagggaaaagaaattactctatactaggcatagaattactccactaaatcagttactaattacagaaaaagcaggtacttaatcatttcctaattaacaagtaatcaagtcaacagtacagaaaaaaaaaatatacaaaaaaattccaatcaaatcctgacctattttggctgcataatctaacaattattggattgattttccaacaattttagaccatcttatatctttctggttatgcttttcttttgggaaatatttggaggtttatttgattttattttccatttggtgatttgtgatcatggtagcagcttcatctattgtacattgcatatccgtatcgttttttggtgtttaacaaattattgttgaaacttgcaggttggttttgtgacttttttcctcagttcgatcct

SEQ ID NO: 10648 - DNA, 10366 bp, Vitis vinifera
  Intron number 4 from transcript GSVIVT01031737001 (locus G SVIVG01031737001) derived from phytozome v7.0 (chr-ID chr3 ; pos 3933505 to 3943870)
tggttgctgaaattttggtaaatcactttggaggagtccccagggagagggaagaagaagctgaagactgatgagtgaaaggaatcgcttggagaagacaaataaagaactgaaagggggccttagtggattaacttcgaaggattttgaattcttcaacccagtttctgacctgtttggtttttcataggtataatacaaccccaaagaacaaaaaaaaaagggaaagtggggaagccctgtttgtgctgatgtatcaaaataagaggaggaattaccaatgtaccatcaatgctgaacattgtgtttttatggcattttaaatctttgtaatggagattttgctcattctaaaagtaatctatttttatttatgagattgaaattaaaatcatagtggcagcatagaatgagattgaaatttttattcctattcgaggttaatatgtgttttaacgacctgtatccaattgtgtggatattgttcactttgggtttaaaggagccctcacaactttaaagtgcatttacaatgttaataggagttcaataagcccatatttatatgataccagaaacttttaccgacaaaatttacaaaattgggtgcgggttacatgtgcagccaatcaaatgccggaataaactagtaatgaatttccattcatgtgaagcagacacacccttagagcagaagagtcttcagatcatgttcatggcagagagggaagtagttcaaagctcctgcagcccaagcgtttgtctttgggctgacttcagtccatacacaaaatgcaggtccacagtccacttccaagcttccagatgtcaagcccatgacccagcttcactcaacccaaagcccatttacttgacttggagtttgagactacccttcgcgcttctcttcgtaacaaaaatgaggttaatgagtctctgggcttgcccaagtgcctaatgtcacagctggaaaggctgagttagaaacatcaagcgagttgagtgtcgcacgtgagattagacatcataaaagtataaccgactaattattaagaattaagtatacaatctatcaataattacttcaccaaatctcacatatgcaacttacaatattaccatattccttaattgactctttaatattttaagagaattccctcacaagcccaaaaaataaatcaaataattttaaaagtttatatatacaagtgaaaccctaaatggacttggactagattccaaaatcttaagtttccaatggctttaaaacgcgtctatagtgttacgagatgtaggatgtcccaaacatacctacatgtagatacaatgttctcgttgtgtcccatgggattggacccaaaggggatctcacggctttaaaacgtgtctataaggttacgaggagttcatacttatatagcgctagaaactttcctccttatctgatgtgggatgtcacagaatctactaaaaataatatacaaaatttagaaattttgtaaactatggaattaggccgatcaaacctagaacctttgtgagttattaagtgtggtcaaacacctcttatcaatgcttgattgctttaggtgtttgagcggctaatataagcgcttaatcataaaagtaattttaatttttttttaatttaaacactcaattttaattccttatcataactatttatactatcttgattgattatgcaacaaccttaagcctaaaaatcgagttcttaaatgaaatttgtttttaaaaataaaataagattgttttaaagaattattctaaaataaattatttttaaaaaaatgttgccaaagctacaaggtgatgagtgggaactgcccaacagcaatgcggcgacatggacaatggtgcttggggggttccattttcaacccaaaaattcagcaacttgcatgagtagttaaatcaggagctaacaaaatagtcgtcccagataaatgagatcgtgacatgactccaaaaaatcaagcaaatgcctgcaaccggatattaatttgtacatacacaccatggccctctttacatggaaaccacatatcccttcttgcatttcttcacacttaccttactgttttgaaggctaaggaagacagcatattaaccatagacaacgacatgaaattgaatggaaaccaagactaccctattggctcctcaaatgccttataaacattattctcttcctattcatttttctcgtcttagttatggttgattggttgactaatcgattgaatcaactactagccattgggtgatggaaggtctagaaagtgactgttgggtcaaataggtgaagagtttgataattcgataatggaaatgattgtaatttattatttcttttcagaaatttatacaagaaagaaataataaatgttctaaaattaagaaaattaaatattattttctaaattaagagaataaaatattattaatatttaattattcttgatttatagaaatattgattgaagataattttcatcgttatatatgtgcatcatctttttccattttatgccttgtgtcttatcattttgtctcttttttgtcttcttactctttatcctcttttgtcctatttgattttatttttcttcacatatccccttaagttgtaatgagaatgaatatgagtgtctagcttgtctcgaaacttaattgtaacatgaaagaaaggtaaaacatcttcccctcaaactaaattttttttgcctcttcaaccattttggcatggcctatattgtccaaataaaaacttatgcatgctctaagagcgttttctctccttctttttggtgatgactaattgtttatgtccttgaaaaattactatgatttggctaaaggaatgataaggtgatttagtaagcatactaagtatatatataaaagtatattcatacctttatcttaagctatgtgcgaattgacaaactttgtcttcatctaaaatttacttttgattgcagtgaaattgtcacatatattttaaagtcttttaaatattcttcaagatatcattaatttttatttttcaactgtaataggaaacaattgttctttaagggaagtttataccatatatatcatgttaatacttaagatcatactaaaaacgtcttctttcatagttccatgaactcataaaatggtaaatttgtcactgttaatcaatagttggtgttataggataggattttttttccctcatcatccttaatttcttcaagtttttctccacctaaaagatgttggagaacactagtgccgtaaacgaatagaataatttgatttcacattgatgtcataaatgaatgaatgatttgatttcgctatagtaggaaaaatatgatttctagtttgattaagatcaaactaaaaagaatactaatggaaggttagactcgagtttgagcctacacctctagctctaataccatgaagtgtttgataatttgacaattgatatgattgtgttttattatttctttaaaaaaattttatataagaatatattgtgaataaattttatttcctaaattatgagaattaaatattattaatattttattggtctttattcatagaaatattgactgaaatagattcttattattactttatgcgtctttatttttttctattttatgtattgccttttaccattcagtgtcttgtgtcctcttttattcttcccttgacaacaagctcaaccgatcaatcattgattcgattagccttcaatcgagtgaacactaactagttgagttggttaaacaatattaagtaggtaaataataaccagcagttgaatcaaatgaataataattgagtgaatgttaacctattgagtccctttgctcatatcttggtcaaatatatacaaattttagaaaattggtgcacaaaacaaaatttgatgaatgaagcaacctatcatatatacttctacttcatcgtccatttttgtagtggcaaaggagagaggaacaccccccatccccccagcccccccttgtccccttgtatcattatgtatttgtcatatcaaatcctcctcaaggatttaattaggggttgtttggcaatactctgaaaaatggttttctagatgtgtaagggattacctccatgcacagttgacttgccccatgaagatcatcaggggtgggcaatctttattgggatgatgatatgagcatattgggcaatagacaaaggtctgtctgcggcagataaatatcaaagccttcaacctccattgtagaccatagaaaagatagagataaaactcaagtgcctgtctctgaactgatgaggaagatctcaagatgtatactcaacaaggttggatacgatatatcttggtgaagattccaaagacaaagcactagatgtccatttcttctttgttttcttggtttcatgattttttcacaacccaaaaataagaagtgtaaaatataccaatttgagtgaactcgtgggaaaataaaatggaagaataaagttcaatctttgtagggggtccattggtgagaaagtggagtgtgtatcatgggaagatctaggtcgaaatctggatgatactgtacgccccacgtaccaaaattccatcaaataaagtgtgcctttttttggagattccccgcccaagatgatatccattacccaacatggggtctcatcctctacacgcattttaatgtcattggctcctctctctcaattggacattaggatcatattaccttttttttttttttttgctttttatcgtaagatttcaatggctatttgagcagcaaaatcatagaaattttgaaaaatactttcaattgtagtttctatcacaaataattgttataattatgtatcacgattgattcttttttatgtagatattatttgttttgaatctaacgagctttcaaaattttaagacacgtttatattattaaagaaaaacccatccgatactaaaaatttcttcatatatatcttacgtaagataccatgatcaataggattatgatgactttgatgtcttttcatgtgtacgttattcgttctcgacccaatatactttctcacattgtactccccgatttcacagaaggttcaatttttcatcgattcaaaaactttggttttgtataaaaactaaatttggtttttttttccaagtttggggggtacaataagaatgaatggtagcgacatagacaatcaaagaaaaaggatgccatggtgggagggaaggcatccacctcaccactctaccctatctaaatgagtggaataattaggggtggaggagggtgttgagtggatggcactccgccgtatgttccaaaaatggtactaaaggaggggagagcggggagtagggcatcagctttatatctcttggttcggctaatttaggtagatatgggcatcattctgggtatttggaaggcacttgcttctgtttgtttcctgggataactccagatcttggggatcttcattcctcacccttttgctcaacacttgggcctccttcaagcatccaacccacatggctccccactaatactcatttcagttgacttatccagtcaaatcattttataagtacttccttcacttactactaacatattatttttttctcacgcttgcaccctctttgccttctttcagattatttggctacgtttgggagaacaattttttgttttcgagagaaaaaaaaaattattaagtattcctaaaatatatttttgataattattctattttctagccatatattagaatttgattcgacttgaaaaatttgtaatacaacatatataatgaaactaaaattataaatttttttaatgagtttgtagttgtagaaggagattgggccgatacttactctattcattatttacatatatatatatatatatatatatatatgaattttagtttttcgtgttttgttttttattgtctgtttgtgacaattaatttaaaatatattaacataaataaggtttttgaaaatacaataaaaaatatgagtcacggagagaaagtgataactatgggtagtgataactatgggtagaaccacgggtagagaataaaaaattcgaagtcacccttttgtaagcatgaccaatttctttatccactgtatatatatatactaatgttgtgacttgtgagagagattgatggtcttgcttccgattccatcgctttgccacgtgtactatttgtacacaagaggtgtcaaatttgtgcttcttctaccacaacatcaagagccgtgggtgactcattttcttgcttctgcttttaccttttttcttgattcttgattcttgatgttaactactgaaattttactaacactttcattttgaaagagaatttaaagtcaacttcccttaaatcacaaaaaaaaaaaaaaaaaatcaaaatttttattaattttttttttataaaaaaatatacccatttttttttaaaaaaaaattgaaaaataattttggaaaatcctaaaaaggggaggctacaggggtgggtggaaaagtgaatcctatgaaataaaattggtggggatggctgagtcagtgccgtattgcagtggcacattcactcttggcaatctctttgaaaatcctactcaaaattttctttggcttggttgattttcttctaggattccatgtccacctattctctatacctacaaactatgcttctcactgaggagagtagtatatagccatgattgattaccactcttggatttatagaatccttcgaaatttctacttttttttattcattattttagttaccccactttccatgctataaattattatcacatggaggctcacatgcaaaataatttgagtttcaaaatttgaatcaaagttcaaattgaatttttggttcatcagcgtgggggaattataggtatagaggactgccagcatccgatgtttaggttggtatggtatggatatggaaaatactataattgatattgatagaagatggagacaatcttgacttgtaagttgtcatttacttatttatgtttaattatattatgtattatcttatctaaatatagaaaaaaaaaatgataaaaaagaattttagggtctgtttactaacggttttctcgaaattttgtttgaaaatttaaaatatttttaacttatttttaatgtttttgaatatgttttaaaaataatttttatatttagtgttttaattttaatcattctgtatatttgtataattacattttttaaaaacactcaaaaaataggtaaaaccaatataaaacaattaaaaaatgttaccgtattttctaaaaaatacaaattattttatggtttttaagcgtgtttttatagttttttattttgaaaaacagaaaactattttaaaagacagtttccaaataggtccgtaatatttttcatgttttttaattgttaaattatctcccatatttgaaatttaagtttatgattaattatttatattaaaatagtaattaatgatttattttataattttgagataagtttcataagaaggcttatattttataagatttaaaataattattttgagttaaccttctaactcatcaattccacaaaggttagtggaatacttcatcactccattttaattattaaataataataataataataaatgataataataatttgtagagataaattctaatcattttaaaattatcaaaataaaaatatattttaaggatctatttttttagacattgaaaagacatcattaataaaataatttcatatttaaatttaattatatatatttaaaatgttaggatgttgtatatattaataaccaaaagtgctgacctgaccgaaatctcatgacagtatattgaacgttacatggcggaatgtttaaccaattgttgattgacacgtcaactggactggatgaacatggcaatgcatctattttcacatatttggcttacctgcatattagatgatatgttgatatgttgatatgttgaaatatcaaacatgacacgcgcccaactcaactgggcctaggattctaagtatttcttttttccttaaatgatcaagcatgcctttaaagaccaacatcaacatggaagaggtttcactacaattctatgcatattcaagtatgattcttggaatcacttttagcctaaaaaatattttttaaaaaccattatatgtgggataaattttacgagatatttttaaaattttaaaaaatcacttatagtgtcgaagaaaggttttttttttttttttagagaaatatgtgatgtttattatcctaaaaatagttgatgagaaaacactttcattaaaaatacttcgagtacgatttgatgaaaaagattaagagtgcgtttgacaagtaaaattgagaagtgtttcttttttttttctaatacttgaaaaataaaaattttcaagtattaaaaaaattagaaacactttctagaatcactattaaacatattctaaaaacacttcctaaaagtattatcaaacacactatgatacaatgataaaccacttttactaaaaaataactgaggaaaaaacacttttactaaaaacactcttaaacgcactctaaattataatacaaatttgagaaaaaaaaaatttaaataatactcacatgcccacactgtattttaaaataaaaatttattataaaataaatatgaggattaaaagatcatttgtagtatttttttaaaaacattttttatttaaaaggtatttttgaagatttaggaaacacttttaaaaatcaatttatggtgttgaaaaaagacttattttcggtaaaaacacttggaataaaaacacaatcaaatatattctaaatcaaagtagaacaaaaaaaaaaaaaattattcaattatttttattaattaaaaaattcttatcacaacacaaaaattgtggtataaattttataacaaaaaagataatttcatagcatagactattatcaaaggggtatattttttttaattacaaattatatagttgtattatcacatttttaactaataataaaaatattattattcacaaaaatagtatgtaaaaaagtaggagaggaaggcaaaggtgggtaaatttggaagtgggcttagaagggcaagaacagtgtttggtggccaacatgttgacctaataaacagctaacggtttgttttctttaagaagtctctcgatgtggaccatcaagacatggacacgtgtcgaatccagcttgcttggatcgcgactaccacctgacgtggtcttcttctgatacggacgtcacgcgcaggctcaacaaaatggtgggggtcccacgctcgcgaaccttccacgtggacccatgcccgaatgggacatgacatgatggccatccgatctagaaagtcgaagatcttagcggtcttcaacgtgtgagctggattgcaccgccgattcactgggtcccacccccgccctgcccctcccttttcacattcaaccgccctcaccttattccacgctctcaacttttaacctttcacggttacaaattactctatttttccatttatttttataataataataataataataatattctaaaaatggttcaagattatagatatcattctatttttgaaaaatatataaatcctttgaactctacaggcccttctacatatttaacataaatggaaatatttatttttttaaaaataaagtcggaaaaaatagatataaatgatgcaatctaggtattgtttgtgttttttttttacttaattataaataaatcttaaaattaaatagtatttaatacagttaaatattaaattatttattttttaatattttattttattaaatattaagaagtaaaaaaatcaataaattatttttagtattaaaaaaagtcaaatcttttaatttttttattcaataaaaaaattttaagaaataaattataagttgataagaagttaaaaaagaaagttataaaatttgaaaataaatgttaaaataataaacaccgcccaacataaaaggcttgaagggtgtgtaaagcacgaggggtttattttgttgccattgaaaatccaacaaagatgggaaatgtgaaggtcttattgctttccaatcggatgaagatagtgataggctctaaatctaaggttatcgtggaaagaaaatatgaatatgtgaggacagagttttccatattaggattttaatcc

SEQ ID NO: 10649 - DNA, 9419 bp, Vitis vinifera
  Intron number 7 from transcript GSVIVT01008797001 (locus G SVIVG01008797001) derived from phytozome v7.0 (chr-ID chr1 8; pos 2177997 to 2187415 reverse strand)
actggtatgtgctaagcaccttttcctgtgaattgcttttagtatttgctttttctaacatcatttccttgaatatctcaaatcatcagagatgctgtaagccccatcaactgaaaagatagcttatagcatttagccagaccaatttatcataattgcacaaaattaatttgactaatagtacttgtgtaattaggcttctgtgactttttcagatcttcaaatgtttgctcaagtttataatcttgtaacttgaggctttacaaacgacacctgctgtgttgaattttttagagtgtttacaattctaatgtgtcactgttccttttcctcaatgattagtggaattgcatgggaaaaatgagaacatgatggggagaggaaaacatgcttaaaagggggattgggggggaaggtgaattgtcttccactccactatttgtttatccacttcatgattgagacaatacatcctgcttagggatgaagaatgtggagcggataagcaaacctttgagagaaaatagcctaaatacaaaaataaacaaccatgatatggatgcaggaagcagattcactacaaggctgagaaagtatctatgactgcctttcatccccttgaaaacttcaaatgtggaagctctatcttggccaggaaattgtcttctaaaatttattgttttggtatttatgaaaacatatggctcatatctatacaaatgtcaatgccacccctccaaggtggccctaaaaatatgtgtacatccaagggtcctcaagccgccattagtccctttccatgacaatgctcaaatcccctcatccctcaattatgttttaggaggcccttatgcttaagcttatttagaccaaaacaaggagcaccttatctcttctctctctaccaaatcaaaatgccttgaagaaagtaatatatctgccttgttcccaactgaaccaagcattagaaccaaccacttaggataatagaaaaagtcctttctcacctttttgttctatttggagccattttatccattagatccttggtgattatataatggttccccacctctgcccatgtccttttgttccttcctccttctatcttagtgccatttacttaaattaaatcactctgtcctggtgtttcatagatctttgtttcacatggttgaaccatcttggatgacttttcttcatgtgggctttaattgatttcatctctaactctgactagatacattcatttcttattccatcttttctagcactaaaatgaatccagctaaacatcctctgtctggtgcactcaccttttttaatgtagttttacttaactagccgacattctacacccccttgaggtttaggttgtgtggcttcagtagagtttcccttttaactttttagctattccatgcttatgcactactccagacgcactttcctacttcttttatcatctaattttataggcattgttctctatttcctcttcattgaggcacagagatcttttgataggatggaatcaggtttgtgaaagggttctaagcttttggaggatctctacaaggattagagcttttttgagttttccatagaagattgtattgttgtgacattgtataatgaatgaggtgccaacatgtggttcagtggtcaattgttggtcattgggggctaccttccaggctcttgctggactttatctagtttacttgtttcttaatttcaatattcaatcctgggaagttttgaggtggagcgatcaccctttttggatcaaatgacatagttcctaccttatttcaaggacaaaaaattattctatttgtgttgttctcaaccaactctcttaaaatcttttatcggaatcttcattgccggcctaatttgttggactaggaaaattgcttctttctttcatactttggaaccatatttgtttgtccctatggcttggtccttggaatcttcattgtggttttttccttaatatgtctaagaatgacgatccaattttgtttcctcaggctaattcagtcaggaagtccaaagttccacatgaagtcaagaatttttgtgacttgtactggcaaataaaaaggtttacatcagttacttgttaaaaatcagtagaccttgtaaagcacttatcttttttttttttgataagtaaaagatatgcattaaaaaaggcagaacgccgcatagcatacaggaagtatacaaaacagcataggcctcaaaaaacaaaacaaagaaaaacctcccattaataggaggctaaccactctaagaagcctataagggagaacgcctcctcacctacatacaatttggcctaactccacaggttacaaacaaaagaattctttaacttttgaatatttaaaacccccccccctaaaagctaatctattcctctccttccataccgtccaaaaaatacacaacggaatggcatcccatatctttttccttttctttcccactcacgagcccctccaactagctaagacctcctttacagttcctggagaagcccattttacatcaattaaaccaaagacaatatcccataaggctctcaccactgtacagtaaattagaatatgatttacactttcttcttcgcattcgcacaagaaacaccgatttggaagttgaaaacctcttctttgcagactatccaaagttaacaccttcccccatgacgcctcccacgcaaagaaggcaactttagttggcactcttgccacccaaatgcttttataaggaaaacccataacatcagaattcgtcaacaacctgtacgcttccttaaccctgaactggccacttcttccttttctccatataactgaatcttcctccaaagaaggtttacagcccctcaaaatgtggagaaactccccaaccaactcaatctcccaatcattaaagtccctcaaaaaatgaagattccagtttccttgacccgaattttgatcccacatttcctcaaccgtcaaactcttatgcgcggccataccaaatagatgagggaagcgttgagccaatgaggaatctgagcaccacacatctgtccagaagcatatcatgttgccctttcctacgcggaatgacatgttatcccaacaccaatctgattctttccaaatttccttccaaacccctacaccaatcgtcccatttccttttttaggcctccaatcaagaccctcctgcccatacttcaccttaatcacttgtctccacaaaatattcttttcaccagcatacctccatatccacttgccaagtaaagctttgttcaacaaagctagctttctaaggcctagcccacctttatctttgtctgtgcacaccacctcccatttaaccaaatgcacttttctctccatgtttccccctccccacagaaaatctctttgcactttctcaatccttctaacaacaacctttggcattctgaaaatggacatttggtagattggcatgctagccaatgtacttttaattaaggtaactcttccccctttagaaatatattgccgtttccaaagagctaatcgcctcctcactctctcctccaccccatcccatatataaggcgctctatttggggcccctaaaggaagacccaaatactgagaaggtagagtccccaccctgcagccaagctcaacagccaactcctccacctccgccacctcaccaactggaatgatctcactcttggctaaattaatccttaaacctgaagccgcttcaaaccagaatagaatccaccccaagtaagttagatgatcctttttggcctcacagaagaccattgtgtcatcagcaaaaaacaagtgagatatgttcaaagaggggccacttcctcccctaatgttgcatcctgataggaaccccccctccacagctctcctgataagcacatcaagcacttccatccccatgatgaagaggtaaggagacaacggatccccttgtctaagacctttagtgcttgggaagaaacctgcaggcactccattaaccaacactgaaaatttagcggacgataggcagctccacatccaccccacccatttagacccgaaacccatcttatgtaacaccttcaccaagaacttccaattgatgctgtcataggctttctctatatccaacttgcatataatgcccttttccttttgtttctgccacgtgtctatcacttcatttgcaattaaagacgcatcaaggatttgtcttcccttcacaaaggcattctgagaagtagagaccaccttaccaactactttcttcaatctgttagctagcactttagccaataacttgtaaagcccccccaaaagactaatcggtctgaagtctctaaggtcctcagccccacttttcttggggatcaacaccaggaaggtattgttgaggctcttgagaaaagaactgtggtcatagaagtctttgaacatttccaaaatctcctctttaatgaagtcccagtaactttgccaaaatgccattgtaaagccatccgggccaggggctttatccccattcatctccatcaacgccacataaatttcctcctcagtaaagggcctctccaaggtctccgcctcttgttggctgatccggtctagccgaaggccccctatatccgccttccaccccatatcttctgaaagtaaactttggaaagtgctagcaattccttccctgatttcctgctcctctaacagccactccccattaatctttattctctccaactgattatttctacggtgagcgcttgccatgcgatgaaaaaagcccgtatttctatccccctccttcagccatatttccctagaaagccgtctccaatgggtctcttccatagtcacccatttcctataattctcttttgcctctttcttaagctccgtttcctccaccgtcagaattctcccactttcctccctatcccaaaactccacctgctgcaaggctacggatttattggtttccagcttcccaaagacttctctattccaagttttcaatttctgtttgacttccttcatcttggtagccagcttgtaactaccactgccccttacctcaattccttgccaccagctgcgcactaaatctttgaagccctcagccttaagccacatattttcaaatctgaatggagttgggcctcgtcttatccccccccccccccactagcataattgggaaatgatcggaaaccagacggagcagcctacattgactaatcccattgtattggtcagtccaactaggggagacaaggaatctgtccaatcttgcccagatctgattgttttgtcccccattccaagtacattctcccccttgaagtgggagatccatcagccccaaatcatccactgtttccgcaaatttcctcattgctgaattcattctcctctggctgctcctttccctcggaaacaaggttatgttgaaatccccccctatacaccacgggtcttcccacagccctctaatcgcccccaactcatcccataaagcctccctttccatcttggagaaaggaccgtacactcccgtaaaaatccaactcaccccattttctatattccggaatctacaagataaggtaaactggccctcttcccaatctagaacctctaaggcccttttgtcccagcacaccaaaattccccccgaagcaccttccgcattcacagccttccactctatgaatctgccggagcctatgcttctcgcaatgtaatccgacatcgcttgaattttagtctcctgaatacaaattacgtccgccctctgattccttataaacgtcttaattacttttcttttagagctatcatttgctcccctcacattccaactcaaaattttcatcttcattggacaatcacaatctggcgccctttgccctgaaccgagcctttctgtttaagccccccctcataattaatggagcattccagtctttttagctccctttcaaacttagatttttccaatagctctttactatggattttcttccttctctttctgatttgagacagaaacttcagtatttccttctccaatccctccgtggggaatcccaggaaatgactaaattttgccagatcactctcctcccatttatcctcctgcattcctctctcagtttgggagtcatatgtggcaccatcccccacagtcctccttcccgtatcactgctgctttcctttacacccacctccctgcatccattgctcctctcaacaccaccctcatatactgttagccacattgaattgtcaacacgagctccctcattccaatccccagaatgaccgaaagactccactcccggagtccgatcaaaattaaaagagttaagatgagggatccccagaaccctgttcccccaagcccacaaccccttaccatacctcattgattcctcttcgagagccttgtccgtctctgatatcctgaccacgccatttaatttcctcaaatcctcagtctcccacgcaacaaaaggctctggcacttgattcttacctggataagacaccgacaacagtaggaccttctgggataaaatatggttttggcctgctgatgaacttctaacaggctgtggaccatttccctttgaacttgggcctttgattggtgtcgagactgggcctgtaatggaacagcccacctcatcgggcctacctgacgggcctgcatctggacttaaggccacccctttcagttttaatccccttgcaccaatcttcagcccaggcccaccgtccctttttaatacctttgggctggcatttgggcttgaaagatggactgccccaggttggatccacgacggggatattgggcctcgaccttcattagaagcaaaaagacccccaacagccctctgtccacccgtcccttcacctgacgagtgcaggtcctcgatcctcacgctcaccatcccctttgtcactcgcttctccgcgcgtgaggacacctcacccccaacctcgctgctgtaatggctttctgcttgactggaagatctccttatcaccggacggcattcccaccataatgctatctcatagacctcctcttccacttcgacttccagaacactcgggcgagcatcacctctgctcctcactaatattctggcccactgaagctcacccagcgtcttcgttggttcatcggccgtgataaagccaccacatgcgtcccccgccttcttcaaaatctctgggctccaaaacgagactgggagtccaaataatctcacccaaatctcctttgccttctcctcctctgtccagcacccgctccttggactccaaaactccagccctacctggactcctttcatcgtgcgattcccagtaaaaacagcacgacgcgcctcctccaagtcttcaaagtccagtagaaccctccccttttccattttagccagccctaagcttcccttgagctcccacgattttgcccaatgctgtcccagcttctcaagatcgtcctcttcccctgcgttacccctcctgctagccacaacacagtgatccagtttcttcaacattcccatcgattcctctctttagaccttcactgcaatcgcgtttggattgcccaacaaagcacgttttgctattgttgcgtatgagctccccccagcaattttccccgtagattttccttcctgaaattttgatttactaccaaaagcgcctatcacctctttaatcttgtctgccatggtcatccacccccgcttttcctttctgcctctcgggacaaagatgcagaagtgtttcctcgcaaggtcgaagacccctagccggataaactcccccgcgatgtttgtccctcgtgacatagagaatgttcggccctgttccttccactcccttccccatcctgatgctttctcatccaaaatacagaggttcagaccttccaagaacaaccctagactgtccagacccaaccgaatccatgacgcaacccctcccttcttctccacaatgagggcttggaaatttcctttcctctcgtcaccaataatctcaaactcctttgattccacgctgaatttgcattccctccttctgcgtcgcgggaccgaaccttcatccccctcctcgccatcgcactctctctcacctgctttcgctctctctctctctcccatttttttgccaatcttaactctgcctcctcaaacaatgatgagactgtggatcatcattcttttcactgtctagtcaccttgagcttgtggaaaaagttatttcagctgatgagtattcctcacttttcatccaaaaatgttgtagatgtgatggttatagtatctacatggcaagagtgcaaaagtgctttggcaaggagcatcccttgctatgctttatggttggagaagaatctgtgtattttttatgataagtggccatctacaattcattgtgaaattcagttcatcatctcacttctatttaggaatcagtcatgaaggcttttgtagcactcctatgagtttgattatgttagatcagaggggaggtatgcaaagctaattagagagacaatggggcttggctggaggtgaaaaccccccacttctggttgcttgaagcttcacttttttgattgttttttaggaaactcaagatggatgggaattatctgtctcatagcatgccccaagccagctgggttaaggttagccattgaagatgagattttagcttcattagaagatttgaaagagacaacattcttcagaactactaatcgtaggtagaaagggggtttagctgtcattattatttcttagggtcctaagggtaagagaggactataaagattggggcttggctatcagcaaggtcatcgtagatgtagtgtaggttttaggttgctcatttacatgtattcttagatcagctaaactaggcaactgaatattagtgaagtgctgtaccaattaggtagaaggggggagggggtaggatatgttcagtgacgggccttccaggatccttgttgggcactaagctatttttgttgctattgcagttttttgtcttattttttttcttcttaattttgcctgaaggataactcatcttccctatgtacatgtttatttctttaatgaaatcattttgtgctctgaaaaaaaaaaaaagagttgtcttagaactgtatttcttcatattcaagcatctttagggatgatgagtaattttattagaagttaaatacttattttcatccgtttttgttactatgatcttaaacttgattgtgatgcttggaactttgtctggcaggtgtgagccatttgacacctacccaagaacat

SEQ ID NO: 10650 - DNA, 3408 bp, Vitis vinifera
  Intron number 1 from transcript GSVIVT01017280001 (locus G SVIVG01017280001) derived from phytozome v7.0 (chr-ID chr9 ; pos 6296952 to 6300359 reverse strand)
gtcttgctgctcctcagattggaattcccttaagggttagttcaaactttgactcctcccttatcaacttttgatttgtatatttacgaatttttggcagaaaatagtgtttcattgctaagtattacccgacctttgatgtataatgttgacacgtttcctaagagcgacagtctgacagagataatattcacgtttggagatgcttaaaccaattttataatgttataatcaatggggcattggtgatttgaagtgaaagtaagagtgatactttggttcgcatctaaattagactaatgacagcaaaatcttgtttctattgatgtttcataattgtaatacttataagaccgaatctttgggtgcaaatttggacccaactttgaatttttggcttcagacgtgtagaagttggtcaaatggccaaaaagtaagagaggcaagccaggaaggtgtaaaatgctggatgagattttccttggataaatattgtttgggatggtcttaatactatataagctatgatttgtaggactcctccgaattggttattggcatgttcagcacttgtcagaacagtacctgtgttcaacaccagtttggccactcacatgtgtccacccttatgatcccttcatatagtaaattcagtgatcacatgtgttcacagatgtggttgtctccttgtgggcatccattgagggagtaggcatcctaaggtgcgtcttgtgccttttaaagttatgagtttttgtaaattaaccatttgaagacaaatacaaatggcatttggagtcaattttgtgatgtggttttttagttgtatcatttagattggcttgtagtttgttatttggagaatgaactccacttttcatttggttgttgttgatgtccaaatttgcatattacatgtacatctgtgtgtccctgatgttggatttcagtgacatgctgccatatatgctaaatggttctccacatgcacacacgcaccaataagccccgagttaggctggatgcctacccccgcaatggatgcccacacagtgggtaccagctggtggtggtggtgagaaaatgtgcctaccacttccagataaaagaatacttgcttagtagagtgttgctcctcatctctatgcaagaggatgtaagggggccatcctccattggttcatacccacatgaatgctatgtttgaaggaggggagaagtcactcccctcaactcatggtagtgactcccaggacccttatagattcaatactgtgggttgttttgaggtgcctccctgtgaatgcaatggattcaatcatgagcacagggtgctggtataaaacttgatcgcagtacagatctatgggaggttcccattggttggcctaacagaacaataggtttaaacttaggcctctatgtaggcctctacatagagggcttaacagttcatttgtagagaatcataagaatattagtatcacttgtgtttaatcttctaaaaggctcttgaacctttctcctcaggtcccttccttagtgctctctttgttccttccctgccacttcccctaccctcctcttaatttgctccactatctccttaagccttgacacctcactgtccctgtggttcaccttgtatcttgctaagaaccccacaattaacagttgaatatcatgtagcctaatgatttgaagtcattacatttttttttgtcaattagccctataataagcagttggataacagttggattcaaaatttctttttttttctttttttttttttaattcccttttcaatttaaagttgacttcaatagaattatgcttaaaaatgttttattttattttatttttagttatttatatccacaaccataagccaacattatttttccaaaatcaaaattaaaaatagaaaacaaacattaaaccttgttagtttcctgagaaactgaaaaaacccagtcattcgcaaatcaaaaaacaacattatcaacattactgaacaaccaaaaaactcaacattatctcccaaccacttacaaaacaaaagataccacatagaaaaccaaacaaaataaaattaaaataaaaagaataattctaataataggttgatcaaatccacaaaaacagaatgcataagtagcaaaaatgaggttgttttgatgcaaaaaaaaaaaagttaaagtggataagaatttttgtaaaagcaaagtgcatgtaacttgttggcaactatgttgaggatatttgaaaaaaaaaaagttctttgagaagactaaagaagaaaaaacttgtgattttaaggtgtcatatttggcattttgtagttaacatttgttaattagttgttgtctgacaagacaatttttttttttgaatgtgacattttacttttccaaaataaaagattttaggttatatatgtaatattaagtggctaaactcctcatatgaaataaaatgtgtttaaatttttttggatcaaaaaccaaaacgtaaatcatattttttaaaatattttcattgtacaatacataatcccatttttcctttttatctaatttgtcgaacatatttagttatgctaaaaaaagcaacaaataacaataatccaatagtgaggttggtaatactcaagtaccttgaagagctgcccatgtccaagtagttgcccctaatgacatatagcaatgtatgaacgaacccctttcttctatattttcatagaaaagggtcagtgtatgaccttggaaccatcacaagtttgcagataatgaattttatgctgttggaagacttgttgacaatatactccatagctcaatgacgatggtgtccaaattctgaatatatatttatttcatgttttaaaagttatatagtgggtcacgtatacctacaatgggaagaacctaagaaaggaaaattttgcagctataaatttcttaaattacaatgaagaaatcaaggagaaaaatctatacaaaaacaagaaaattggcaaactaggaaaccatctgaatatagtctactaaccagcttagaatcaattaaattaatatccagagatccacaaatggttgaactttgggattcaagttatttttatatgtgatcagcctgggcatttccaatgaggaaactaattttatttcgcttggatgagtaccattctgtgattagtttgtatgccaattcctaaactgtgtctttcaacaggtttgtttaataaatgaattccttactgtagttcaatagcagattgaattcattccaaaccaactaaatctaaacacaacaaacctacttcctgaaacaccatgctataaacagttttttcatttctgctctgcagattatcgttttggaagacacaaaagaatatattag

SEQ ID NO: 10651 - DNA, 7297 bp, Vitis vinifera
  Intron number 2 from transcript GSVIVT01014776001 (locus G SVIVG01014776001) derived from phytozome v7.0 (chr-ID chr1 9; pos 9531289 to 9538585)
gcaccatcacaggtctctctcttcctttcaacttccagcattttctgtgcttgtctctagggttttgttcaaaccctttggtgtgcttttctcctttggtttgatatatgctgttcattattgaatgaaaaagattttaatcgaggtcatttagtggtttcgggctgtgattcatgatcactttactggaatttttggttttgtgtttgaatgctcggaaccatgttcaggtgtctcaatttcgtttgtctagtgtcataatgaggaatcctgagcttatgctattgaaattttatagttttaaatgcgatgaattgctgctactgggtcgtggattttgaacggttttttttctaatatgaatttcgttgaggcattggaatttgaagaatgacaatttgtgcatagacatgaggatgggacttgagttgtagagccatgtgcagttggctggactatgtgggcttcatgtcaatttggggagcccaagcttgttgtagcacactttttagccttaaatgtgcaagtgcaacatctgctgataggtgagttttgtctaccttgagcggcatcttctttttagtgccaacctgttgcaagtctcaatgaaatggataacatgctgttttgaatttccctttttatccgattgttagatatcggaagttgatagcctaagggcatgtgcaagttgtcagccattttattgtaaggtttagagtacatgattgtagttgtactttgtgacggaccatgatattaagccttgatggtgttaagtaggtggatagataatgaggcctccaaaataggtttgaggttttgaattcctacttgcattgacaaggacacaagtggtgcaccattgtaaggtgtagaacctaaatggtgagtaagttcttggcttaattcaatgacatttggcaccttaagctagctcatgagagaagcgatttgcaagtcatcctttgtagtctcctaggcttggtgatgagatgggtcatcttaaccaatgttcaaatattgaggtggtcctagttgtcataactggcataaccatagagtaggaagaactgaaagagctagagtgatttgatgagatctctttccttggcaatctagtttgtgattcaaaatgtaagttggcgttggagttagtattacatatggaatgagaagttttatctctcaagacttttaaggccactgaatgtctctccctactatgggaacctcagccctttgttctcaaaaagccatattggagttggtgtcagaattgatatagtggatttatctcttgattcctttgaagtcaatgaagatctttccctggtatgagacttatttctttacccctagagagactaatgtgttggagctagtgttagagatgaaatgaagggatttgtcttttgtttcccttgatgttggtgaacatccatacacaagggacaatttgcttctttgcgcttaacgaggccaaatttatggttgattggcgtttgttgtgctcttccattggttttatcaattgagtttgcacatttccattttgtgtcaaaagtgcgatggttgtctttgatttgttgtaggtcatggacctataaaggtgtcatgtatcaattggacagtgttgatcttttcatttcccttgttgacatatgtggcttaagtgcttttggaggccatttagcttggtggaactctaaattggcaaaagcgatagaggtagagatgttccattagccatgttagaactttgtacatagaaatttcatgctttgcaaatcaagtgggcaagaaaataaattaattgcattagttataatacaaatagtatgtatacaatctttgtgataacaaagagaatatcttcctttgatttgaccacatatcttgattttgattcaagggcaataaatgcatgttcttgatccagtgttcacttgagtcccaacaaaggcttgttcttgagtaaacttgtgaagaatttatttttattctctagaaagtcttaggaaatttagagatattttaatccatctttgatcttagagttggataaatgataaagatgttgtacttgatattcttccataagcttgttgaagaatgtttaaggtttggttttagcttgcaaaacttcttttgtagattagacttaaggtcttctttcttatttttccaaaatccctatattgaatacctatttataggtggagttggggctttaatttggcatcttttacattgaacaagcattgagtgcctagctgtagaaatacatcaatcattgtacccaatctagttttggccaaaaccctttttttttttaaccaacaagtaggaaaccctaatttacatgatcataggccttgttaatgcagagtttgcataaaacgacattagaacaacccttcaaccttgaattaatgacctcatttgcaatacaagtggtgtccaaatttgtcttccttctacaaaggcattttgagagctagagacctccctacccaccacttttttgagtctatttgttatcacctttgctagtaatttgcatgggcttcccaccaacataattagcctaaaatctttcaaatcttttactccctttttaaggattaagaccaagaaaatagcatataaacttcattcgaagagcccttgttcaaagagttcctcaaagaatcccaacacattactcttcaagaagtcccaacacaactagcaaaaggccgtagtaaaccaatctagtcccagggttttattcctattcaaatacaattcttatttacctatcaaaaaaagggttttatccctattcaaagcagagaaagcaaagataccgtcctttgaaaaagtcaagtctaagcttctagcttccttccctctcaaaaaagcaaagggcatcctactaatacaaggtctccaatctctaaaatcatcaagatggcttcaataagagttaggtaacccctccttgacattggttaaccaagcttattcactcttcttctagtaataaagtttcttcttttgtgtgcatttattgtcctggggaagcattttgtgtttttgtctccttcccataggtataactctcgacttttgctttcaagaggtttcttctagctttgcccacttattatagatttctacacccattattttggccttagcctcttcctcaactagcggagcttccctctactttgcatctcaaaaacctaattgattgagggcatcaactttcctgattgacaccattcccaacacctctcccgattctaagtttttaagtccattttcaacgctttcaatttggaagccaaaataaaattgctagaggcattgaacctatggcccaaccaccaatttttaataagatctttgaaaccctctactttaagccacatattcttgaatctaaagcatgatttttcctcgctcactcctccttgatctaaccatataggtgaatgaccagagattgatatcggcaaaacactttgcaagagcccacttaaatgattctcccaatcatcgaacaatagaaaatgatccaaccctgacatagattagttgttcatgcctccacaccaagtagaaggccctccattctataggagctcttgcagtttctaatcctcaattattctgaaaatctcctcccccaattatgccataaatcatcccttcacccccaagggcagacaaatgcacactagtaagtgggagcattccctgtatcttgttgttttacaagctctaaatatggctttctctaggtgtttactagtgtgcatctttctctaggtgtttactagtgtgcattcatcaaaatgcacactagtaaacacctagagaaagccatatttagagcttgtaaaacaacaagatacaagatacagagaatgctcccacttccatttttaataacaagataaagagtgctataccattagttaacccccttgcttctgcaactttgcactagaaatctcccaacacctagactccgtattaggtgcaaccacatctttggcaccttagtatcttgcaagcaaatcacgtcagccttctccattcttattagggatttaactaccttttgctttttcttaccattaactcctctaacatttcaccacaaagttttaaccttcattgagggacaggagctatttcctacccttcttgccacttctcccttttttccctacttttcttactatgttgttatatttaattaaaaaattccaaaaactccctcttagttttatatgtagcatttgtcttcctacctttcactgcaaaagggacattcttcctctttgccttaatccttaattttcatttaaaaaaaaggcaaaataacctctctgttggtagccccacaaacctactaaacataatcagcttgctttttggccagttagcacaaaaatccatccccgcctctaagcttatggtcttccccttactatcgctttgcccttatgcaactcaccacccattgaggccccatggtgacacaatctattctcaaggaactccattgaattattatcttgtaggacaattctcaaagggaggtagagatagcaagccccctagaggattcctttggcccctcttcattcctaaacactccgaagggacaaaacccactctcaaaagaaagaaaaaaatgggaaaccccaccccccaagctataacaagaggaagagcacacacctaggaaactggcaaaacaggttggagaaggctccattgccatcagtgaaacaccttagactattgaaatagccttgcctccgtaatagcactctactaatgtacaccatcctcctccgttgcacggtctgcaggaaagctcatgggtagaagcttccctaagctggctttggggggcccttatctcccacatcctattggcccttccttccttgagggccttaaggaattggtcgctccaccctatccaaaatataaaagctcacctttgggctattagttttattccttcagcccacaagccctaatccattagaagctttcctgcccacttcagcatttgcgatcaaaatttcccagcccactagcctctttgctgcctaaatccgaaaccatcactttgtcgctctcagcttaggcctctaaactagtggagtccattaagcgttgggctttgctatcacacaccacctctcccttatgaccagcctccactccattgtcaaacattacccaagacctcctatgaaccccaccctgctctcccacctcatcccactaagaaaccaatgcttttcatagcctcctttgcacgagaagaagacacatcttctactcatggcatgaagaatgaagtcccccactctcattggcacatgatcctccatcactccttcccagacctccaaccttctgtttgcagtacttggaaccccctactgcatccatggcataatcccccaccataattgaatagaaaaactccagcaacccacaaccacctatatggttcctaacaactttctcccattagttttcacaagaatgcttgctcgccaaaaattttcatctattgcaacaaagccattgcaagagtctcccagccttttgaacaaattcctatcctaaaaatgcactagcaacctttctattctcacttaggcttctttcacacgaattccttttctatgacaacttgtctctaggacccatttatctaagaacatgtccttttgcctatatctcctcaacccctgtttaaggatcatctcagtattagtagctaattcaagttcaaacagaagcaaggatccccccaatgcaaccacctgtaaatccctttttagattctagttgtactaagcccacctctttagcatctttatattcagagctttatgtaaaaaagtcccccatctgcccaccaaacatctttgcataacctttatcttgttacatcctcttcccctagttccaaccacacagcatcacccacttcaaagcgagacttcctcaaaacctttgaaaaggctgcctcacctcctgaaggaagaggaaccaccccaaggcttcaacacttgtgggtaaaatcatccaacccccaggaaacctcttgacttgttggtaaaaactgcccaaccctttggaaacccccctaccttctgggaacactaggatgaaccaccttgccttcacatagcaagctgagtatagaatatacccccctgctccattgctatggagctctaacctgtaccaaatgcccccttccattcattaagggctttccctcttccattggcatcacaattccaatccctccaacacaaaggaaggacccttctctcttggtccaactagagaacccacaacccctttccagaactatacggaccctttctttgacgacctctaccaagatttcgatagattttgaatctaccccaaatcagcctttcccccctttcatcttgtaggaattcccttttttttcctggaacattcttcgtttcttaaaagtggtgcaaaaagaggactttattaaaggaatttgatgtcttgatttaagaagtttgttttattcctttgtgagatttggcactaggagaatatatttttataattctccttttaactttgatttgcttgacttttatttattttattttgcaaaactccattttgtggtcttcctaatgtttacacatgtcaattgttaagatccaaataaattttttatttggtgagctgggatcaccaaaatcttgatgtccatgcttggtgctagttctatgaaatttttttctgccattcagttctaaggctatataatctgttcaatgatagaccatattcttattgcaccagtccatgttctttatgatcttcctcttcttgttggagtgccttcagcttgctttaaatcactcccttataatttccattttgatacacatgacaaaattgcatttgatcactcctcatcttttcctctattgatgccgcccctagtttcacatggatgtatttcatgcatatctcaatgtggcacaatgctgatgtatgatactctctctaatatttaatatcttgaaattttatgatatgatattcttttcctgtatttctagttgtttgcttatgtttgatgattttttctagtaacttgaagtaggtaagtccatgttatgacaaaaactatttagaatcaaagatgattggagagatcattgctgatggtattgctttgtatgttataggtgtggatattagt

SEQ ID NO: 10652 - DNA, 1508 bp, Vitis vinifera
  Intron number 4 from transcript GSVIVT01032210001 (locus G SVIVG01032210001) derived from phytozome v7.0 (chr-ID chr1 3; pos 21511257 to 21512764)
aagacaccagtaacaggactatatgctctgccttaatcaccctatcatagagatgagtgatccatcacccttaatcaaattatgattttttgttgcagaaactggagtcaattttagcaaaaaaaattgcagataaaacttacttggaagcttttgtagttgtacgagtcagaactttatctggggcctcatgacatgcctgttgttagattgcatatctacgcaacacacataggctattaattccctttctattagaatcaagtacgcccattcattataagtaacttttttgttcttaagaattagtttcaaaatgttcattttaaaggaattccatttcgtgcatgtagggtgtgaaggagaagataatgcaaatggaatccaattctctaaccacagggtcagccagttaaagtgagtatactctatttcattcatgatcttttttgactttgtgcatctgaattgcattgtcctcaataagcttcctttttccatatatctctgtataaaattctgccttttttttccttacgtattcatagatgtgcatttatcaacataagctgtgttcttaatgcttttaaacctatgacttcacatttttccatcacaggattctaccatgtctttataattttccatttatcaacatgatctttgttcaacttacaggtttttcaagtgagtgataaagaatacaaatggttagatatcagtcttttctttgtcctcttgattgcactgcatctttatttggaattggatattcctatttgtaacttgtttttcttggggtttttaattacattccttgttacaataagtcaggattggccttttctcaaaaataattgttctgcttcttggtcttctcctcagttaatgcaagcatcaaatttctacctttgttatatctgtagataattttctggtttgaattgtacagcacacctaaataattcaaagttgcagaagtcttgctggctcacaaattaccatctcatgtggattttgaagaaaggaaatctgcaacttgagatacaatgagctatgatcattcttacatttttaaagcttcttcatttgtatcgtatgttctgatggcatttactttttctcattacacatgcatgaggaagattttatgatttccattataagttttgaataactatatttgcatttctttttatttcaagtagatggaggggtgaaaattcttttgcatgtttgttgatgttttgcacttaaaactctactctggtgtttggtgtttaaaaaggggtacttcatgcagataatgaaagtataaatagttctttaccataaaaaaatgcttcatggttgttaagatccatctaattctttgtccttttattgacatgttcttcaacttgtggaagacttggaagggagagcttgaatcaaattaagccaacaccttgcaaaagatgaattctggctaagaaaccccactactctcaagttctttcttatccaat

SEQ ID NO: 10653 - DNA, 12143 bp, Vitis vinifera
  Intron number 2 from transcript GSVIVT01035310001 (locus G SVIVG01035310001) derived from phytozome v7.0 (chr-ID chr4 ; pos 300417 to 312559)
aagttgcacctccacttcgaaatgacacttaccccaccacttacaagttgtgaggataaagcccttaaaaacatgatatgatgtaataaatttggaagtcattatttatttaatgatgttccgatttcacttttatctatccttattccatatattatactttatgagcattcttgcctgcatcttttgcattgcacgtaacttaggtgcattaagagttgcacagaagatctaggtcatgggttccttgcaaatatatgacttgttcacaaccagttcatgggtctaggaagcccattaggggttgtaataatccacttcctaattggaagaatggctagtcttagctattgggatgagtttcccatggtaagtgcattagtgtgtatgattacatattggacatgacctatggtgaatcatgaattaaggttatcaagcagtcatgacctcatcaaactacttcattatattgtctctcaaccttgagagaatatcgagctcgtactaaagttagcaatgactttgacatacgagtgagatcgtaagttgatcatatattccctatggattgagtcattgttgatggaaaatggtagcaataggtattttcaataaaaacaccatgatgtctcttgggattaagacaatgtgccccttttggtgatcctaaagaggtgtgtttatggaaactatggtcatagtagttccttaagtaaaactcgacataggctctttgagagctaagacatgtcaattgaatacacaatagaaggatttataactcaaggatggtagaggtagtcttgaaagactaataacttttactttgttagactatgaatatcagttcatgggaagactaaacacaataaatagcaagtcacaaacctgaacatttggtatctcattgttattttcaataaaataacaatgagatggtaagttgatcatatataccctatggattgggttattgttgatggaagatggtagcaataggtattttcaataagcaccataatatctcttgggattaagatagtgtgcccccttgggtaatcttaaaaagtgtgttcatggaaactatggtcatagtaattcattaagtaaaactcaacataggctctttgagagctaagacatgtcaattgaatacacaatggaggatttataactcaaggatgatagaggtagccttgaaagactaataactttcactttgttagactacgaacatcagttcatggggagactaaacacaataaatagcaagtcacaagctcgagcatttggtatctcgttgttatttacataagatacgggagttcaattgattctctgtagtgggatgttgaatcaactttagaattggattttgagagagtcggtattcttatgggttccaatggtccttgctctaagcttatatactttgttggcatgggttataagagtcggattgactctaggttcacttttgtacataaaggcattttgataattacacaaggttacacaaaggtaagtgaacaaggtttttaaattgggttaattgattaattagtaggccttgtttagttaattaatcaattaggactttttttgggctatattaagtgacctaagcccttagtgggctcaagtcacttaaacctaatagaaaaccctttaaatacccccttaagggttagagtttatatagtttttctaaagagccatcttctatctctagagagaaagagaaagagtcatagcgtccaccctcccttctatctccactaaaagtgtgtcaagatcaaggttcaagtcattgggaggaagactttggatttacgagacttctgtgatttcgttcttcattttcaccacgtggatttgatttgagaacatacgaatttgaggtatggttttcattagcactttctgaatccctttaaagtttaaaaatgttatttttccgttgtgtataggattaatttagaaaatgcttagaatagttatgcatgttcgtaacctgatctgagcttaggaaatggagagatcctagttttttccctcaatgtttgtgctccaaagtgttgagatagtttagagggtgacatgatgattaacataataccttatatggagaacctagtgaatcccttctccaagacattgatagggagagtctttgctagtcacatggatagcataggtttcagatgagtatttggcatgctttaaaggcatgatactttgagggctaataggagaatgttaggataaagcccttaaaaacatgacatgatgtaataaatttggaattcattatttatttaatgatgttttagtttcacttttatcaatccttattccatgtattatactttatgagcattcttgtctgcattttgtgcattgtacatgacttaattgcattaggagttatatagaagatctaagtcatgggtttcttgcaaataaatgacttgttcacaactgattcatgggtctaggcaacccactagaggttatagtgcaccataccaccttctaattggagggatgactagtcttaattatcaggatgagtttcccattgtgagtgcattactgtgtatggttacacattagacaaaacctacagtgagtcatggcttaaggctatcaagtagtcatgtccttaccaaccaacttcattatgtcgtctctcaactttaagataatattgagtttatactaaagttagcaatggctttgacctacaggtgaaatcataagctaatcatttgggtcattgttgatggaagtcggtagcaataggtattctcaatagaaataccatgatatctcatgggatttagacagtgtgtccccttgagtaatcttaagaaagtgtgttcatacaaactatgaccatagtagttccttaagtggaacttgacatagactctttgacaactaagacatgtcaattaaatatataattggacgatctgtaactcaaagatagtagaggtaatctttaaggattgataactttcactttattagactacagacactaattcatggggagactaaacataatggatagcaggtcatggacccgagtacgtaatatctcgttgttatttacataggatattggagttcaattgattctctatggtggaatgttgaatcaactttagaattggattttgaggaagtcagtactcctatgggtcccaatagtccacactctaagctcatataacctattgacacggattatgagggtcggattggctttaggttcatttttgtgtataagggcattttgataattacacaaggttgcataagggtaagtggacaaggtctctaaattgaactaattgattaattaataggccttattgggttaattaatcaattaggacccattttgagttagattaagtgacccaagcccatgtgggctcaagtcacttaagcatacttaggaaccctatatataccccctaaggtttagggttcccacaacttttgtcctccacctgttaggatagagcccttaaaagtataacatgatgtaataaatttgggattctttatttatttaatgatgttctagtttcacattatttatttaatgtgaagacatttggaacccatctctccttcacagatttatccaaaagttgcatgctctgactcaagtttccatgcatacacaaccctctgaagtgatcatcaactccattaccttagtagttttttccatgtcaagcatacagttagttttgagagcgagacccattttcactatgaactcaatgactgtgcttcgatcaactagtttggcattttcatttctttatggcaaccaaatttggactagatctaacacttggcaggccaaagggcatgaatcaaaaacagaggaaagcgacggaaaaaaaaaaaaaaaacaaagcacaaatggttgaaacaaaacgaactaataaaagccacattttatgtttcaatcaaccgacttagatgtaggtgagtgaaactaaaaagattttaaacaagaacacaagtattattcagacattctataggaaagctacaacagagataaatcatgctcaaacataaccaaaggaaatgaggcatgaatcaactataaccaaatcacagaaaccaagagattaacaataacaagtgtgtgtcctacgattatccagacccaaaacatggaaaattttagaatctaattgataaatgaaagaaaaaaatggaaaaaatggagatgaagaaaattaaatacacaatttaaaggactgagaacctgacctgaactcttctctaagatttagcaatttatgaatgtatcttcaggcccctgtagacgaatccatgcttggtggtagtatgcttattgatgacagtctggagatgtggaaatcaaatgattctgatgaactaaatttgatgcgtgatgagatagatgacgtgttatctaaggatcacaaagttcatcaatagaaactcgtttgatgatgcgtcaatctgatggagagaattcgttgataaaaaatgatgaaatgccaatttgaagatagtgactgcgattcatctccggagatgaatctaatgagaacgttcaggagtcataaatggagagtgtagggacccctccccttgggaaacacgtggcacgcagctcatagtgacgcgtggcacgtgttatcagccggaccgtcattatccggattcccctaaggatatgcatggtgcagatatcctatccggaccgcctcaaggaaaggcaaacgacgtttcatcttctcctatccaaggaagagcaaacgacgttggcagagcgtacacatccggatagtctccacaacacatccggatagtcaacatgagccatccggatataaatcttctggatggtcaattaaagtaaagcgagtcttacacgcaatcacaacaagcagccatggcccacatcccatcacctgcagaatgagaagacaagaggaagtgacagcaagtcacttcccacgatcattctgcataatcgcttcccacgatctctgacggccgcatcacctaccatagtctctgacagccattcataggatgatagtgctcctactaacacctattgtcatcatcacaacagaaaagatctcctcaccattaatgagaggaacagtacccctgaagctggatatatataccttcgcacgaagaagaaaggggatctcctggtaatctcttgatacctagaaaaaggccaactgatttatatatctctttctcaccatggctaacaaaaccatcggagggtgcgtccggacaccctgtccgaatgccttttgcaggtgcaaccactgaatcaagaaccccttgtgtgttgagaatcacgtatccatccatatagcagcaacgtggaccatcggatacgcgaggtgacaacagagagctctaatggcggtggtgatttgcagcaatgtcaatctctggtggcagtgacagcaagctctaatggtggtaaactacgccaacagagacaatctccatgaattgcacaacaaacttcaatggcgatctccaatggtggtgatgaattctcctacaacaatgaactctcattctcctgtagagatgaactctcagatgttggtgaattatttttatatatttttttaataaattttaaatgaaataaaataaataaattttaaatttttatacatttttttaaactcatttaacttattttaatttttcaattataaaattaaataatttgaaaatatataaatttctaactaattttaattatattttattttcttttataattttcatatatagtataaccagtaccaatgttttcaaaatcagaccggcgcttgaaccagaaaagttaccagttcatgatttacggttcattagttgaactggtggtcaaaccgcggtcgaatcaatgacatcataaataataattttttttcttttttctcactaactaatcccacatcagaaatggataaaaaatatgtaggaattgtggtataaaaggcaagctagaatcattaacttgcaagactaaaagcttattgggcttgatgacaaacgggttggatgggctcctcatggaatgatccggttctcttatggtatcaaaacttttttttttggctttaaaataaataaataaataaactgttcggttcgctaagaatcgcccgattggggcagttcactagttcaaccgctggttttgttaccgatcggaccaactggtccagtccgatttttaaatcattatcaaatacaataaaataattttccttaacatttcttttatttttttaagtacttctcaagaatcaaacataatcataagactaatcatattttttattataagatcattcgaatacaatgccccaagtgagaatctcaaaacgtttgtcaatgttttactaatattaagattttgaaaatctatacaatttctttttctttttttctttttttaatatttggatgatagagcatgagtatacaagaaaggtcaatgcaaagatcaatgtctacaatcttgaaattgcacttctagagttgggccctaaaagagaacccaataggggggaggggtagcatataaaccttcctcaatgggcatggcaacaccttggagaaggaaagttataagtgaaagcactggatgaggagatcatggcacaatgctacttcaaaaaaatgagtactatgttcccaataatcaaactttatcatgaaaatgttgataatagcgaggattatcttatttacaagtatagagacaaataggcaaaaggtaaataaattattaatagagcttaaaataataaattaagcaaataaacatatggtaagatcgaaactcattatccttctactaaataaaattctaataccatattggataactaaattttttaagaacttaaacttaagatttggatccttatgattgtatatcacattttctaataatatatcaaatacttttctagattttgtgttgacttgtgattacttctctaaatcaatttttcagcatcttgtatatatgtatttgttaggatgaatctgtcacgccccaagacccactccaagggcgtgacggtcatttcacacctcaaacccgaaggcttaaagtataatctgacccaaacaatcatattgtaactggatgttaccaattaccaaatacctgttcagagtagcggaacaaaatctaaaatcctcaaaattcaatttccaaataacttccaaatatcaaatgatccaaatgaacataactaacagttaaacaaaatccaacataaaatcctaagtcaaatcctaatgatgaccattcctcagcctagccatcactcctcacccgaactaagagtacctgaaaaattttcaacaattgggaatgagctcacagcccaataaggaatattaatgcaattcatggatcaaatattttcatttcaaataggagatatcaatttttttttttctcatcgaatatcagagtttcaaaaataccaatatattcaaaattcaaccaaccaatttcatatcaaattcaaacactttcacatcagactcaatcaaatccattcaattttttcattactctggttatcaaatatcaaatgcccagttaggtgggacttttcaaatgggtggctagcctcaaattgttcctggtggacgaaaccaaacactactagtactagtaacctctaaccaaacccctagaggctggggtccaaatcaattacattcccaccatgaaatgtaaaggtcaactattatagcccgttgacagggccgaatagtcaactattatatcccgttgacaagggccaaacaaaccagagtgatgtttttgttcaagtattcaaatttacacaacataatatctccatattttgtgtcataaataaaacaaaatattccaacataatattcagtgcaaaacaatttgatccatgcatggtaacaaaatatcattttcttttccacaattcaaaataacatataaaataatttaattttataaatattgcattaacttcccttacctcaaaagaagtccttgaaagcttgggagaagaataattctgaaaaaaatataatctactcttcacctaatataacataagagaaacaattattactatttatttataatttaactaatttattccttatttaaataaaactaataaattcccaatttgtttctaataacacactactaatttaattaaattacaattttatttcattataaaattctatatatatatatatatatatatatatatatatatatatatatatatatatattgctaaatctattattactattatcttaattattaatctgaaactaaatatcattattttattaattacctaatttgaggctaaatcattattacaaaaaatatattattatatattttgctaaatctcttacatgtatggggtacacaccaaacaagtaaaacaaagcaaaaaaattttttttttccattgccatcatcataataatgaatcattatatatatatatataagtctccttccatccgggcacacgcccaaattttttttttttttattttccttccttccaatgctgtgcacacgcgttctccttttttttttttttttaattaaccctaacctaaaattgaaatattccaaggaattttttttttctaataaaacttaagatctcccaaattccaatactaaaatcaaaatattaaattttcactatttgatattaaaacgaattaaaaaaaataatctaaccctaatctagatttggggttttccaaaaaaaatatatctaatgtgtttgaaattaatcaatgaatctaaaatattaaactaggggttagaatcttacctatagagattttttcttcaaccctgaaatctgactccaaccttacgttttctgaaattctgcgaataggaactctattcagaaaagaagggaaaaaataaaatttctaatttatacctagggtatttattcgtaaaattacacttttacccctcttccactttattaaattaattaattaactaattaaattattaataacaatttcctaaattacccttaaaagaaaatgcctgggcgttacagaatcaattatcaatgaatgcaaaaatgcaactcctcatagagtctcttgcttatttcctctacaacttaattagaaaaacttaaaagaactccagagtgatttcacaaagaaataggataattattttatcttcaaacctgcaaaaaagatatggaaaccgtatcattgaaataattaaaacagaaaacaattggaatcaaagtgctattgccttattttaaaaacaaaaaataaataaaataaatcttaggttttatgcaaaactaaatattagttgcctaaagctccttatttggaatactagatgggtgtcaagcatcatttcaactcggcacctccttcggtaaataccaaaaataatatttgttttgggaacaagactagagttttgagcggatataatatattttaaaaaaatacacaaaatagatttccaagtaaaataattctcaagctagtatatttcagctacatgggcatccatatggtcgtagatttttttttttttaatgttggtctatgtcataaaactttaattagtaactacgattttgattttttaaaacataaaatgatagttagatattatagttttaaatttatttttaaaatcataatcatcaattacgattataaacttaaatttaaaaccttagttggtaactaatgttttgaccgttttacaacaaaatcaaaattatagttcacaactatgatcatgtgatatagatacaagtgtcaataaaacactccaatttgaaaattattttgagaggggatctactttgtagatttttatttgttcaaataaattatttttcctcaaggcttagaaaactaacttgtttagaactaaattcaattatacactctcctaatttttctttttataagatcaaatccacgttatcagttttccactagaatcctcatgattacttgtagaattgttgagatgaaatggaagtgtggtatgagatgcatgcttgtttaaacttcagtttcaatcttggtcaatgctgtccattcccttagatgtgcaggatgtggaaccactgctggatcctgttgtgagacttgaccatcaatatccttttggacttgtgaaagcaaccttcccccgttttcttgacgcaacctgctacttccacgtgagcatgccaaacacgcttagggcctgtttgttggtgttttcaaatacatttttggaaacagtttttactgttttcagaaataaaattatgtttatttattctcaaaaataaaaagaataaaaaaaaaatatttagttcagttaataaaaataatttttaataacaaataaaacaaaaaaacttgtttggaaaatattattgttggttttgttttttaaagttgagtattttatttaactaattgatattgtaaatatataaataatttttcttcgtaaaaataaaaatgttccattctaaacattttttgcatcggttttaatttttttaaacaaattattactttgtaaacatgtctaaatatgtttgatttcaataattgataaaccatcttatcaaaatatcataaatcggtaaatatcaataattggattttatgaagataaaatttatgatatcaaataataatgcattatacttggaaaccgatgatttatcttttctactaataatatatttatgataattttttatttaaaaatatttataattttattttatatttaagaattatataaaagataaaaaaattaaagtaaatcaaactaatttatttataaaaaattattaatttttataaatttacatattatatatatatatatatatatatatacgacaggaatccttgtactcttttctctcattctccttatgttctccgtttatcttccaaggcccaaacttttattcactaaggttgaaccatttctctcctcaaatattaactcactaaagtcaaaatttagatctatgattgttgttaagattcttggttaggatttcatcttttgtgttattgtttatgtttttgtttggtttttgagaaatcctagaatttatgaaagtttctgctttgaaatacattaaaaaaaatcatatcaggataaaatcccaaaatatccgaaaaatattgaaatggaaatgaagaaaaaataaatataaataaaacttgttgattaagttgaattttttttaaaccgaattttcaattttctaatttttctcattttccttggcagtgtaaaaaaaaaaaaaagataagagcacatagagaacacgacaacaacacaaaaaacatcattttaaaaccaggttttagaaaacacataaaacacttgagaacaaaaaacactcttttataaaacatgatttttgtgttttttgttctaaaaaaagaaaacaatttttggaaataccaaccaaacaagcccttaatgactcatttttcttttatttatttattttatttttttgcttatttgtttattctcttgtctgtttttatttttaaagaaataaaaatatttttcaaaaaaataaaaaaaataaaattaaagaatgttctccaaactaaatgaatattatagaacccgaccaacaacatactaaacaaaatgtaaaaatctaaaaatatgtttggtagtaattgtttttaatatttttaatacctaaaaatgaaaaaatttagtgttaaaaaatgaaaaatattttataaaatcactgtaaaacttattctaaattattgaactaaatacgaaaataacatatcatgcacgaaaataagatgaagcaaaaataacttgtaatgtacaccttgggaaacacatgatattttagcatcgtgtagcagattgcaaaatcaaatttcgtgaggaatcaggtgcccataaatctcgtatcttcataatggcatatagaggaaagtcaaggtaaacgaaaccatcatattcttca

SEQ ID NO: 10654 - DNA, 3648 bp, Vitis vinifera
  Intron number 2 from transcript GSVIVT01020778001 (locus G SVIVG01020778001) derived from phytozome v7.0 (chr-ID chr1 2; pos 2099296 to 2102943)
ttccagagcagagattggtttctgggcagaaactcgtagctagtgtttcagaaaaagactggtctcaaggtttgatttcttttgacgttactagtaatgctgttgctgcacgtgttggatccaatccacccttggaatattttctctggcgagtcgattacctcgacgctataatatttaaaaacgacggcctctttctttcttcaggcgagccaatttgggagtttccgagtcctcctgtatcatttactcggtacatgaagctggaacccacagggcaattgagattttatgagtgggtaaaatatgggtggagggtttctcgcagtcccttatttggtgactttgattgtctgtaccccttgagatgtggcaaatatggaatttgctcaaatcggcagtgcagttgtcccataccaaccggtgaagaaaacatccattttaggataatagatcagaaggagcctgatcttgggtgttccgtagttactccattgttatgtgaagcttctcatgatcagagttttgtcgagctcaaggatacttcatattttcctgctctcttctatagtgaggatgctacggaggttgaaagttgcaagcaggcctgtctgaaaaattgctcctgccaagctgcaatgtttacaaaaatttcgagtattacaaaatgctctttcctatctgaaatcttttctctcacggatatggcagcatataaagaactaattgattcgaccctattccttaaggtgcaaaaccttccaaaaaagcccaaggctccttcgccagacattaatcctccccttatccctcctcctccctcaaatacagggagcgagattatagtcatgctggtatcctgcttggcagctttctttggtctatttcttatcgtcgtgacaaggcaatctcttcttctgaagagatacgatgccaaggaagatgaggaggattatctctgccaagtaccagggttgcctactagattctcttatgaagtcttggtagaggcaactgaaaattttagtcagaatcttggaaaaggaggatttggttgtgtctttgaagggattctgagtgatggaaccaaaattgcagtcaagtgtctcaatggttttgctcaaactagagattcgttcttagccgaggttgagacgatgggcagcattcaccatctcaatttggtaaaactgattggatactgcgccattaaatcaaataagttcttagtttatgaatacatgtgtaatggatccctagataaatggctcttccacagaaaccaagagctttcccttgactggaaaaccagaaggaagatcatcctggatatagcaaagggtctaacctatctccacgaagaatgccacaggaaaatagtgcacttagatattaaaccccagaacatccttttggataaaaatttcaatgcaaaagtttctgattttggtctgtccaagctaatggacagggaccaaagccaagttgtgacgacattgagaggaactttggggtatttggctcctgaatggttcagctctgcaatcacagaaaaagcagatgtatatagctttggtgttgtgaccttggaaattttgtgtggacaaaaaaatctggatcacgctaggcctgagaaagatatgcatttgttgaatcttttcaaggtgaaggcagaggagggaggactgtcagatttggttgataagcatagcaaggatatgcagttacatggagcagaggttgtggagatgatgagagttgctgcatggtgtttacaaagtgacatcactaggaggccttccatagcctgtagctctaattaaagtgtgatgcttttatgaaattttatttaggtggtgtttgtttttttagttttttgctgaaaatcatttagttttagaatttaggttatttgtttttttacttttttatgatttattataaactttttactaaatagaaaaagtcaaaatatgtggctttttctaaatagaaaaaataacacaatgattttttttactttttaatacttaatagaaataaaatactataaaaataaataacttaatatttaatactattaaatattaaggttctatttagaaataagtaagtctttatttggttgtagctgaaaatttcaaactttcattttcaccttcttccttttgaattcaagtggctttagtcaaagtaaacaacgtctgcaaagacgagtggcagaagcacattgtccgcattctccaaggccgtcattactccctctgcccctacttcattcaatgtcttgaccaattgttccaaggagtggaaaaataaataaataaataaataaataaaaacgatgaattaacatcatgatcgcaattttcactcatttggatatggcctttcttgactaaatgaaaacaataatattaaaaccctaaatccacgcaaaagaagactctaacaaaatgtctttggcttgaatcaaacagccgggtgagagggagaagaaatacgaaatcacaacgtttataaaatatattaaataaaatatcttaatattattattgcattttctttatattaatatgactaaaatataaggtaatagctacttctcttatgccacatagaaaggaaattcaaatatctattatatataatatttttaatacttgaaaaaaaattttgaaatttattttttttaatctaaaatcactccaaacaagctcttaatagatcaacattcatattttcgtgagagagagaggggcaaaattttaaacccttcatcctttgtagcattattataacttgacttgaccttaaaattaaactaagttatttggaagagagacaaaatttcaaatttatgatttgttctcaacaaaaatcattcatgctttatatcactattgtaacttgacttgacctttaaattccaccgtgttgtttgcaacttcgtccattttcttaatctcttgttgcattccttcaatgttgtgtgggtggaaatctaaatccagcttcttaattatccggaaaagcaatggcctggcatcgattggagtcttgttatgttgctgttctttccctcctcgctctcatctctctctgtcgtggtgctaccctatatgtgcacgattatcctaatattgcacgtcactccagttcatggactaacgttgaacaagagcttatctggggggatgagaaggtctctctgctgcccattctttgcatcaaaggcgaaggtgcagggttctgctttggattctactgccgctatataagagatgaatgcctcttggctgttgtcatctgccccgcatacaatctccctcttatatcatctccagaactagtgtggtctgctaatcggaacaatcctgtccggataaatgctactttacagctaactggaggaggagacttgatcttgaaggatgctgatggcaaatttgtttggtccacaaacacaacaggaaagagtgtttcaggcttaaaattgactgaagcgggagatgttgtcctctttgacgcaaacaatgctacggtttggcagtcttttgaccaccccaccgatgctctacttcagggccaaaagatggtttcagggaagaagcttacagccagcttagccacagataactggactga

SEQ ID NO: 10655 - DNA, 2581 bp, Vitis vinifera
  Intron number 1 from transcript GSVIVT01010604001 (locus G SVIVG01010604001) derived from phytozome v7.0 (chr-ID chr1 6; pos 16113382 to 16115962)
cggttataatacagtctgctttcagaggctacctggtaatcatgaatatttttatttcctacaatgcccttagattttggaattaattacgttactttactttactttaatgcatggctgtgttgttggatgtttgatttgatgacttaatcattgtgagctttcttcttcacatgacattacatgaggaaatgtgtaattttattttttttaaattaaaaatataattttatttaaaattttctttatttagatataattgctattactacgtactgacggcaacgaggattttgaaatgataaggatcgatatgaatatatttcgtatttttatttttaaataaaaaataataataaccttatgtaagatacaaaaatttgaaaaagttgtggttttaaaaactatttaaaatattaaatcatcagtaaaattttatcatctcaaaatttcaaatttttttaaagtgatttttaaaggcattaaataaatcttcttcttctttttgtaaatactctatttttatataaacttttttatttcaaaaacaaatatatatccaaattaacaaatactaaatgttttttaatgtacatgaacaaatcctgttttaaaaaatagttatttattcttaaaaataaaaaatagaatatttttattaattttataataactgttttaaaaaataattatataaatataaaaaataattaaaaataaaataatacatataaaagttattttaaaaatattttaggttgttaaatagatttttattttataaaacattaaaaacaaattttaaaaattgtattcaaaaaccattttggaaaacgactaccaaactataattttattttaaaatttgaaggtgaattataatttatatttcatgtgagatagtttgaaaaagaatgtgaagtactagtccttgtatgaaacaaagtaaataaatatgacaagaattgtaagtcggtgtgtaatttcatttggaagaaaaggcataattcttggtggttgagggtcattattagtcttagctttgaatttggtaagaaaagaaaggagatttggaaggtggtgggggcactcatttgtagtgatgtgtgttttctgcatcaaagactagtcatttcctattgtccacggcacactcttgcatcatctatttatttcaacattttgaggtccatttattatgtctctctacacctctttccttctaccaatccaattagaatcattaaggtcatacccaaaaataatacaaacatttctctaagatgtggttgggatatcttttaggactttttccattcttttgtcacccaagggggctttggcctttggggtttgcaaaaatgaagtggagaccttttttgattgttccacctaccatgaatagatttgggtaggactagatgctttggccccacctaatttgtattagtccttagtgcttcaaaccaaatatttagagtaaaatggaatggaatggaatggtagtatagattttaattccatggcatgtttggaaatgggaagtgttgatcatatctgcagtgattatggcattaaaagtggctttagggttattgggtgtagttatttgtaaagtctgtctcaccaaattcagtcttgtcatgctatgcctttcctgctttcctttcttttacaatgcaaaggcatctcctcctgcttttctctagtggttttgggcttgtaaagggcaaaagttacactgatttagtaagaaaaatgcatacaaattctcaaccaaataataggtatgtgtcttttgggcacttgaatcattgaatgtggccttacccacccatgccagtttttggaaaagcacttatttcacctccccttttgagactggattcagtacttctgggcattggttatttctgcagctaagtttttggcatcatatctctcttttacctgcccaaatttgaactctgccatctacccgccatgaattcatatccaaaaaccatatttattgcaaaaagaaaaaaaaaagttttcattggtcacaaatttgttacatgaagatctaaatttaattagggtataacaatgctagttttaaagtcatgaatggtcatccaaatgaaaattcttagaacagacgatgtcgagtcgttggtgcccatcaattagtttttaaatgaaatgattttaattttattttagtattagtttatttaacatatagcaatgtcaatttcaaggtcaaaaatgggttacccgaatgataattcttagaacaaataaatggggtgtgatattaaacattgtattaagtttaatctattgtcgttgaatatcaattgatttttatattgaaccgtcaaagtcttataatgtcatttagtatatttcttacatcaaacaaagggatatgatatataatattataaaagatttaatcaatcagatttggaatgagatggtcaaaacttttcatattagttttgaacagttttgatctctaaggggaaaagggtgatctgattatttgggataatgtgtaggcaaggagggcactgaaggcactgaaagcgctggt

SEQ ID NO: 10656 - DNA, 1307 bp, Vitis vinifera
  Intron number 2 from transcript GSVIVT01021326001 (locus G SVIVG01021326001) derived from phytozome v7.0 (chr-ID chr1 0; pos 4055841 to 4057147 reverse strand)
catttgtagtgaatctaggagacattctagaggttttcccataccccatctctcccccttgaaagaaaaaaaaaaaaaaatgcattagaacaaagtatatgacaacctgagtttagctcataatttagagacaccagatataatttttcaaactttttaaagttttccgttttagataaatatcatcttcaatcattgtagttaacttgcagctcaatttcttaaaaaagaaaaagaggggaaaagagagagagagagagagaggatccaccccacaacaacctgaactttccttttagttaggcagagtgcatgaacgtaataattgtatgctttgaatcgatcctggcccatattcttcacattcttacagaaaaaaaaaaggggggctattccaacaaaattgcattttgttccacctactcattctaattggatttcaacatcaatacatctcagttggaagtgaggagtagcactatcactgactgcacaagtgttcatgcatgattaggcaaaaagttctatggttaggtgtcactactaaaattcattggagaagctagcattctaacgaactaatcatttttgtaaatcatgtttctttacaaaatatcaaaaaatctatttaaataattttataaataaaaatttttctaattaatgaggctacatgataagttaaataatcaagcctgtgaatactaaggtgaatatcatgatttaggaagtagaagccatttcagtcccatgtttcttggttttaataactatatacgagttagttaaaatatcactaaaaatttcatattaattttttgcattattatttgtgtcacctcaaagatagtgggtttgtcatttaaagaaagaatacaattaacttttagtaggtttttaaggtcaaaattggactacaaattgtgtttttttacttattttatacggaggatcgactgggatctatacacatttgcaggtggagatatatagaatctcactatctactgtgtggtctttttagtggaagcggttccactaaccatgcatgtatcttcgtttatggatgttatcattgtcattctgaaatgggtgaatccttatccattttttcttcttttattttcaatggaatctggttttttgtctcaacacaactgttaaaagttatgtactcatgatgtattaataagactattctaagttgcgatattcacaaaaggaaatcaaaacaattgcggaaacatttcttctttttttttttctttttgaccaagtagtgcttcctgtattgcagattgtgagca

SEQ ID NO: 10657 - DNA, 9250 bp, Vitis vinifera
  Intron number 7 from transcript GSVIVT01001690001 (locus G SVIVG01001690001) derived from phytozome v7.0 (chr-ID chr1 8; pos 14306895 to 14316144 reverse strand)
gaaaaagcaattgctagaagtgaggtaaattgtttctcagtgtattcaatgatatagtttttggattttatttttgagtttggttatggttgctctagaaacagatttgagaaaaaaatgttgttcttagtgttactagatttcagtacacgattttcttgataatcattggaaaaataatctggtagttatgtttcatgctgcaattagtaattgaacatgtttcaacaagattacaaagaaactaagaaaaaatggaatagatggatattccctcctgttagagctgtagcccacataagttggcttgataaacattattagatcattactcaacaacttaaactttttggtcaaattgggagcttttaataccttaaaatactggattaaaattttttgtagtgataacatctttcatccatggaaaaaagtttgcatgcaaaagcttcctatattctagctatttaaatctccccctattgtcgtacttctgagatttagtgtaaatgcatctgcttgagatatgacaaataaggcatggtagattcattagtgtgtttcatactctctccaactagtcgctcttgttgtgtcagaagtccattaaagtagtgatatcagtaaaaattagagaaaagtttgagcagtagaaggtcgggtaccagaaaaaaagaaacctagtttgccaaaaatctatcattaaaataaacccatgttccattttccaacaatttgttgtcttgttttggtaaacttttggtggttgtagtcattgatatacaactcttaggtaactctccattgcgctttatgaggcatgactctggcttaactatgatttgcttgtttatccttttcacaattcacaatgctgacatggggtaatattttttttgtatcttcttattgcatattgtttagatcttgcattttttcctctaattctctctctctccccttttcattattagaaagcatgcctttctgtcaaactttcctagagcagttatatctgattaatgaggtgaagattttcaacgaagtatcaaaagcatgtctatgaacatgttttcatgattccgttttcttttttttttttcttcttttttctttttccagatactgagtggcctctgtggctgttcttattttataaaaatttacaggattgggccttgttttcataattctgttcttatttttagatactgaatttactgtggggtcctgttcttattttcctggtcagtgcttgtgctagtgcttcatgaaaaggttgtgttagttttctgcacttaactgcttgtctttttgttcagcatttgaatttcttattaaacagtaagctgatactggaagatatggcaaggagaaagttatcttgatttaagaataactaagatagctgatactggatgttaggaaatgagagggggaaagtgttggtttgcgatagagtcgaagacatttgacgtttcattagaggaaattagagggaagctaagaggtaccattgtggagaggagtagaggtttctcctcctggatcagattcggggtgacaagtttgagaaagtttctggaaggtcttgaagaatgctgcagggaggaaaggaaaggaagattagttaaggtgtgggaggaagagggtagaaagtttagagtggaaagacgtgaaaatggggcggggagatacatcctttgttctgttgttgatgtagagacgaagagatttgcttagttgttcctgaaggtaagggtttactaggaggttgggccatttttgctgagaaactccgggatttaggggtagttacgcaagaggaagtaaagtttgaagaagctctacaagttgagccaaagccgaaagcggtgatagtagaagggaaggatgaacggtgccttggaaaggtggagggtgagaagaagtcttttgtggatgtggctaaggagccgactggaaggcaaggagatgctttatggctttaggttagagggagagggttgagaaatagggaggaaggactaggccggtgccttgttggaagatgggatgatgggtcagtggtggagacggagttgctttcagttagaaaatggggggagcgcagttggaatataaaaaatggaatgaaagtgttgagcatgggaggacctttcatgttgctggagttcgaagatgaagaggagggagagagagtgctaaagagggggacggaacgatttaaagacaaagtgctgcaattagagggatggagcgaggaggcaggatggttgaagcctattttgatggtcattcaagcctattgtgatggccattcaagccctctttgggtcgggccgggtggggtggatagcaggcccagtttgggtttaaaagaaggataacccactgcagaagctacgtgggctctctctttttaggcccacaaaggaaagacctttaaaagaagctagggcttcttttggtcggtcgcgatcagagaggtggtttgacgaagagcacttggccggtaggatggtttttgcagtggagagaggcgagaaaggaagggtttccattgcagacatgtggctgttggaggaagatgccaagtattccacttttgagccttccgctgtttgtttttgggggggacgggtctcttcttcttttcctttctctggggtggagggggctatgatcatggtggaggagaggtgcggttttgatgccttgatgaaggaaagtgaagggaagttaaactttagtcatttcagagtgtgtctggcgaaaggaaagggcgatcagaagggagtgggtgattttttctgttagaagaggggagagacgacagggctgagaaagagggaaatgacgaagagtcttggaggtatagttgcatgacaagattctgtcagtgtttgggaatgccttcggagggctttgaaagtgagatcctaaaactccttaacagaataagagaaagaagggcttgttttgagagggtcaccggaaaaaagcggaaaggtcagagaccttcgagatttgattgtgagttgaagaaacttgagtggtcggtgaattatggtggaaaagaaggggattagggccatcaagagtttgtttgatgaaacttagaattctgtcgtggaatgtaaggagggcaaatgatagagacaagagaagaatgataaaggatgtgattaaatcacagaaggcggacttagtgtgcctttaggaaacaaaaatccaggagatgtctaatggaatggtaaaaagccttgaggttggaagatgcttggaatgggaggcggcggggggagttgtggtgttttgggataatagggtgttgcaattggtggagatggaggtgggcaaatttatagtttcttgtcgatttaagaactgcgaggatgggttccgttggggtttttcaggagtttatgggaccacagtaaaagtggagagagaagttttttggagtgagctgggggcaattttacggaatggtccatggtgtgtagcaggagatttcaacatgataagattcccttctgagaggagtagagaaggccgtttgttcctgacgatgaggagattctcagaggtggttgaggagttagaactaagggacttgcctcttcagggggggtgttcacgtggtgtggaggtctcaataatcggtcaaagtcaagaattgatcatttccttatttttgaggattgggaagctcattttcagggggctatccaagttgtattggctaggccggtttttgatcactctccgattcttcttgatgggggaggaatgaggagagggcccacgccctttagatttgagaatatgtggctgaaggaggagggctttaaagaggtgctaaaacagaggtgggaggggattcaagtgagcggttcattagcttcattttgactgaaaaattaaaggctttaaaaccgtttttgagaagttggaataaagaggtttttgggcagattgattccaagaagcagaatgcgtgaaatttaattgattattgggataaggaagagagggttcgctctttgtcaatggaagaagaagagatcaggaaggaggcaagggagttatataagaagtgggccttattagaagaagtgtcttggaggcagaagtctagggaaatctggttgaaagagagggatagaaacaccaagttttttcatcagatggctaatgctcataggaggaggaattagatgaatagaataaaggtgaatgagaggtgtttaactgaggaaagtgaaatcaaagaggaggtgagtagaactttccaaggcctgttgacagatcctggtgactggaagcctagtatagaagggttaaattttgagaggctggaagaggtggatgtggagaggctggagaaacccttctcagaggaagaggtttttgaagcgctgacaggctgttgcggagagaagtgccatgcccggacggtttctctatgtccttctagtagttttcttgggattttgtgaaggaggaggttatgaattttttcagacaattttaggagacggggagatttattagaagcctgaatgcaaccttcttagttttgattcctaagaaagggggggctgaggacttgaaggactttaggccaataagcttggtgggagggatttacaaatggttagctaagttgttggctaacggattgaaaggagtgttagttaaggtgatatcaatgtgtcaaaatgcttttgtggaggggcggtagatcatggacgcagtgctaattgctaatgaggcaatagattccattttgaaaagtaatagaggggcaatactttgcaaattaaacattgagaaagcctatgatcatgtggattggtcgtttttgttagcggtgttggggaaaatgggatttggggaaaggtggtgtagttggataaagtggtgtttatccactgttagattttcagtcttggtgaatggtagcccaatgtgttttttccagagttcaaggggtttaaggcaaggagaccccccctcgccttatttattcgtagtagtgatggaagcctttagctgtttgatgaaaagagtagttgctggaggtttttttgactccttgtatggttcggggaagaatgggtgaagaggtctagatttcatacttattgtttgctgatgatacattgattttttgtgaggctaaagaggatccgttgacacatttgtgttggctattaatgcggtttgaggctttgtcaaggttaaaagtgaatctagaaaaaagtgaattgatcccagttggtagagttgaaaatgtggaagagttggctgatggtttcggctataaagtgggaaatttgccctccacctatctaggaatgcctttgggtgctccttttaaatctattggtgtatgggatggtatgtggaagcggcagtacatttaaaaggggggaggattaccttaattcggaatactctgtccaacctaccgatctatttcatgtccatcttccagttacctagggcggttaggatgagactggaaaagatataaagggattttctgtggggaggtggggctcttgagcaaaaacctcacttagtaaggtggccgattgaatgtgaagacaaaagtaaaggcgttttgggggttaagaaccttggtttgttcaataaggctctccttggcaagtgggcatggcgctttgcaaacaaaaaaaaggccctttggaatcaggtgattagaaggaagtacggggaggaaagaggagggtggagatctggtgagactagggaggcctatggagttggtttgtggaaagctataaataaggtgggacaacttttgacccctttttttggctttgaggtgggggatggaaagaatgtgagtttttggaaagataagtggtgtggaatcaaccctttatgtgaggctttcccttcattatttgctatagcaacgtctaaagagacttgggtaaatgaagtttggacagccgagggggaaaggaggggaagttggacccctactttcaataggccgtttaatgattgggagatggaagaagtgggaaggttactttgttgcttggatgggaagaaggtgagggcggatgaggaggatagggtgagatgggtgggatcaaaggatggggtattttcagtaaaatccttatatagggcgttgcagccggtgtcttcagcttctttcccttcaaagattatttggatgtcctatgctcagcccaagataagcttcttcgcgtgggaggcttcgtggggtagagttttaatcttggaccgtttgcaaaagaggggttgggctttagcaaataggtgttttctgtgccaaaagtgtggagagtcgattgaccacctcctccttcattgtgaaagaacgagggaggtgtggacattgcttctctctctttttggtgtttcttaggttttttcgctttcggttaaggaaactctcataggttggagaggctcttttgtgggcaagaagaggaaggtggcgtggctaatgggaccgttatgcttgttttgggttatttggaaggctaggaattctattgcttttgaggatggtgtgctgtccatccaaaagctgaaaatttcttttgtgtagttactttggttggaaaccaaattgtggataaaagatgatccttcgaccttaatagattttatagaatgggtgtgtatgcattaagggagagggttttttgtgctttcctagtgtcttgggtcattttgtaagggggtgagttgatctatactgtaactctttgggttgcttctttagcatctcttatacatattatacttattgataaaaaaaaaaaaattgcgcccagtgtggagtaaggtcactatttctatacttatttaattttggtgtaaccaaaatgatcaatgttaaactgaatgtctgatgagtcagatgacacaaacgttgccactaagcattcatgtgctctaattcaaaccttttctgagtgagaaatggtgagacatgataacacttgttgagattacgataataattataactgtgagtgcattatcctttgatcttgtctatctggagtaacatgatttactccatcattgtcgtcatgtatgaagcaccatatcatttgttgaagcatggcaattttaacaaataaaaggaactaattgattaaaaataaaatgttcattattatgtacatggagagaacaaaataaaaggtaaaacataagaggtccatcccatatgagggtcctaaaagactgaagaaatagaaccttaacaacaacctccaccaaagactctcaagactcaaaattcaaacaattactttcctttagaaagaccaaagcacctggggtccatcctccaaatccttctctatttcttatgccatgctgaatgttacaggacaagagaacttcttaacagataccaaaacctaggagaacttcttaaccagatggcaaaactttgctgatctgagagaaacaatctactcaatccttcgggacaaagggcaaatggctgagtagatccagtgaatcagaattagggctcatcatgcattgattaggaactgcccaggtccatcaatgaaatgatacatgatcagaatactactcagtgaacaacacaaagactagaaatgtaaaggaatgcccttatccaacatcacttcttacttgaaagaccaggcccttgatatattctaaatcccagggaaaaaaacaaattatagaatcagttctatcccttatatatttctaatagtgtttgtagaagccaactctgaaagccctgatccccttttgaaacatctttaaatactcctggcttttgctaatatgctaatcctagtcagtgtttgccagataaaatcaattcagatcataatgagacattcctctgctttcatttggaaaggtggaagctaagacaataaaaaaagaatcgaccgtttgagtagtctcaaattgtatgagaaagatgagaagaagggaagcatatatatgtggtatatatctcatgtatattgaattgcagatacagaaatgatagaatcatttcggattggaccaaatacaaatatggtcctcgagagagatgagatgaaagaagataggcttttatattaccctttagctctgtctttagcctctcctggtttgatagaggattcaacaatgttctgcaatccactcttcaatcctcatgaagaggctgaaacatcaactttgcctcaaaaggaaaagcaaacgtccaatagtccaagggcatattctctggaggaaaggggtctgaaagacctccactttctgcaccttcaataaaattgagtaatgttctgaaattggcctcagaagagcatgctgatatacctctggaggcatcccatggtgtttttaagtctttccagatcagtgcattaggttggttgaatgtcagaaggattggggttaagtatgaaaccacatagggcattgcttataatgagcaaaggatccatattgtaaatctaagtgttatgcatacaaatagagggtcatcctctccaacttcaggtactaaaatatgttaacatatgtttcaagcatggatgattaatgtaagagatttccaatataacataagaatataggattaatgttcttgaaatataatagaccagccaagccggaagtaccatgtatttgtgtgttttggtggggggaagagattttcagataggaaaagggaaaaagaaaatggcatacaagattgctaattaaccaaacaaaactaatcacataatcccttgtaaaatacatatcagttaagtaatgtgaaaacctaaatatctgacttaaatataacagagataaactgagctgatcttgcctccttttttgctttaaatcgtctaccctgtactgcattttctttgcattctattatgtggtgcctacagttgtgtgatttttaattattagagagagatactgagctttacctcctcctttttggctgtagtttgtcaatcgtgatcttacctcctccttttgagcttttgtttggctgtcatgatcttacctgttgaagtatttcaattattgtctttcttaaccctttattttttcttgcatgagttattctaattcttattatgccatgatttctgcaatgttaatttgagtaaatgatgaaaactaataaaaatatatagggttcgtggtctggttcttcacattctcattcagc

SEQ ID NO: 10658 - DNA, 2633 bp, Vitis vinifera
  Intron number 10 from transcript GSVIVT01016238001 (locus GSVIVG01016238001) derived from phytozome v7.0 (chr-ID chr 13; pos 6083193 to 6085825)
tgagattcttccaaatattcagaaatccaaccgaggtaaggtgttgcaaaatattttcatttttgttgctgaactttaagtgtgtttctcaatctgtattacttatgagatttgagtgctgagaatgtaaactattaaagggaagttattgatgcaagattagggtttcagtgttgatgtcgattaataggtataaatcccaaaatcttgatatactaatgaatataaaaatacccatcctgattggaattcagttaatcttgagaagattgaaaatatcaatcaaggtcttggagaggtcaaaaaaataccttgatcacaaaggagacgttattacaaggaaaattggtgtcaacttccttatggatgcttaacctgaattaccaatctgggcccttccttctgttgaaggaaaaaggtagaatagtaatttgaggaagtttgaactttgccgactctcactactatatgtcatatacctacaacaccttaaaggttttagaatgagatagctgaaaaattggtgaaggggaaaaaggagcataatagtgatgcgtccatatatagcatgtcctatgcctctagtgcaactagtgtgacttttctattttgacatgataaatcataaatggttggcaacttactgcagccccacaaattctcctattcaggaggtccaaatataatattatagaacagtacaacgacaaattactaagaaagtttacaacctattcaattacatagaaaaaattcactcaaaccctaaataaaactgtagatccttttccaagtttcaaaactccccaacttcaaaaccagttggcacaaggtttatgtagggatatgtgtttcagtaatgacaaaaacaccatgttacttagatcttgtcttggagaatataccaagtgcaaaggcatctaaataagaaagaaaaacacctttaaatagaatataaaaaaataaaggtcaattttattgatcaatgacaacacctttttatgaatgaaaaatcttgatttgagtgggaggggaaaaaccctactcctgtctctttttgggatccagatttggaaaggatcttttgacgtgacatggttagaagagagctcatttgtcacttggtagtgaaataactcttttgcagtcgtatttatcccagattcaaaattacaatccgacttctaggattaagggattgtaaagtgaaggcctttgttcgggaagtcaatactagaatgtgtcatgtgcaagaatagtggagagttagatcaccttctgtgtgtcatgtgcaaggagagtagagaattagataaccttctttctgtgtcatgtgcaaggagattggagaattagttgaccttctttttctacattatttggtagcattggaagtgaaattgttgtggtgatgttggtcattctttaatagttttggggaaacttcctagaggcaaggttttatggcatgttgccagtctcacttgttggaccatctgaggatagatgggcaagtggaggtagttaggttacttatttctttcttttctttgggcttctgctgatgaattctttttagaaacttctttgagccttttgttgctttatcggaaccctgtgtaggtccatgagtttcattgaagacacttcctgtatacctccagagggcttttttgctattcattttgacaggtgttctttggagtaacctaggaagcgattggaggagtgtggactgggggggaaatggtgtaggcttgcttttcttattttttggtcatttttatatattgaaagtttcttgtcctttttcaagtgaaatggtggtttttaataatgtgtatgtagatataaaaagtggcctaacaaaatgacccaaatacactggaaatatacagagtgcactaaggtcataaaggagagaacaaagtacagaatggtctaactcatgcctaaggcatgaataaagtctaaataggaaaattagcatccctcacccaacacttggccccagtgaccaaaaatttgagaaatgatatttcagagttaaatccaaatacaccaaattaaaaatccttctcttcctctatttccaaatattccaaaacaaaccttaaggagccatcctccaaaccatattgcaaccccaatttctttttccccatgttgtgagttttataactcatgcgtgtataaaagtactataaaaatattttgatgaaaagtaagtatgacttgtgttttaagcagaggttcagccatctataatggtgtatgcctgggaacaattcaggttacatgtgatgctctgatttttttacttcctcctttgctccaatcctgatcattctctccaggttgattttaggctttcttttaacaagtatgatgaaaataagctcctaaactgagatggtaatttgctgtattttttatcatcttttgtaaaatgtcttactgccaattttgaatattcctgtactagttattgatcatatgggaggagaaagttgcatttctctgtttctccactgctgtagcttatgttatatttggtaaaatgctagaattaagttttgtttttcatgttttgtgcagtaattttcttaagcttctgggcagaggtgcactat

SEQ ID NO: 10659 - DNA, 8375 bp, Vitis vinifera
  Intron number 1 from transcript GSVIVT01036406001 (locus G SVIVG01036406001) derived from phytozome v7.0 (chr-ID chr1 8_random; pos 4696781 to 4705155)
ttatatttttcattccaagtaataagttcatccaagtatttaatagtttgtgattctataagattaagtctatcatattactataaatttatataattgttcatccaatatattcacaataataattaacgttggacctgcattattggattgaattaatcatggacctaacccctgaagtgtatatatatatatattaaactaattgatatgtgtattataatttgttttattatttcttaatatttcatccaaaatttctatattttaaaaagttgataaggtgattttctcaaaaacatttttagaaaaaccacttttactaaaagcattttaaataaaaacacttatcaaatgcactttaaaagtttgtttgacaatacttttaggaaatatttatagtataaaaatgttttcaaaataaagaataatgtgttcgaaaaaatttagaaagtatttttaaataattaaaaaatcatttacagtatttctagaaaaaaaacatttgacaggtgattactataaaaatactttcattaaaagtattccaaataaaaataatattaaacgcaccctagataaatttttgattctttgagaaaatatatttatatatattggaacaaacatacaattatatatgttgcatatcaacacatgatgtatcttagaaaatatggtatccttatgcaatggtggggaagaaatgaataggtgattcatgcccaattggtgtctcagctgatttgtgttcagctggtgctccttgattgaggaagtgatcaacaaaatttatacctataacaccatacactagggtagcaaatacaaagctactatagtatagtggctctaggatcgttcactgggaatgatttgcaagcaatcaatgataccaattccaagtgaattggtcttgtttcatttcacggttagcttaaggaataaaacacaaactttgatttgtaaaggttgagatttaaactaactaacttaacagaagtttggaataatttaggaagaaaaacattccttggagatttaggttcactggggtggttcctcatgcaaaagacatggctccggtcagatggttcatttcctcgcattagagattcaacttagagtcaattctctaaccggtgatgtacagagactccttcaattagatttcactttaattctctcagtgatgcaacttgcaatggttcatgcctctcacgagcacttaccattcaaggtgatctttaaccttggacttcccttcacaaactcgcaagagataactaatggatgtctcctaggagtccaaaagcttaccaagtgttggtaattccagaaaatcctaccttgaagtcacctaccagaggctcgcaaggggtaaactagtgcatttccacgattggaaatcacttgccttaccaagtgttggcccaggtgactccaaggtgttttaagttaactaaaaacattgaaatcactaaaggatttcacttcctcttcattactagctaaaaccacagagctttgcattcttgcacttggaaccttccccggcaaccttagctccaaggaattggaggtttagttactcattctctggggaaaactcctcagagaattcataacttagaaatacaatgaaaatacaaagtgagaaggtaaggcagtagaaagaaaatagactttacttgcttaccaaacgtttacagaaggaactcctctccgagaacaggctcccgagaggtatatatatcaaaacaatataaaactaattgttacaaagatatttggtctttttactaacttaaaaactaaggaatcatgtaattggtggtttacaaggagtattttgggatttagacaacaaaaatctaatggaaaatatctcccaatgtcggtagcaagcttcgggaggcttcaggagccatttcgcaggagaaaagtggtgtctgcgaaatttcgcagacacccgagagggctacgaaattttttcgcaacaccaagctatcttcaccaggctgcaaagtgattactactcaaaaagtgctatttgatagcctttaattaatcctttttaacacttttgagtagtagtttaggccttttaactcaattggcatgttaaggatcctttaaagcaattttgatcactttgtgtaagttttggtgtttttgttagtattttgatcaccaaagcaagtcaagaatgaggagagctatgaggaatcatgggcaaagcttagaattcaattgccaagagtgaatccggattgcaaggagaaaaagcaaagaggatcagtcatggagcatattcttgatgacagtcgtatcagccacttttggagcactttatgaagtccaaatgatgcaagctatataccatttcaaagctcaggaagtcaacaatccaatgcttcaaacggtgtgtgattcggaattgaaacgaagaagttgcagccattacaagccagacactctaaagtgttgcggaatcagccatgtgttgcgagaatttcgcagcacttttgtacagtaaggtgtttctccttctaacgatgcacgaaccatgccgcaagaagggagctggaaacttcaagatggaagccaactttgcagcctggtgaagatagctcagtcttgcgaaataatttcgcagccctcttgggtgtctgcgaaatttcgcagacaccacttttctcctgcgaaatggctcctgaagcctcccgaagcttgctaccgacattgggagatattttccattagatttttgttgtctaaatcccaaaatactccttgtaaaccaccaattacatgattccttagtttttaagttagtaaaaagaccaaatatctttgtaacaattagttttatattttgttgatataaatacctctcgggagcctgttctcagggaggagttccttctgtaaccattttagaagcaagtaaaggtcttttctttctactgccttaccttctcactttgtattttcattttatttctaagttatgaattctctgaagagttttccccagagaatgagtaactaaacctccaattccttggagctaaggttgccggggaaggttccaagtgcaagaatgcaaagctctgtggttttagctagtaatgaagaggaaataaaatcctttagtgatttcaatgtttttagttaacttaaaacaccttagagtcacctaggccaacacttggtaaggcaagtgatttccaaccatggaaatgcactagtttaccccttacgagcctctcgtaggtgacttcaaggtaggattttctggaattaccaacacttggtaagcttttggactcctaggagacatccattagttatctcttgcgagtttgtgaagggaagtccaaggttaaagatcaccttgaatggtaagtgctcgtgagaggcatgaaccattgcaagttgcatcagtgagagaattaaagtgaaatctaattgaaggagtctctgtacatcaccggttagagaattgactataagttgaatctctaatgcgaggaaatgaaccatctgaccggagctatgtcttttgcatgaggaaccaccccagtgaacctaaatctccaaggaatgtttttcttcctaaattattccaaacttctgttaagttagttagtttaagtctcaacctttaccaatcaaaattttgtgttttatttcttaagctaaccgtgaaatgaaacaagaccaattcacttggaattggtatccttgattgcttgttcatcattcccagtgaacgatcctagagccactatactatagtagctttgtatttgctaccctagtgtatggtgttataggtataaattttgttgatcacttcctcaatcaaggagcaccagctgaatacaaatcagctgagacaccaattgggcatgagtcacaaagttggcttccatcttgaggtttccagctcccttctcgcggcatggttcgtgcatcgtcagaaggagaaacaccttactgtacaaaagtgctgcgaaatcacttcgcaacaaaagggtgatttcgcaacactttgcaaaatgcttgcttcagctcggagtgactggcttgtaatggctgcaacttcttcgtttcaactccgaattgcacaccgtttgaagcattggattgttgacttcctgagctttgaaatggtatatagcatgcatcatttggacttcagaaagtgctccaaaagtggctgctacgactatcatcaagaataagcttcatggcagattctcttcgctttttctccttgcaatccggattcactcttggcaaatgaattctaaactttgcccatgattcctcatagctctcctcattcttgacttgcttcggtgatcaatatactatcaaaaacaccaaaacttacacaaagtgatcaaaattgctttaaaggatccttaacatgccaattgagttaaaaggcctaaactactactcaaaagtgtttaaaaggattaattataggctatcaaatagcactttttgagtagtaatcaataggtagtttatattttcctaaaagatgcatgtgagattagttaaaaaatgcctctgcaaagtttgccctacttttgatgccggcttgctcacctaccaagcaacctcctctcttcttgttttaaaatcttcaagcatttgttagaagattcttaaaattatcttctttttttttaataatatcaaatgatgcacaggaatggaacccaccaaaagccttgtgcatggccgacgtgtttgatattttagaatttctttttaatagacaagcattttctcgcacatcgagttttgaaactcactttttccttttttatttggttttgaaaatgagatcaaatatatgaatattttaattaaggtttataaatgaaatgaaaatttaacctcatttaaatgaaacttaatcacattacaactcaagttttccacaaatgagaaggaaacttaacactagttaacttttttctaataaaacttaattatagtatagttcaaaatatcattacggttgaaagcttaactttatttaggtttttattattttttattttttaaattgaacttaactcccatgcaattaaggtcaacaccctaggaaattaataataaaaaagtgaaataaaaatataaatatattataaaaaaaagacgaaatgaatataataataaaataaaaagagaaagtgattttttttttagtcaatacagtttggatgaacaccaataaatggtggatagagcattatgagatgataattaaccaaagtgtcttgcaaaaaataaagtaaattaaaaatataatggatgatcatgaaatgagaaagaagaaaagtttgaagtcacggtatttaaagatttagccatgtagtgagagagagtatgttggaatcaatgttagagtgaaaaagtaaaaaaatgtttgcaagataaatgagtagaaaaaaaaaagagcaaaataaagggaatacggtgcttttggaggaaaacagtttaaaatggtaaaataatccaaaatatatcatctttaagcaaaattaaggaagaaggtcattcttaccatttgattattattttagcctatcaaactaaataacccaaaaataaaattctagaaaaaccaatcaatcgatcaatttcatcaaccgttcttttaatttcaacattaaatgagaaggtgtctggttggctatccaaccactctagctttaaaaatatagtcggcaagtctaccaataaattcttaatggcccaaccacctcactataaataaattatacaaaatatttatgaaataaataataaactttaatttatacaaaatgtttatacaaagtactctcagcttattacaattaatgttttaatacccttcatttaaaaataaattattttttagtatgtttagataaaataagtgggtcaacaatgacccttcttcttcaatgatcttacatgcatttaatttacttgttgcaaaatccacttgctcatttaatacactgcaagtattgctgagagacttgatgtcttcaatcacatgtgaaactactgcatgtattatcatttttcactgtttttagttattattatactattcccaattctcatcttcagatttattttattatttttctttttcaaataatcaaatttagttttcagtttgattactcttttgcgaccttgtcatttagtccattggaccttcattggtaagtttgaaaagatttgagtaaaaacaagttagtttttttataagataggattggattcgaagttttaattgagttaaaatatgttaattaattaaaaaagaattttaaattgagaattaaaaaaaatcatcttttcaaataataaaaataatttgaaaagaaattttaaattgaggatttaaaatcaagatttttttttaaaaaaattcaaatcttttaaggaaattggaaaagaaatttaaaaaagaagttaaattaaaaattttaaaaagaattttttttccaaatatttttaaatttaaaatatgaaatctatctaaatctttttaaaactattaagtttctaaattatttttttaataaaatatgatttataactgattccaagtttactagattttcccttataatatatatcttacctaaatgtgttttgagatgaatgtcgtaagagagtcgaccctaacttgccccataattcccaaactctcataatttattaattgaattttgagttgtacgttaggacctgctttcccatagaagttgaaatgaatccatttggatttgaggtgttgcatcgtggatgttgattaaggtatagatattagagagtaagtggtaaaaccattaggtaaatttatatattttgacttcatatggtggattattagattagaggtctttaaccccgtgattatttatctccataattagtgtacgggttttcctcataaaatctcttttatctcttgtgtgtgattcattttttcattgatttctttcatatactagggttcaattgagttaaacaagtttaaatccctttcacatatttaattgggttcaaaatctcaattcttatgttataatatttgaaaaacactcattcacctcctttggttgttagtcctttggcttttaactttttaagtgattataattatattctttgtagaataaggaagattagtaagaatatctttataaatattctatgtgaaaaaatttatgagaaatatgaaatagaaatgtggaaaagcgagagacacttggtaaaataagaaggcttagtacaccgtaccgtagatgtaagaatgagtaagaaccacctaatagagatataaaagtgaagatgaaaatacaaagaaattcgataattatatctattttttgtcctttatttctttttctatcatataatgaaatgttttatttcattcatggagatagacataattgactatatgctaacacaataagtagtatcaaagttttaaaaagaatttaaaagaaaatatccaagtaaactttatgggtttaatatgaataaattaaatatacattattaatttttatttctttttatcttgtagtgaaagtttgaatgactgtcagcttttttatgccattttggtctaaacccaccacttacttggaaagacccatcttcatacgtaatgtggcaatatgtttgagaataatttcaaagtttattttcagctaataaaatcaatttttataaaaatatagccaagaggatgtttcatatatttaaatattaagtacttaattgttgaattttaagtgttaaaaacaatgagtgttaaaaatattatctaaaatttaaatattgaaaaaaaaaaagggaaaaaagacagtgctgcaagttgaatgtcatctagcttgggttgaatggtgaacgccctctcctcgtcgaagaaaaactgcaaaacaaagcatgtcggtggaagaagtcttttatggcatatgccttgtttgtccataggtggattggaaaataattgtgaccgaacgtgtatgctgcctcaaaataaaatcaaaaataaaaaagaaaagaaaagaagaattgaatggtcaaataggaaataggccatacctttcccagttcacttgtctcatttcacttgtctcttttccctatgatatgacatgcgaagccaacaatgtcaacaaaccctttttttttcctgctttgccttatcttttctcttctgtcgtttaacgcgcttgcctcctcaccacttcttttagcagagggaggattttcttgcttgtatcatagacgacatctttgccttcaattatttcaagttttgt

SEQ ID NO: 10660 - DNA, 2616 bp, Vitis vinifera
  Intron number 3 from transcript GSVIVT01024415001 (locus G SVIVG01024415001) derived from phytozome v7.0 (chr-ID chr1 6; pos 2278703 to 2281318)
cttctaggcagcaagaatccataaatagagctaaggtgagtgatgtcaagttatataatattttgggtagtgtttataaataaaactgtagccaactttgttgaggaaccttcacatgcatttcttaacagcccttaacagccagaagaaaaaatcagcctccaactcccattgacaactttgattactttgtagttgacacacaaagcatacacatcttacaagtttactagaaaccccgagcagagcatcatttttcttagaaatcctcaacttatcgagtcattaccctttggggttcgtctttgtaagacatctatggttagttctcttgtggtagttcctcatgagcttttgtgctggtaggatataatgtaatatcttcctcctgaaaaggagtggatttgctttggccgcaaactcataaatcagtatttcaatcttttggctaagatcttggaaatgcatctttaaagcatattaaacattagattgataaataattatataatgaagatgagtgaaggcccttttggacaaggtatggccatagatttcatctttattaggatcttagacgttctaaagaattcaaaaattgcttctacaacataatttcccacaatctcccaatcccttttgaattctaaagaggtataaccatcaggacctggggatttatcatctttcattgaaagcgttgctgatttggtttctccatgagaaaccatctttacattccaggtttattttcttcctattagccaagttaaaaaaaatagtgaaatccttttacctgtggctaaatcctagcattctttgaaaataattctctcttttgatccttgttctttgaaatcttttctctagacataaaccaagggctttgtttctagctcatcttgcttttattgcacaatacaaaataatcccactttttctgattaagtaacctttctttgccctgaaaagatctaccaggctggtaaatatgttcattctcctttctagccaagaccagattctaaggatctaccatcaggagtttctgaatgttctccagattcttcttggccttatccattctctttctgaaatcagagaaagcattgaggttcagcttctctaattcctttttaattcttccaagtttggactcaaagcagaacataagatcgactgcaacttttgcaccaggtgagcttctcctcataacagaacatggtgggttgacatcttttctatttcagctcattgaagtcataaagtaccacccagggtactatcctggaagtatcttctctttggctaattagttgaggcatgccaagaagaaacatcaaaacaaatgagaagatctcatacttggttacttgccattaggtcgtgatatgattatgggaaacaaatagatctaactagatgtgtataacagtatagttccgatttgcttaatttgaatttatgttgtttctgataaagaaagaaaaagtgttctgttatagatgtgattgttagtgttatgaaatgcaaataaatatgagaatatttagtatatcaaactataaattgataaaatttatcatataatccagacctagccctatattttgaattggaaaaaaaaaaaaaagaagcaaaaaatgcaaaggaaattattattaaaattttgaaattaacattaaaaaatatgatcaatttatggaattttagataaattaggcattcatctgattactgctgtccctctttccctccaaaagggactttgtcctaaggcaatattacaccatagcttcttttattaggtttgacttgcagtggggtgattgggctggggttttcctctgaggaatttgagttaattcagccattgtggtcagtccttgcttctattcaaggttccctttttgtggggggggacctgctgttgctttcgtctcaatttttcttagcttgggctataggtcatggaagacctggagggcctcaaagtctcctccctccttttccttagggccatgctcaacctctaggttcaatcttctgttgttagaatgttgttgtcaccagttcgttttctagacaaaattcaattacttcaattagggtgttgaagcaattggatgaaaaataaaggatgatgctgacaacatcgttccttagaaaaggctcggttgctttgctcacaggaggctgcatctgaggcaaaattgctgtctaaatgggagagttatattttttgggttagaaatggtatgctttaatgctatgtttggttcttggaaattttgagggaaaatgtgataaaaagaaaatagaaggtaaatgaaaaatataattaaatttaataaattatttgttcatacttcttcaaacttattttacttattttcttcttctatataaagataaaataatttgaaaatgcatgaggctatatttggttcttgtaaaatttgagggaaataaaatatagtagagaagtagaaggaaaaaaatgagaagaaaataaaaaatggatttgatgttcataaattattttgatgtactacttcaaactcatttcacttattttgaccatgaatttttcaactgttttaggattatttgacc

SEQ ID NO: 10661 - DNA, 6315 bp, Vitis vinifera
  Intron number 1 from transcript GSVIVT01020409001 (locus G SVIVG01020409001) derived from phytozome v7.0 (chr-ID chr1 9; pos 19907425 to 19913739)
ttctattccttcataggcttgcttctgcacctattgtcttttctccattttatctgatgaaaaattttggttctcttctgcatgacctacctagtttatgcaaaaaaaaaaaaaaaaaaagacaaaatggatatttttgttattgctgttttgaagatttagtctgaatttgctgggaaaatcttgttcttgttttgtttaataaatgcatcttttgaaaatttgaaaataaaaacaattaaaagttgtctaaaaatgcttgtctaatggcttggcttgatggtttttttggtttgaattcagagaaaattttagttttctgtcggcagagctccttttcttggttgagtaaatccagtctatatttgtgttggaagttgggattttgccccttgaatggtgaattttgccattgagttgagaggagttttataaaaggattaggatgtggttttatttatttatttctggaaatattgagctggaaattttgtagttttggttttgaatataatggcttttcatccctgactactttttggatacttgagcaaatagcttttgttgtgattaccatttgaaaattttaatctgcatttcttaggggatgcttgggggcctgttttattccagacatgcattttccttttcaaaaaagagagagaagtattctagtttggaaaattaaaaacagcaaattcatcaaatcatgtcgatttctgtttttgtgtatttttgtgcgcgggcatgcccacatgtgctcttttttagacaagatttgaacatgaaaatgcaaaaactatttttacagtttctggtgatttttttcagagaattttgttgggtaattatatgggagaagactacttggagtgcatatgaatgcacaagagttgttttggagaagggttgaaatggtgaaggcttattcatttagtaaattgatttattttgttttctacatcttgtgctgcatttcctgttagatacaagaagctatctgacatgggccgtctgatggatagtacacatctttgtgaaatttttatttttaggaaatttcaggtttatctattttgtttaggttggaagatagatgaagttatacttactggccacaattaatatccttatgcaaagggttcttgggttagtgctgggattggtatagtaaggcgaaatataatgacagtagttctcatttttatttgtttaacccatgagataaacaaggttttagtttctttggttccttttcctttcctcaccttaggtctatgtatgttgtgtttacaacatgttacagaacttgtttcatagaacttcatgctcctggagtctttatggaattgtgtagttttcatttccaggtagacatttgcatatcttatggattttgcaaaattctgccccttgtcccttgtcccttgtccctttaatctccaatctgtcataagtgtggaggtataacaaaccttattcccagtgtgggcatatttgatatgtgaaatcgtctaccatcttatttgagtaaatgccatatgtaaaaaatactggtactatgcctatatcttcctctgcctgctggctttatctcattgagcaaaagactcaatctggaaataattcccaacccttccacacactgctagtaaagatatccacagattataaaacctcaacatgctctttgatcttcctcctctggctgagagatcagtttatctgttcagttgcttgtttattaaaatattcaaacacctactcatcaaagagttgaagcaaaactcttttcaactctctagagtagtttctaaggctacaaacttgatctagacctgttttttggttgagatttctgctttatattatgtgatacgatttgatctagacttagttttaggacttggattaaggtccatgaatttatgttataattttgcatatggtatactttttcctaggttatgattggttcccgaaaagtgtcaagaaaaaaaatattaacgaaaataattctcatatttgattgtcttgtagaaaatatatgaaagaaatattggatataattaaaattagttaaaaacttatttattttttaaattatttaatctttatatataagaattaaaataagtaaaataaatttaaaataacatataaaaatattatgtaaaatattttcaatttacataaccgtgcacaaggcatatgaccaagccaaaatctggtcgagttttgttattgttactattattatttggtttttcaaagtctgatcaaacaacttaataattttgagatctccatcttaatcaatgctaaagaatacaatagggggtaagacctgggtccccttctccaatgtgaaaggaggcgagggttacaaaagcagttcagatcagttaaaagcagcagtccaagacacagcagcagcacaaggcagcagcactgccaaaaccaataacaaaatgtaagaaaaacttaacaaaaatacaagatcatatactgtagatgagagtgggggaccattaccatcctttccagaagccgtcacccctgcttttggtctcaaccggacggtgattttgtgggtgcccttcaccatctctcatggggtaccccactggaggcggcgctgcaacatagataacttgatgctgcccctcccacgatggtggcggtggatacacctgacctggtggaggatatggagtcggaggtggatagacatggctgggtgggggatatgcggttactgcaaagaaacacaaacaaaccagctgtcagaattcagagccacatttttgtagaagttcgaactctggaaagagagaagtagaattacctggaccttggtggtgactcatgagtgcctggtaaaggggagattgagggggagaggaaaaagagaggcagagtggggaagatggagaattgaaggagatgggatatgtataagtagtagaggtgtgtggaggggtttggacgaagtttacaatgggcctgcattggctgccgaatgaacctcccatcacccatatcgcccatattgctatttgttatcgtatctgtgttctttagtggctggttcaaaggaggaaaaaagaagaagaaagagagcaacccttttatccaaataacccatttgaaataaaataaaataaaaatttgtccttttaaccaaataaccacccattggagggaaaaaaaagttagaagttataaaaataatattttttattttcactcatattttgattttgattttaagatttcatcgaacaaatgattttgggaagtgtttttaacttaaaatgtatttttgaaaaaaaattaaaatatagtacatttaatagtgattttcaaaagtgtttttagcattagaaatgccaagaacacttcccaaaatcattctcaacgtacttttagatgtttgataaaatttcaaaaacaattttaaaaatttttttagcgctaaaaagtatcacatatagtgtttacgaaaaaagatatatgattctcctaaacatgcttacaaagaaaacccttttactaaaaacacttcaaattgaaagctgtgaaatgcactctattttttttttacaataatatcaaccttaaaatatctctaaatatcaaatagagtatgcttttaatttttatttttttttatcaaaaaatctattacgacatatcaaatacacgtgcatgttacaacttacaagcatataatgggttatgaagtactcacagatttgttgtaagattttgtccatccattttgatgaaattttttgacagaaaagtaaatttaatatctagatatactttcggattggcattgctttaaaaataaaaaatttaaaaattaaattgaaatgtaattaaaagtatatggattttttcataaaaaaaataacttaaaaatatatgtcttgaaaaattgttttagaaattgtgtcctcacaatattgtcatttttaaaaaaaaatggcaaaacattttatgctagttgcttttgttttcaaagggctgctttctctttttttttttttttttacctctttgctttttgaaaaagaagatagtaaaatattttttttgcctcttagttattgttaggaataaaaacaatttgaggaattttgcttagttttttttggaaagcatgttgtaaggctttggcaattgtgtttatcccaaacttaaaaatcatttcaattggatagtcgttttaattttacctattaacaatcactttgttagtatttctcatcaaaacgtttttggtaagtgttttatttaaaagtatttttaagggaattacttataaagtgttttttttttttccaaataacaccataaatgatttttcaatataagtgatttttaaaaatttttaaaagtgtttcaaaaattttgtcacacacttagagtatatttgacagtaattttaagaagtatttataatatttgaaatataaaattttttaagtgttagaaatgttaaaaacactttctataatcactatcaaacacactcttagagtgtgtttgaaagtgattctaaaaagcatttttagtatttctatcacttgaatgataaaaattttcaagtattagaaatattaaaaatacttcttaaaattactaaaaaacaggttttttaatgtttattttaaaaactgttttttttttttacctaaaaacacttgggaaagttgtgtttgcagccaactatttgaaagtagtatgacaatcaaactccaataagttggaatatgagatttgactgtcaaaggggaaaatattatctttctcgtgcactctttgctgactccattttatattcctaaattgcccttccatgcctccatgtcaattgcaaccttgtctccataacagtagcaagcactctatgtcataagaaacactaaaaattttaaaaacaaaaaaatctgaatttgaaacctatgaaaaatcacctgacccaacaaccggttgtaatttccctaatctaaaatctttcttctctttgattcgggagcatttttttctctctctcttggcttcatcacccacacaatcccgagacccatataaaatttcccaaaaattgtctcatttgagagaaaaaaccattaatccataactccaacctgtgtgtttctctcttatccatataaaagtgcaacaaaatggagcattacatcctaagaatgtccaagtaaaagacaactttaagaggcgcatctatgattgtgaatttactatagcaacccatacccgaacggaaagctagaatccaaaatattggctttgtcaacaagatatctcttcctgtcattgagtcgcattttgccgtaaccctaaattgaaatttgaaggtaaataatttttatttattgttctttagttcctttgtttgaaatggagcacatcaacgattttggagtcgttgacgaacttgaacttttgtattgggttgtggaaatcatattattcccaaataaccatatgacctacaagttgcattgaatccagatgaaacttacatcatatctagttgcaagttgcattgttattttggggactgtaccttaggtactaccttaatagcccttaggtaccaccttaatgtatcttaggtactaccttaacggagcttaggtactacattagttaaacttaggtactacttgttcgaagccttggaacttcaattgtggacattacttacttcatttgtgacccttagagcatgtcattatgtgattatttagtatggtgaaatggttcacctttcttagtttggggactgtaacttatgtactaccttaatatcctttaggtaccaccttaatgtaccttaagtactaccttaacagagattaggtaccaccttagttaaatttgggtactacctgtccgaagccttttaacttcaattgtggacatttcttactacttttgtgacccttagagcatgtcattatgtgattaattagtgtgctaaattggtttacctttgttattttagggattgtattttaggtactaccttaatagcccttaggtaccaccttaatcaaccttaggtactaccttaacagaccttaggtactaccttaatagaccttaggtactaccttagttaaagttggttactacctatccgaagcctaggactttcatttgtgacccttaaagcatcccattatgtgattatttagggatttctttggtttccatagactgatatggaaatattggtaaaatagaaacccaacttaacatttactttttgtttga

SEQ ID NO: 10662 - DNA, 3232 bp, Vitis vinifera
  Intron number 12 from transcript GSVIVT01017156001 (locus GSVIVG01017156001) derived from phytozome v7.0 (chr-ID chr 9; pos 4822781 to 4826012 reverse strand)
tcaaagcacgctgccctctctgtcaatctgagcatgtagaggctggtggggctgcaacatgatgagttgccacccactccactcacaaccaaagttaggggatatacaggacggatacggtgccttaatgcctttgaatcctcaactcaactggcagagcaagcttgagctgccttcagcctgcccatcccatttgtgtagttatgtacataaacagccactctattctcagcaagttggtacaactaagtggccaataagtgagattcattttatactatgtaatctacagaagcttggagtttcaagggtatagagaatccattaggtttttaactttccttgttgaaagtgatgaaatcaaagactgcatgatgagaaatttcttcttggatgactaccttgttttggcaactattttttaaaacaattttatcttctccataataaaataaaataaaaaatcaaaatagatttgataaccaaaaaacgaaaacaaaatgtttttgaaaaacaaaaaatgaaaacaactatttcagggtaatttattgctataaaattaaaaagaataataatttttaaaactcaagcgataatccaaacaaacctctaaactcttgaaagtgattttcttaacctttgaaaaaagtcatggattgaggattgatgatgacaatccaatggactattataaattagggctttcctaatcggtctagcattatctaatgagcagcgggcagaacattggccttacaaggatatcaataatccataaaaatattcctttcttaatgtatgtcggtttctgctccataaaattaaaacttctcccagtataagtataatcctttgacagaatgaatccagtgcctactcatatagcttgctttgcgccatatgaggcatgctgtatggaactgttaatttgcttggagcaatgcctgatataaattgaactccggacttagttctaaaagtactgaaaacctaagccttcatcacctaaacgataatatgattaccattgatcggcatgtgttcaccaaattatggacacacacgaacaggaaataaaaagaacatgatatttttaacgtgatttgatgatcaatataatcccaacatcgatctacggactacacctacactcaacaatttactaattaaaaggaatatgaagagttacaacgacaatgaaactctctaaaacacctcttaattgcggtcacgctctctcaaaaaataaaaccctaaaatataaaagggttaaatatataataaaagcaaattcatcattttatctcataaaaaaataatttctccaaagagtgttgtccccttcaaccccgatagctaatcaagcaacttgaccctaagaatcctaaacaaaacacaacaaaactgatttagatttcacagtccaacaacataaagctttagaagatacaaatgttagttgaagtttgttttgtcaaaatttcagaagagggggagtatatatagtgcattggtccttaaagtagtggggtgaattatactcattttttatttagcttgtttgtttattttactaagtcaataatttttcaatcagtgactgatattccaaagattataaaccatttttcaattaaaactaggtctccaaagcaattaatcaaaactattctaatgatatcagactggcaccccattcttgctttctcttcattggaagctccataccagccaaaatctctgcaaatggaaaaccagaatgatcgtcatcacatcattgagattacccaaaatcccgagattataccatcaattcccaccactcaagcttcttctactacttcaaaaattcacagggtatggattatttttcagttacttgtgtgtgtgtgtcagattatggtatccattgttattttgtggtggtccaaaatacatgaaaatccagaaaacagacgggttgtatggctggtgggttatacttccggttgtcttgcactgcttcctcttatttacctcagttaccggatcgaaggagccatgatgaacaggtgtgtattcatttcttgtctatcattaaggacatctctttactttgtgaagttatatcataaacttgttaaatcaatccaagaaggaaaaaaaaaaaaaaacaattgatgattgtaaagttagcatatgaatatattttattgttacagattatggaagattatatatttgaattagagaaacattatcaatataaacttaaaatttaaaattgagataagaatatttggtaaaacttaatactttttacttaatgacttaagttgattttaaattaaaatattcttaagtattaaggttgtttggtaaaactaacttaaaatttattttaaatcatcaaattgacatatttaccctttttaattttaactaatatttttcgtcattgattttaacttatatttatttttattaaatttaagcagtaaatttatttataaaacatttatatttaaaatattgtatatacataagataaccataaatttattataattaaaaaaaaaaaaaagtcatggatgtatattttcactagtgtgggctaatgaagcaaaaaggatttaagattaaaaataagttaattgttttgacttaatgcttaaagttaaaaataattttaagttgtaatattaagttattttaccaaatatatttaatttagttaattacttaaattaaattattaaatcatattaagtttttgagttgatttaccaaacacccattacgttttttggttgaggtttgaattttaggcggattgcctactttgatactaattattaaggttatttagtaaagttaatttatttatttttaaatcattaaattaatatatttatcttattgattttaattgatatttaattaattttaactcatatttatttttattaattttaaataatttatttatttataaaacattcatatttaaagtattgtatatatataacacaatcataaaatatttattatgaaaaatatgtatggatatggattataattctaaaatatatttttatttatgtgtgtaaatgagataaaaaggatttgagataaaataataataataataataataagttaattattttaacttcatactttaaaggtatttttagcttttaagtcacaatgttaagttaattcagagaagctggtttcctagttgcaggct

SEQ ID NO: 10663 - DNA, 13429 bp, Vitis vinifera
  Intron number 16 from transcript GSVIVT01020549001 (locus GSVIVG01020549001) derived from phytozome v7.0 (chr-ID chr 12; pos 4475207 to 4488635 reverse strand)
gggagtagggacatttgaacactcatattacgtgcatatcatgtatcttatccctttttcgtgtcatccagagcctgaatctttgttagtgaagtttgctttgatgtttcccataataagattttagtttttctaagagagtgggagttttagtttttgctattataatgtatatgcattgtttttcctctctttctcctaaaaatatcccctgaaaattggcatttttaaaggagttttcctttttctccgagctaattcacccaagattcaagagcaagggctcagctatagccttacctgtctaaagattgcactagaaattttgtacactttggcaactggtattatatggccagatccaaattgagatggggtgcccacatcaggttgaattagattttagctactagtatgtttgttttttaaaaaaaaaattgaatgaaacaaaagtcgacaaagccaaaagagcccattattttattttagattttttaatcatgactaaatatttattggaatttgggtaaatcatactaaaattttaagctactcaaatttggttgtgaattatatactttggaaaagtttttacttgctgcaaatgaaatacaatgcaggagccatggtgacatgctcttctctctttccattttttgttgaaataatgcttgatgaatatcctcaaatccatgaggagattctggtggatgcttgaggctcaggatggtccctaactattagaaagaatttgcaatattgggggttataaacactttgaattagttgttggcactgttgcatgagtttaggagagccagatgaagaggttagaccaactttgtagtccagtgtttttctgtgaagataccttttgtgtgtttacaactccacaaacggtggtagtctttctgaagtatctggccttttatgattataacctaagagaggattttgatgacaatgcaactcctgtttatctgttaagtgcaaatctagaattgggttgcctatatagcacaaatagaaagaaacatgttcaaaaaatatgattgtatcttaattcctaaatatggatgttaagatgaatgagtgaaaatgtaataactattgagcaggaaatgaatgcatttgtgagaaattagaggtggaaccaattgaggaaacaatcgagaagttgtgaggaggttcaactatgtgcagtggagtctaataagcatggcagtgtggatgagtgatttgattagttgacaatgccagaggatgaggaaaaccaaacagagcatgggtaaagatggtaaaaaaatgattgtgaaatatctgttgagagagttgatggcaatacaaaatccatagagccaacatgtgtagggatttagtctttgttcaagcaagttgagaaactggagaaagataagccatctccatagatgtctttgattagactggtttttattcacattcaattttttttttttttttgattggaaacaacacaaagatatattgatagaaaaaagaattacaagaagaaggatgagaaatcctacacaccgctatccaatccaattgaatcacattaaggggagtccccttaaatgccttggaacagaaagcccaaagggaagcaaggaaaacaatagagtcccaaaggaactctgaattccttgctttattctcgaaaatccttgcgtttctttcccaccacacaacccgaattagagcgatgctcgcagcttgccacaaaactatccctctcttagaattaccgaagcctttaaatttgatgtacatcatgtcatatatgctccttgggggaacccaatccatcttagctaactgaaataacctgtgccataacccaatcgtcaaggaacaatgaagaaaaagatgatctgctgattccccatgcttcatgcatagaatacaaatatcaggactaagggctttatagggtcttctcacttgtaacatgtcattagtattcaccttcttgtgtgccactaacgaaacaaaggacttcactttgaaaggaacttgagaattccaaacgaactttgaaggaaagtcctaagaagatccagaagattgagataatgctagaaaaaaggatttgactgaaaaaagccctgaagaggataatggccatactctggcatctgggaccgaaggagaaaaatacaaatcatcaagagaccgcatgaggccttctaagtcctcaatctcaaaatctgacaggttacggcggaaattcaaattccaagagaaaggacgagatggaccgagaactgaagaaatagaaatgtttttatccacgactactctaaatagtcttggatattgggtttccaaaggttggtccccccaccacaaatcttcccagaaccaaattctttccccgtttcctaccacataccgagtaaacaaggaaaacccctgaaagacttatgcaatagccttccaaggacagcgatgtgaccatctgactaaagtgttagcatcccaaccattagagtgtgaaccataaatgcttaaaatgacctgatgccaaagagctgaaccctctctaggatacctccataaccatttccctagaagagcgagattcctccaagaaatattcccaaaacccaaaccccctattgtcttcggtttgcacacaacatcccacctcactaaatgatcccttttgccttccccaacccctgaccataaaaaatccctttgcaacctctcgatttttgcagccactgaagcgggaatcttaaataaggaaaggaagtaacatggcaaatgggtaaggcaagattggataagagttatcctccccccgaaggataagtaggccttttgtcacccatctaatctacttgagattctctcaatcactggatcccaaaagccacacgctttagggttcccgcccaaagggagacccagatagagaataggccatccggacgccttacaatcaagcatcacagccaatcttgaaagatgagcctgatcaagattgatgccataaatactactcttatcaagattgaccttgagcccagaaatgtgcccaaacactaacaaaagactcttcagagtctgcagctcttcctcccttgagttagaaaagaatatggtatcatcagcaaattgcaaatgggacaccctagttctatttctacccaccctgaaaccctccatcatatttctttcctctgctctcataagcatcctactcagtacatctgcgactaaagtaaacaaaaaaggggataaagggtcaccttgttttaatcctcttgatgccttaacccaccctttagcgctaccattcaccaagattgcataagataccgaagataaacatccactcatccatttcctccatctaggactgaaccccttcttttctaacacatgatccaaaaaatcccacttcacgtgatcgtaggccttttcaaagtctattttgaatacgacgcctttctcccctgaccgtcttctctcatccactatctcattcgctataagaaccgcgtccaatatttgtctcccttgaacaaaagtgccttgaatatagtggatggtctcatgtagaacccctcttaggcgccctgagagcactttggctattatcttgtagagactagtgatcaaactaatgggtctaaagtctgatattctctttgacaaactctttttgggtaataaaacaatgaaagagacattagtgctttgattgataattccgctcctatgaaattctgcgaacactctcaccaactcctccttaatcacatcccaacactcttggaatacggcaatagtaaagccatcaagccccgaagccttgtccctatccaactgaaaaatggccttagaaatctcttcttcagtgaaaggggagtctaaccttaacgcactctcttccgaaataggggaccaatctaatccttcaacacgccaagactctcctgtaggactcgtgtaaagcttttcaaagtaatgtaagatctcctctgtgatactctcggcattcttcagcactaagcccctctcattctccaactccttgatatatttcctatttcgcctaccattagccactttatgataaaacttagagttgcaatccccttccttgacccatttcaccttagctttttgtctccaatgaatttcctccctcaatattaattcctctaactccccttttcttaaggttctttggcttaacaaatcagaattgagacccccttcttgttcaatggcatcaaagttagctaaatcattgagaatactttttttcttttctttaagctcaccaaaagaaaacttattccactccttcaatttggctttaacatattgaggtctcctcatgaacttatgaccttcccatccgtttccttgaaacccactccaccaatctctaaagttctccttgaaattagggtgttttaaccacatattctcaaacctaaaaggtgttagcccccacataaacgggttggtatccataacaattggccagtgatccgaggtccttctgattaaggcttcttgaaggccttggggaaagagcagtccccactcatttgagtagagaaaacggtccagtctctgacacacgggagactcttgcatatttgactaagtgaatgaagcattccgaagaggtgggtcaagcaattcacattctctaataaaactatcaaagtccctcatgcttggtgttaggctagaaccccccattttttctgagcttctccttatgacattaaaatcaccgcccacacaccataacggataagttaatccatatatgtcaaaaagttccacccaaaaatccttcctaagtgagggactgttcggaccataaacagtggaaatccaaagaggtccacaaccgtccaaaaagaacttgactgagaccgagaaagatcctattaccacctcctctcttttcagattttttgaatcccagatgatcaaaatcccacctgatgccccagacgtcggaagagcaacccagtccttatttctgaccgttcagacactacccacaaaccttctatcacaattctccttttttgtttcctgaatcatcacaacatccggattctcggacctaagaaaatctttaaccatcctacgcttattccttgaacccaaacccctaacgttccaactgataattttcatgggaaaacacaaagaccctaaccttccgagccaaaaccaacaagtctcaataacctgtgaggcctctgttcttcctcctggaatacaccttaatgtcaagagagcataaaacctctcgcactttggccattttcccaagggacagaccatcaataaggaaatcacccgaatcctccttatgcgacctgacaatagattccttaggggtacagctctcggtcatataggctggttttagtccatgattgactcaccttctttctgcctgatatgtaaacatcctttgcacaagatatatacatcttgtacattttattttttctatacaatattctttatttactaacaaagaaaaatgatggcgaaatggatctaaagaccttttgtaactctatggtaatatttcaccaatgttaatgaagagtcttcaccatagatctgcttctatttactgaaatgaggaaaaccaaattgtaggatggaaatctgacttgtagagacatagaaggccccgagaggacttatactgaatcggcagaaggataaaatccctggtcacttgcaaggctgctccatacccataaaaaccacacaaattaaaatccacaatcaaacaagtctgtttgatcctaggaattagaaattagggatgatagcttggaattttgatggaatgattcctttaataacgcaacacagtcaactccatttgttagaacagcttccatcttactccagctatcaattttgttctactatattgtatttgccaatgaagtgttttattcttgtcaataatccatgggaaagagcaagaacagggttccaaaattgtaaaaatattacagcaacaaatactaaagacagtctagcatcatccatgttccgattattgagttaggcattccccattagaatggacacaatgaattatagctacccacctctttatctggaattttaaacaattgcatgatctgtgaatgctgcattaatagtccaggcttaatcattcagcatcaagaaagcttacttattaaatccttgatatgagccataatgccgcaagagaatccccttaaaatttatggattctccagttgcttgacctgtcagatacaaaccaatcatatagtcaaatgaaaatttgatctgtctgaaggtctttataacgccataacttccattgataaattgaatatccaccattcagggaaatgtttaatacctctccaaacaccatcgtcccacccacttgttggagtcaatagatatatgatattagcagctttggaacagagaaaacttcagaaggcccaagttctgtacccttttctttgtaccttgatgcttcaagttggaaacttacggttattagggcctttccaacttacctccattaagtataagaaagaaaaagattagaatctaagataatgctagatattcctgcttatatatgaggcgtttatggtacacctcatattttggacggtttgaaaggcaagaaacaacattgcattcgataatgaggttttttctatccaaaagctgaaaatggattttgtttgctttctgttatctaagttgtttatagatgattgtccactgacttagtaagattttttttgaatggttgggtacttgttgaggttcatattctgttttcttttgtttgagccttgttggtgaaggggagtattgttctcttgtattccttgggttgctgttctgtcggctctttttagtttaatgtaagtgatgggggaaagccttttaaagtttattcaaggaagaaagtgaagacctaagtaaactttaagtaggattaatattaattagaattgaattgggattggtatttgttggagtctaattaagattagctagttgagttataatataattagaatttgagtcatgataggttattagattcctagtagactttggatgttataattagaattagaatcataataggttattaaagtcctagtagactttggatttcttagagaagcctataaataggctaatcaatgtaaatcaaaggaatgaataatattatatctcaatggtgagacttcattgattttcttctaggtgagactctaaggtttttccatcttttcttcattgtttcttctctctctctatttcttatcttataattttctctaccataaaatttattccttgttcctctccttacaccctaaaaattaaatcctagcccacctacccttgagtgtaggcaaccatcctagggttgtcctacatcagtaagtctttatttataaatatatatatatatatatatgaggtgtttaaggttatggcaaatattcctgcttatatagaggttgcatatttttttccttatttgcaggagaataaatgtctcttatccatgacaaatgacaatgatatttcgtattttaatgtacaaaatatttttaggttaaaaggtccattgagagagatacttttaaattatcttttgtttaaaatctgctttacattttcaaaccactcaaaatgcaatgagggtcaagttgttacatgtaactgactcatgttccttctcatgcgatagcagcaatactaaggtcttttctcatgtagactaatttggcctctaacagaatttctgaagaatttctgaactcctttattgataatgaatcggtacacaccatacacatatatatacacaaatgactgaataagaaacaatcaatctagcttaattctctcctaaaattaggaaactaaatcataaggaaatatcctaaatgatctctccttttttattcctaaattaaagtcctaactttggcattatttcaacactccccctcaagctggagaatatatatcatataatcccagcttgcaagttaagtcttcgaagttaggcctaggtaaagctttggtgaggatgtctgcggtttggtgcttggtaggaacatagtttaatttgaccgtctcactagtcaccttctctgtgataaagtgtctgtcaatctcaacatgcttggtcctgtcatgatgcacggggttctttgctatgcttatagctgcctgattatcacacatcatcagaattggagatgaactcgtttgtcccagttcactaagaaccctttttatccaaatcccttcacagattccctgtgcaagagctctgtactcagcttctgcactacttctggctacaactgattgcttcttactcctccaggtaacaagatttccccagacaaaagaacaatatccggaagtggaccgcctgtcaatgatgtttcctgcccaatccgcatctgagtatacttcagtgtcacggttctctgtctttctgaagaataggcctttccctggtgtcatttttaaatatctaagaatcctgtagactgcttccatgtgttcctcagtggggctgtgcatgaattgacttacagcactcactgcaaagccaatatctggccgagtgtgtgagagataaatcaagcgcccgacaagccgctgatatctccccctgtctaccggtgtactttctttctcgataccaagtttcttctgactatccataggagtatcaattggtttgcatccaagcataccggtctccttaagaagatcgagtatgtattttctttgagagactacgattcctttccttgatctagccacttccataccaaggaaatatttcaaatttccaaggtctttaacttcaaactcttctgacaaatacttcttcaaattctgtaactcccccatatcatttccagatagaataatatcatcgacatagactatcaatatggccaatttcccggcatgagatttcttgacaaatagagtatgatcagcctgaccttgtttgtagcccagcttcaggactgcttttgtgaatctatcaaaccaggctcgaggagattgtttaaggccgtacaatgatttttggagtttgcaaacctgattctttgccatactttcttcgaaaccaggtggtatttccatgtagacttcctcttctaggtccccatttagaaacgcattttttatgtccagttgttgcaagcaccaatcttgattgacagccaatgagagaaggatcctgatagtgttcagttttgcaacaggagcaaaagtctcctgatagtctatcccataagattgtgtaaaccctctagctaccaaacgagccttgaatctttcgactgatccatctgctttgtattttatggtgaaaatccacttgcaccccacaggcctcttcccaaccggcaaatctgtgatagtccacgtcccattcttctcaagtgcatcaatctcatcttgtactgccttcttccattctgaaatttttaatgcctcttgtattgtgttgggaacctgagtatcatcaagagaagtagcaaatgctctataagatggtgataacccttcatacgtaacataattcccaattggatgatctgtacatctcctaacacccttcctcaatgcaattggcaaagtagaatcatcaatgctgggaattaacacctctccagccctatcctcacctatgttctcttcaggaagacttgaattggagtcaatatattggccacatgttgactgtgatccgtgctctaattcctgtcttttcctcctcctgatgtaaacttgtaagttctcattagcaagttgtggggctataggttgaataggcatgggagactggatggtcacgggagaaggaacatttgtgtgctgggctggctgaactgatggcggcatgggtgtggacaactcagtgggcgcgaattgggaaggatttggtgactctgagtgaaaagaaggtacaccatcaagaaaagactcccaaacttgatgttcattcatgctctccccctgaacatgagatttgggatagaagaagacatgttcaaagaaagagacgtccatggtggtgtaaaatcttttgttggttggagaatagcatttgtaccctttttgggttggagaataccctagaaaaatgcacttatttgctcgaggagcaaatttgctacgattttgaggatacacatgaacgaatgccgtacaaccaaatactttgagtggtaaatcagaagaggcggcatgggtgtgaggaaactgttttaagaaaagttgacgtggggattgaaaggtaagcactctggatggcatacggttaatcaaataggtagctgtgagaatagcttccccccagaaatagtttggaacattagaggaaaacataaggcaccgggcaacctccaagagatgtctattcttgcgttcggccaccccattttgttgtggggtgtcaacgcaagaacttatgtggataatgccatgattttgaagataagtactgagactactagtaaagtattcctttgcattatctgacttgaggacttgtattttggaattgaattgattttgaaccatacgattgaaggtttgaaaaatgtgcccgacctctgacttttctttcataaggaaaacccatgttacccgagtatgatcatcaacgaatgtcacaaaccatcgagtgccagaaatattttttatccgggagggaccccacacatcactatgtactagagagaaaacagtcgaaggtttgtatgggatttgaggatatactgttcgagtatgctttgcaaactgacaaatttcacagtgataagatgctggatttatattgataaataatctgggaaacaattttgcaaggtaaacaaagctaggatgaccaaggcgatagtgtaacattataatctcactatctttattgaccttagaatttgacacagaattgaaagactctgacatactctgagactgtacgcaacttgcttgagagacttggttggagaattggccacatgaaaggaggtagagcccggaacacagttcagcactgccaatcatcttccccgatttcaagtcctgaaaaacacacaagtttggatagaatttagtaacacattggagatcatgagccaatttgctaatggacaaaagattgcaatccaagtttggaacatggaggacagagtcaagatataagtctttagtaagttttatagaacctgtcccggcaatttttgactttgaaccatcagcaatatggacggatgaatgaccattacttggcttgtaattttgaagaatggcatcatctcctgtcatgtgatcagaagcacctgtgtctactatccacggcctcattcctcctcgattagcagtgaaggctacaccggtagtactgccactgccaacttggcttaataatttctgtagcatctccatctgctctttgttgaatggactcggctcgggaatagaggtgctctcagagttggcagccacgtgtgctctgccatctctgtcaaaccgtggctttggtttccaatcagcaggtttgccatgaagcttccagcaagtctccttataatggcctggtttcttacaataatcacaccaaggcctatcccgtttctgacgatctccaccactactattaaatgaccgagccgcaagggcagaggcatccaatgttggggcaggttgctcttttgatcccatcatcactttctttctactttcttcacgtctaacctctgaaaaagcctccctgagacttggcaggggtttaatgcccatgattcggcctctaacatcatccaattccctgtttagtcctaggaagaacttgaacagtctcttttgttccacaatttgcctgtatgttgctgcatcatccgaacatttccatgagtgagtctcaaataagtcaagttgctgccaataccttgtgagtgtgttgtaatactgagtaactgactgctctccttggcggaagtcatgtagagctgattcaacctgaaacagttctgaagtattttcagaacttgagtaagtttctttggctgcatcccatatgtcctttgcagtcccaaacagcaagaaattttcgcctatgtcattgttcatggaattgataagccatgacatgatcatgctgttttcaatcttccacttcctgaaacccggttctgtagtttctggcatgactgcttctccagtgaggtactcatcctttcctttaccgcaaatgaacagcaacacagattgtgaccactgtaaatagttatggccatttaatttgtgtcctgtgatgagaataggagaggaatcattgccaccaaggtttggaatttcagatctgccccctgattctggtgacgtgacgctggatacttgtgatgatgccattccgtattttgtcatggaccggaaaggtagaagaacacttttcaaggcacgtgcatggactggagttgagaaaaaatagccgaaggacgccggaaaatctgatcagagggcccgcggaagcaaaagaaccccaaaagaggcacgtgcagggctcggattgcacaaacaggtaggaagggtggctggtcggcgtcaggcgagcctggaggaggaagcgcgtcgccggaaagtggctcacgcgccctcacgcgccggcgcgtgagatgcagtcgccggctggaaaaacgcgcgtgggaggcgcgtggatgggtttctggttccggtgctttgggacaaattggagatctcctccaggcgctccttgcggtgtagaaaaaaaccgtcgtcggaaagttcgccggaaaaattcgccggaaaagttcgccggaaaagttgccggcggtgagtgttttctgacgactattcgactgactggaaagtgttttctcccttggctctgagaacagggactgatggccggaatgagagagagagagagagatgatcggattgagatatggccagaaagatttggccggaatgagtgatggcctgaataagaggtggccagaagggattagggtttcagaaaactggctctgataccatgaagaatttctgaactcctttattgataatgaatcggtacacaccatacacatatatatacacaaatgactgaataagaaacaatcaatctagcttaattctctcctaaaattaggaaactaaatcataaggaaatatcctaaatgatctctccttttttattcctaaattaaagtcctaactttggcattatttcaacaatttctttcatactatctttaattgtctcttgtgtcttgtcaacaggatccggtaccttcttcttgcaaga

SEQ ID NO: 10664 - DNA, 1152 bp, Vitis vinifera
  Intron number 1 from transcript GSVIVT01012540001 (locus G SVIVG01012540001) derived from phytozome v7.0 (chr-ID chr3 _random; pos 964569 to 965720 reverse strand)
actatatttttcttattcattactctaaagtataaatcctcaatttgtatatttctttcaaccatcaatttgcatatatatatatatatatatatcatatcatatcggatcactaaaaaaatagagtaatttggtaaaataaagctttcgtggccaaatatttactctttcaatatttcaattgtaaggttagcccacgatgtttcaaaacaactgaattgatatctgggttgttctaccatcctactcaatgaatcattaggatttgtttttaatagaatattctatattcataggtttctatcaatctcatcgcttctaaattaatcgttagatcttaattatataatgaaattaatcattgatattgaaaaagttgtttttcgtcttagtacatgttccttggggttgagaacacccccgaagagtaggagatttcgtaacatttctgattgattgtcttgtgtatatatatttaaataatttatttattaattaattactctaagaagttaatgattttaatttctattttataaaaaaattatacaaatacaaggcttttatgtcatattatatatatatatatatcatcatcttactaatttcttttatatctttttgtttccacacatagggtgggtctcctccttgagtattattgaagaatgatttttagggtcaaacggataattcttttctattctaaaaaatttaatagagaatatctctatctatatctatttatatatctttatactataaaaacccgaatacgatcttattattacctttttacattttttacctatcatgtccgaggtactctcaaacaaaccatttactatttaccattaattagtacaagaatgcaagaaaacaataaatataattaacctaccaaaagaaaaatatttaccaaaaatgttccaagacaagtggattcatccacgaaaacaattaagaaaaagaaaaaaaaaggggtaacgcaaaagacaagtcagaaacaaacaaggagggtaattaggtaaagcagcccaagaaggacagaagggtcaataaaaatgccaaccaggttatatattaagacagctcgctcatccgcaaaatgaaccagaaagaagaggcggcagcagcagaccaccaataccc

SEQ ID NO: 10665 - DNA, 12308 bp, Vitis vinifera
  Intron number 2 from transcript GSVIVT01028990001 (locus G SVIVG01028990001) derived from phytozome v7.0 (chr-ID chr5 ; pos 10188150 to 10200457)
aaatttatgtgagtatttatctgctgatttttatgaacttccccaacctgtgcctccttccattttcctgagcgttctctctcactcactcactcagttgtcattctgtgtgtgcatacaagcatgtaaaatgaaacttataccgagtagttatctgctgattcatatggactgcacaatctcctcccctcttgtcctctctctctctctctcacttgtcttggtacaggtgacctattatgaagtggacaggtgttaattacttttatgttgctttcctgatctacatgctcttgttgctttcccaatatcacttttttgccattgtttcatttctgtggctgggaacttgtgctttaattgttgcatatgttgaatgtgctagttacttttttgtaatacaaaaacaaaataattcattgcatcatgtacaaagaaggatgtcaagtccttttgagattatcaaaactcaaaaagggaaaagcatgaccacacttcctatcaaaaaaaaaataaaaatggtatgaccacactactctaagagaaagcaaaaaacgtttgcacattttaaagtacaactaaaacaaaatttatgaactacgaaatagaattgtattgcacaactcaaggggattaaaaggtcccccctacaaaggataccaactgcttgcttcctaacttggctaaatgatttgctacctggttagccaagcacaaagactaagaaaaggaaaatatcaaatcactggctatatcaataatgagacagatccaatcatcgtacctccatggatctctttctttcttgggacaatcatggagtcaacatcaaccccttaattcagttgaatgttctagtagttttttttattagaaacaaaataattcattaatacaattttttaaaggatgataaatccttccaaaaatatacaaaatctgatcttaagaagaaagagagtgaactcctccagtaggaattataggacaacaatacatctcaagaatgtaacatgaaattgtatctgttagggcaactctacactccccaatggggtaagaaatctgctggaaaagaagtactgatgcttagctcctcgttttgctaaaagatgctggcatgattagttaaccaaagagacaaaaagaaggaataaccccaatctttggcaacatctagaatttggcaaagctatttgaaataaattttgttatacttgaattgtattagaatacaatatatacatcctatttatacataattggggattagattatgatgaaaactgaaaagttattggagctattttccaagtaaactaccaccaagttactccaaaggccgtcggagccaaaatttgttaaggaaaaaaatctaggaaaaacccttcacaaaagctgaaaccaggaacttctgattaatcacttttatattttcttttggataatcatcaaaagttcttacaataagcaagttcttcccttttataatgacaaccctcaattactttctgaaggtttccaagacacaattagtagcctttaataacaaaaactgacctttggacttctaatttaataacaaacctttcccatgcaaaccttttatgttttcaaactgccataaattgtctaatattgactacatcagattcccctaaaatctctcccatgaatcagggatcttattcacctaccacctattatcctataacctctcccataaatcatattttcacaaagaaagaaaaggaaagaaataaatgcaaaattgtttagaatctaccagcactccccttaagttggagaatagatgttgtctattcatagcttgcatgtaattatttggaactagtgactagccaatcctttggttaacagttaacacatctgcaatctgcccttttgttgaaacatagggtgtgcaaatccaaccactatcgattttttccttgatgaagtgtcaatctacttctatatgcttcgtttgatcatactgtattggattgtgagcaatattgattgctaatttgttgtcaaagtataacttcattatcccttcctacttgattcttagatcatgaaggacaatctttatccataatagctcacaaatcctatgtgccatggctttaaactttgcttttgcacttgattgagctgccacaaattgcttgttgcttctccatgtcactaggttgccacctaagaatatatagtaatcagagggagagtgtcgtatgcctctaggctcagctcttcattttttcttaaagaaaattccttttcttggagtagactttaatgtagaatcctgtataccacctctagatgaacttccttgggagaatgcatgaattggattataacattgacaacataggctatatttggccttgaggtgataagtagattaacttcccaactagatgttgatacattccacattccactattgcatcttctcaagcttcccctagcttatggttttgtgtaataagggtataaacaggcttacaaccaagcatgttagtctccttaagaagatccaaatgtacttttgctgagagatgaaaatacccttacttgaatgagccacttcaatccctaaaaagtacttgagttttcaaaagtcttttatctcgatttctttagttagtttcttcttgagtctttctatttccttagagtcatctcttgtcacagttatgtcatcaatataaactatggcaatgataagtttacccatgtgtgagcatttgacgaagagtgtatgatctccttggctttgttgaagctccatatcattcatagcttttgcaaatcttccaaaccatgctttgggagattgtttaaggctagaaaacggctttttgagtttgcacacattgtttcttttgaagtctccattgaaatgcggtggtgtttgcatgtacacttcttttaaatcatcatgcaagaatccattcttaacatcaagttgctgcaaagaccaaccaaagttagttgggaaggataataatatatgaatggtattcatctttgctaccatagcaaatgtttcttggtagtccaccccataagcttgcatataccccttggtcactagcctagccttatatctctctagtgtctaatcaactctatatttcacagtgaacactcatttacatccaacttgtttttttccctttggtaattcaactatttcccaagtttggtttttttcaagagctaagatctcctctttcatagctttcctctaattctcacatctaagtgcttcttgaaatgtttgagggatttcaataggagttaattgggtagagaaggctatatatgatgaggataggttttcaaatgaaataaaattggagaccaggtgttaagtgcattttctaggagttttcttaagggaaattggtaaatggagatcaaaaaatacttttgaatcttcttgattcaaaagaaatacttttgaatcttcattctaaacaaattagtcatgaggttctagtgagattaaaaaaattttaagcaagagaaatgacactagaaacagaattagtggagtttttttgttcattacttggctcaggttcagactcttgagcttgcatttgatcaggttgggactatttctgtctagagtaaacctgcaacggcatggtagtcgcattaactcttccttaatccatttttgatgaggattcttgaccaggtgacaaggaggtagaactataggtgagaccataagtgaaagaggcatggattcagaaagtccagacaaattaggtaaaccataacaaagaaacttatcttcacctaagctctccccttgaagataagtatttggaaaaaatgattgattttctacaaaagtgacatccatggttgtaaaatttttttgaggagtagggtgataacatctataactctttttggttggagagtatttcacaaatacacattttagagctcgaggatcaagtttgttgctatttggaggatagatatggacaaaccacacataaccaaaaacgttgggagaaagtttattgaagttatggaaatgtgggaaaaactttgagagtgtgtccaatggagttttaatttcaagcacttttaagggtagtcggttaatcaaatgagttgcaattaagacaacctctcccctgtatgatttagacatatttttctaaaaaagtaaagctcagttgatttctaatagatgtttatttttttgttcaaccacacctttttgttgtggggaattagtacatgaagattgatgtataatcccttcttgttcaagaaaagaagataacaccagattaaagtaatctttcccattatcagatctaatatttttttatattttaactctgaactatgtgttagccattttgtgaaagataggaaatataggactaacatctgatttgttttttatgaggtataaccaattcactctaatacaattttcaataaaggacacaatccacattgctccagaaagacttgaaattcgagtgggaccctagacattaatatgaaataataagaaagcgaatgctgattttgtattacttcaaggaaactgaatacaataatgtttaactaattgacaaaccttacaatgaaaattattaacatctagtttattaaataataaaggaaacatttttttgagtaaagaaaaagatgaatgccctagatgaagatgatgcaaccatatttaggctttttattcaatgagaatttttctgaaaaatgagagagtgacatatgatcaattgctaaaactgggtccaagcaggtataaaccctcttattccttagcatgcccaatcatcctcatcatggctcggtcttgggtcatacaataagatgggaaaaaggtgactgtataattcaaatccttagtaatttgatgaattgacaatagcttagctgaaagttttggaacatataacgtggattttaacctataaagaaaaacatgtgacatggatattaatgtgagagctgaagttaaagcaatttctccttggcttgccacacttgctagtgtgccatcaacaactttaattttttattcctagaacatgaattattagaagaaaaacagtgtgaagaaaaggtcatatgatcagtagcaccgagtcaaggacccaagtacttggaaaatagtcctttgaaacactatgaacatgagaaatgggatacttacttgattaggcaagaaagcatgaagcagtaggcttatccattgaatttagaaggctacaaagcctctcaatctcttctctgttcaatctaccaacatttgaatcatcagaagctgagatttttggttgggaattctctttagattgagcaatatgggcttgaccattcctgttgtccagattgtgcatatcgatttccattccccctaccaaatgattgcagctttccatgtagtttttgacaagtctccttggtatgcctcggtttttttgcaatagacacaccataactcatctttgttgactggtgatttggacacttcacttcctccataattgttgtttggcagtgtggagtttggcttcatagtgacaggagctgaactttctgttgttggagtgtcaagcataacactccttccttcttccttcttttgctcttataatggagaagacttcatttaggggaggtagatcttcctttcctagggcctggaccttgattcgaccatattccacattaagacctgctaagaaatcaattatcctttccctttcaacatatatgagcatcatggcagcatctttgatgcacttcatcttagtattttgatagtaatctaattccagctataaacttttcatgatattatagcattcgctgatctctggttgcattgaattccacaaccatgacaaaatcattgactcctcttcatcgcatgtaaagaactttggattgtcttcacttagggcaagtctaattagatgactcaattttccttttcccataaaaaatgtttgcactagttgagaccaccccaaataatcgtggccattgagtttgaatggatttgtagattttgatattttgtagaagggttattgctagtcggattgggagcaaagtttgaagattggatgatttatgatccaccagacatattggagcaaatcagaaatagtttctgtaaatttgagaggggaaaatctaatgaggctatgcaggccaaaaaattcagaggaaggagatgacatcaacaatttctgctgctggcaatgaaggccgtacaagtgcagcaaaattctcagcaattaaggctaagaaaaaaaaaaaaaaacttagggtgcaaaagagagccctagctcttgtaccatgaaataaattctgctctacttgaattgtattggaatacaataaatacatcctatttatacacaatggaggattaaattcccttaaaatctctcccacaaatcagggatcttattcaccaaccacctattgtcctataatctctcccataaatcatattttaccaaagaatgaaaaggaaagaaataaatacaaaattatttagaatctgccaacactatccataactccaaggccctttctttgatttagtcactacatgtcataattgtagaattccctactgcccataacttataaagacagagcgttagcctataacaaacactttaaaagagctaatttttttgctttgatagcgaaccctttcaaacctgttttgaaaaagttcactattatagtctctaatcacacctccaatacttatctaaatcaggttacccaaagtacatctaccccttcagaattatccagattaatgtgagacaagtaacacaaaccccttaaagacacacttttaggtgatatatttaggctggtttgaataatctatggcatagtctaaagctattaggaagtgtaaaaaaagatggtcaattaacactactctccagatatataggtcaatggtacaaactaagagctttgtaaggccttctcacttgtagcaaattattaacattaaacttcttattttatttttatcagaaacaaagataaattttattgataagctttttattgcccactagctatgcaaaggtgttattgtagatggggttagagttaagaatgaggtttttaataggcaataaaagatctatatcaaaagaaaagagtacacatgcatattcaacgagcacaaaaaggcaaagccaaataagggataaaaaactctcctatatcaaaagaaaagaggacacatgacatattcaacgggtacaaaaaggtaaagccagataagggattaaaaaaaaaacaactctcctatatcaaaagaaaagagtacacatgacatattcaacgggcacaaaaaggcaaagccaaataagggatagaaaaaaaaacaactctctctctctctctctctctctctcactgagattctaagcaatccacaaaatcaaccaaaggcattgaacatcccaaccaatgctaagagggttactaaggaacaaacatttcaacttctgatccaacatctccttgttttcaaatgcttgttggttgctttccttccacaatgtccaaaaaatgcatacggagtggctttttgaaccttcttctattttctcctcatgaatgagaacgtaagctacaacaaataagtagagcaacaacgaccataaaacccttgattttagacaatgaaatagaatgtgattaattgattcttctgcaattttataaaaaaaaacatctattcaccaatatccacctttggagttgatccatcgttaatacttttccttggttgacttcctaagaaggaaagaaaaaaaagaactcgctttagtcaagatgcataaattctggacaatgctggaagggaaagtaagaatgaggttaaagtcataaatattagatagtgctaacaagaaagatttttatttttatttaatttttatttttatggtaaataagcctaaggacatcaattacccaagtttgacatttggaaaagaaggcaataagtacatatgaataagagaggacatgagaaatttgagatcctcaatttttgaattcttaaagttaagataaaaattacttataaaaaaaagttatggtgcattctttgcaaaggaaatggagagtcgtttgacgacctttttcttcattgtcccgttaccattggactgtggcacaagttgttcaatctagtagggttggtttgggtccctccaatgagccttaaggacatgctggttattacttttaaaggcctggggacctcattaagaggcaagacactttggcaaattgcttgccttactttgatttggatggtgtggcaagaaagaaacaataggatctttgaggataaagggagaacggaagagatggtttgggatttgattcggttttattcttctctatgggcttcttgcactgaagcttttagaggagttcctctaaattttctacaactcaattggattggggtttgtgtttcaaaagtttgaagattgttggggtttctctttgttcttagagttctattgttgggagttttttcccttgttcaatttgtgtaggaaggacctctcatccttcccttggttttttttctctttctttatctcttttttctctcctgtatttgttctttattaatataatcttcttcgtttttgataaaaaaaaaaaaaaaaattaacattccaagatgtagaggaagaggagaaataaaaaattgatgaaatatgagagtttctaactttcactgcttagaaaagctttggaaattgaaaacaaagtggttgatcttcctaccacaagtcttcataaaaatgaatcttagtaccatcatctactgaacaacggatgacttgaaaaatccaagagaacttgttcaatagctttccaagggctatgatatgactaccttagtgcaatgttggtttcccaattattggagagtgacatgtagatggtatgaccttgcgctatcaaaaattatttttcctatagataacactttactaagagagctccatttctcaaagaaaattttcctagaacgaccccttaccctttagttctgcatgcttggtcccaacagatgaggtgacctatgttacctaccccacacttgaccagagaaaatccttttgacaatttttggattttggatgctatttgagcattgagatcttggatatgaaaagaaagtagctaagagtgagataaacaagaatacaccctagtttgtattagcccttgaaaacaaaatggtgtcatttgctaattgcaaatatgacaccctggttctacttcttttcattaaaaagccttttgcaatgccatactctttaactttcaacatagtggtaaaaaataatgggaaagtggaccaccttgtcttgaccctctagttgctttaaaccaacctttgacacctctcttcattgagaccgaaaaattgattgaagttaaatatcccctaatctaagacctctatcttgtaatgaacctctttcttttgagtgcatgatcttaaaagcctccgtccacatgatcatggtattttcacaatcattcttgaaaattactccttcctcaactactatttcatccactatttcatttgctagtattgtcttttctcatcaactctttcattagctactaatactacatctagaatttgtctcctataaacaaaagctccctgagaaagatgaatggtttcatgtaggaaaccttgaatgtggctatattcttgtacgaacttgtcaccaaattgatgggtttaaaatctgaaattttattagcattctttttaggcacaaaaactatgaagttggagttggcgctttgatttatgagcccagtattgtgaaaatttgcacaaattctcaataaatcctgaaagtgaatcactcatgtggggagggggggttggtgaataggtgtttttaaacaaattcgaaaaaggtcctctaacatatgttaccttttcctttgaatcctcatagtttatattccttttttccaactactattcaagaaagaggaaaaaaaaacacaagcaagcatgaatgcaacaacactctcccaacaatttatcaatgcaagccacatgcaaatgcttcaacactccctaacattaattcataagaccaattatctccctaacacatttccaattggcacttgatatcatttacaatatgaacagagaattacctatcaaaaatatatagatatatataaataaataaattattcaagaatatccaaaaggtaatcacactaatttcagctcatatttcatccttcaacaaacatgttcaagtaacaaaatgataacaagaactagaaataaatcaaagagaagaattagagcaagaaagacaatgacaccagatttacgtggaaaatctcctaagagataaaaaaccactagcctaccaacgataaaaaattttgctatgttgaacaatcaatgtgtacaaggatttacctaattgaagtccattaatcctttgcagattacttgatcgacaccttctcactttagccacatgccttaatcttccggaatatactcagagtccttgccaaacttgatctcagcctattcttgaagctcaatcaagaagaaaatgagttttcacccaaaacccaaatagataggaaattgagagatgaatggaatagaagaatcaaccccttttttaagaaaatccattggacaacagtttggaaatcaagatgaaaaggaaattttcttggcaaccagacaaccctaaatatggtaagaaaagagagctcatgaggggagcggctgcaggtgtatctaccaaaacaagaagcaattttttaggtttttaaatgagagaagcccttgatccaatagttaggataacataaataaaaagcaaccaggatcgatctaacctaaatatggattggtcttggaacaaggcatttaaacacttggaaaaaaaaaaaaatgctttccaagcctccttaactccttaaaaaatatttaaaaaaaaaacaacaattgaacaacttggttgattcaatttcacccatatccaacctcaactacatacctttttttttttatgggtaaataagcagaatatattaaaagcgcttgcaaaaaggcacaataacctcaactacataccttgatctcttagcaatttcaacatcttcatctttattcgacaagtagttcgggcaaggatttggaaagaccaagctaatagacacataggaaatttgtctggaattgtcaacctagctaaacactcaaatcctagtttaccatatcccaacaatcttgatgcaagatatggggaagccattaggcactgacatcttttccttacctggttgaaagatcactttactaactttctattctatgaaaggatgatccggccaaatagcactctcttttgaaatagggaacccatcctacacttctaccctctaagaatcttcaatagacccactctattatcttttcaagtactcatgatctcgttggagatgctgtcttggttaactaacgttgcctatgcttcctttgctaaagatctgttaaacttcttaattcttctactattagccatcctatgaaaaaactttgagttgcaatccctagctttttgcctccaatgcacctctttctttaacatcaaatcctccaactctgctttcctagagctccttagaacaaaaagctcaggatcaaattaccttcctgcttgcaagagtcaatggaaaacatgtccctaagaatattatttttcctgtacttgatattaccaaaagcaaccttcttccaaacccttagctccaatttgacaaactgaaatgttttcatggacctatgaccttcccaaccttccacatgcaactcgctccaccatgagctaatacactctttggaacctggatgaagcaaccacgtgttttcaaatttaaatgaggctgcttctgacttaaaaggatagtgtctaagacaattgagctatgatcaaagactagaaggggtaaggattcttagaggctaacagaatagccttgttcccattcacttgaaaataaaaatccaagcattttagttgttgatttttctttcttttgcattctcataacagttttgctatatgaggctaactggcctaatggtttttccagacttatacaggaagtatattgattgccgtgaaccc

SEQ ID NO: 10666 - DNA, 13040 bp, Vitis vinifera
  Intron number 1 from transcript GSVIVT01031435001 (locus G SVIVG01031435001) derived from phytozome v7.0 (chr-ID chr6 ; pos 18608999 to 18622038)
gtttcaagattttgtaatattaatataaaaacaaagtgatgtaattatatataaattatacttttgtttatacaaacaacttgtatagagtcctaatgaaatatataaaatgtaattttttgaagtaaaagaagttattagtgttaaggtttgttttcggattgtttgtggtttgtttaaagagagagtttttaagctattgacgatcctttaatagaggaaaaaggcttttgaagaaatgggttaagatattggagtatactaagttgaaaataggcaaaaagtagtttgcacatgtggtcatggagctagtgcacgagttaaagtttaaaggagggagcgtacgcaattggtggtgtgtagggtaagctgagctaagttgggtacaggtgcatagagtacagaagaaaaggttgagggtgcagaactggaggttgtgttgagtggaagagttgcacttgtgggggtgtgcaagtgaggtacacaacttgtggtacgcaagtacaaggtgtgctacctaagtaaagaagtgtggtgtgcaattggaggtgtgcaaaattaattgtagaagtaagtgcataattgggagatgctttcgatggtgcgtaagttggtagtgtgcaatgtaagtggtgcactaaaggtacgcttcgatgaagtgggagcgcatgttagatgtggtgcattgtattttctggcatgaccacaggatttatacgtcatcatttattatttgatcatttatatctctaagtttacaatgtaaataactaaataccctgatttgaatccaataaaaatactttgagaacctaattctaattaaatcaaaatttgattttctaattttagttagaaattgataatttttttggaaaaaaatttacctaaaaaaattatcaaaaagataaaaatctagaaaaattattttaagtattaccgcaatgagaacaacaaaattcatcactttttatctcaaattttaaaagttttgaaaatgatattttttttattcatacttgatgaaatttctacacaactaaaatagcatgtcgggcatacctgaaaacacccttaaaggtaatgaaggttgcatatcctcgattaactaaggttattataactagagttttccaaaatcaatttaattaattgaaaaaataaaattcacttaaataacaatcaaacaaatgatatgatactcttaatttatttcataactaaggaacaattcaaaatatatttaaaaataataataacttgatgcactttatggaatttaaacattttaatacattaatataagataaatacaaataaaaatgtataaaataattcattgtattgttaacccttattcaaagaagtcactcaaatttttgaaagaaatcaatcaacacatgtaacataaataaaaactattattattattattattattattattattattattattattagtaagttcctttttaaaaaaagaaaaaacttaaagtaggttctgattggagccaaaatatgtgctctaatggcacatattcgatatgatttgtgcaccaaaggacattcaaatcacccaacttgacctaaatcaatgctaaggccttagtcatgagtctaatctatactttggagatttatctcaggttcaagggaagaaaattgtgcaaattgaatgactttagattttgaaagatcaagaaagggctaaatgaggaaataagtgagtcaagactcatcgaatgtaaaggaaggcaaaacaaggatatcatgaggttggaggatgataaatgaccattatggagtaagaaagaaggcaagaaagaatgggaaatgaggcatgaagcaagatttagctgcatggaaatttagaactcaaaaatctgatggcgttatatactctaacattgaggacaaatttggagcactttatggagtccattatatacatactatacatcgtttcgaagctcggaaagtcaggagtccaacacttcaaacggtttgcaaatcggagctgaaatgaagaagttatggccatttgaagacaactgcaccaagctggagggtcatttcgaaatgatttcgaaattcaacttatgatttcgaaattcaacttatgaattcgaaattcaacttatgaattcgaaatccacttctaaatgacaccaatttcgaattcacccactgccactttgatgttccgcttcctctacctcgggaattgcatctaaagcactccatccgccctagatggaccccacacgactagaaatcaccattttattattttttaatcatttttaggaaattattttgtaataagtggccaatgagagtgtgccacatgttaggtaattgaggatattatataaactctctcaattctaggttttaggatcttggattttttctgaagtttttgacattgaaggaggaagaagatgagaactttggtttgttttctttttcttctttattgaatatattgtttttagtttcttttgattcaaattatggatttttaccctactatggattgtgaatgtgacatcacccccatgagaggctaagagccaacttggggcttgaagcatgaaaacctaagggctaggaaacctatagggacaatgggtaaattattataacaatgagattaattattggttgagtgacaatttatcaatttttttatcctatccttgtgagttcgtttagggaatgatacggtaggttattacttgatactagtgattcttggtaattcttgatcattagttatcctcatcttacctaccgttatttgcccctaaacaaagctataaggagtaggaatagtaaaaagtcaaatcttaaattgataatcaatctcattcatttgatggttttaggaatctgttttaaaaatgaaaaattaggtttcggatgcaattttgagttatataactcaacttgatcgcgagtggccaaggatcccaaaaccctaagatcatattacttaaaatacccttgttttctataatttctataccctaggttggattgtggaaaaccccaaacttgaatcaattgaatttaaaatcaatattcattttctcttattaatttaatttcttttacttagtttcacattattcacatattgttttccacttagggatttaaacaaaaacaattcatttattcttgtattgacaattttcataagccagtccttgagaacgatacccggaatactacaaaagccgtagtgactctttctctagtttttcttgaccagagttactacgtaaaaaggctaagtattttggtacaatagagaaatttcgatcaggttccaactctattctaaaaatctattctatttatgtatttaaactcaaattcctagaaatccacttcttttgttattttattttatttatattatttatatttttgcatatcatccacaaacttacctttatttaattattctctttaattttcttgatgctctcatctttacccatcaatactaattggacacgagtacgaacacctgatccatcacctcttagcacgggtcaggtcccttgagcactagaaacaatgaacgactatttctaatgcatgcaataacacctggatgcaactcggatttagcaggcataggcttaagagtgtagattccatacacaagccaaagttgtttgtgcaggtaggatgggaaccaggggcggagccaggaagtggttaagagggggatgtgtggagaatagcttcaaacttcttacgtagtctggtggtaaaacaactagtttcctaaaaactacaccccaaaatggatactattccattgtcaccaaggattttaaagtaatgtccctcaattttattttatttttataatttatacactatgagctaaaggtcatatggaatggttatttttaactgcaaggaactgttgagaattgctacaaaactattagtgaatcatgatctaaaatcgatagagttgcttttgagcccaacagtatttcaatcctcaacaagaaatttagaatttgcacgtaaataaatattagtactcttcttaccttgctcttattcgtagattttagaagctaaggcttaatttgagacttattaatttttattttttttcctatgtttcagtcaattgaataattctgatgagctcatggacttcttggacagagcatattctattgcaactcaacataatgccctatcgagctaccccgttagtatgctttatggtgggattgatgaacatgcagtgaaatagtaatcccaatagggcaaagcgacaatgacaccatatttctaccgacgcctttcaatctaaccacccacatccaggactacacaagcccctatggcgtcccacctcgactttattaggtcacaatttattacaaaggccatggtcttatatctttttttcaagaacattcataataagaaaccctagattttctttctctttaaatcttttagattttagatggtatcatagcaaaattgatcttttaatgacacttgatttataatatcatggaagagagtttaatctcatacactatttttttcatatccatttgttcatgcaattcctttttttcatgcttgatcatgagatatcgtagtgggtgattgcatcatttttttttcctgtttggtcctattatttgattttgtatttgttttttttttttttttgtcaatttgtaattgctttcttttgtttggtggtatttgttgattcatcatgactagtgaacaagataattcctttcaatccattattgtgggattagatggggaaaaaaatatccgtattggagttgtgtgatgaacatttttctaaagggaaaaaatatgcaggcttatataattggcattttaagaaaacctatgaataaaaaaatgaaaaatattcaaaacaattagatgtttggaaagtgagcaatttgaaaattatcacttggatcaacaactttgttgaaacttcgataggtacatagttggcaaagtatgaaactgctaaggagatttgggaacatttggaaagattgtatatgcaatctaattttgtaaaacagtatcaattagagattgagattcaagcccataaacaaaaagacgtgaatattcaagagttttattccatgatgactaatctctggcaccagttggctctcacggaatcaataaagctccatgtttttgcaccttatattgcccatagagaggaacaatgtctagttcaattttttatgactcttcataatgattttgaagcattacatgggacaattttgtatcacaacctacttccatatgttgattcaatagttagtgaattgttagctaaggagatatgtcttaagtctcaagtaggaaaatgcatactatccacacctcatacatctattttggcagtcctttctaggccaccttttaagccactttctaggccaccttccaacaaatcaaaataagtcttactcaagggttgctgcaaatgaatttagttacagtaagcaaaagggtcattggaaggcttcatgcttgatgatcctccctagaacaatgcaacactaaccttctcaacagtcttagcaaagtcaattcaatactggccaacaacatttttataggcctccacaatctaataccacaatagttgtttcttcatctaacttgtcttgatttggactcacattatcctttaattccataatagtttcctttgctaaacagttccagaagttcctttccatacagtcacatgctatgtatgacttttcaagtttgtcagctactaattctttaggtatgtcttctttcatatgggttttggactctagaccttctaaccatatgtcatttgattccttagcttttgcttctttatctcctacattttctatgcatggcatgactactaatgacactcatttacccttagtcagtattggttctattattacacctcatttgtctctttctcatgtatatcatattcccaatcttacattgaatcttgtctctattagtcaattatatgactctggttacttggtttcttattcttttacttcttgttttatgtaggatcctgaatcccaaaagctcattggaaaaagtcgtaggcaaggaggattatatattctagatgagctaaaagtcccaactattgcaacttctagtcttgatttgtcttctttttatttgagtcctctttcatctagtttttatttatgccattctcatctaggacatgtttcgacttctcatttaaagtatttagtttctaaagaagcataagaaatttgtaaatacaagatatctctgattatagtggttgtaaactagaaaaatttgttgccttactttctaatagaagtgtttccctttctttcatctcatttgatttaattcattttgatgtgtgagaaccttctccaatttctacaaaagaaaggcctcaatattatgtttccttcattaatgattatgctcgttattgttgtgtttatcttatgaaacattgttctaactttttgaatatttataatgcatttcaaggttatgttaaaacttaacattctatggttatcaagtgttttaggtatgatttaggtgggcaatatacttccaatgcatttcgtgaattacttgcttcacatggaactattcttcacacgtcttgtattgatactttagagcaaaatggtgttgctaaaagaaaacataggcacattgttgaaactgctcattctcttttattatctgcatgtgttcatattgaatttgggggaaagtagttcttattgtagttcacttaattaataaaatctattcatctcacacctttgatctatcaccatttgaaaagttatatggctatacttctaattactcttacttaagagtctatagttgtacatgttttgttcttcgtcatcatacagagtgtagtaagttatctactcactctgccatttattcttttttaggatatagtgaaagtcaaaatggatatcgttgttttgatctgatcaaccataaattatatgtttccctattggcatcttagatctaagcaatggaagcaataccaatttttattttttttaataatcttttagagttaaagtaccaacctttaggtttggacgttctcaaaccttaaattccaagctatgaaaaccttaaaccctatggggtaattatggggatcctaattaggtttaagtgacttgagtccatatgggtcacttaatctagcccaaaaatggttcctaattgattaattaacccaatatgacctactaattaattaattagcctaatccagagatcttgttcacttacccttgtgtaaccttacataattaccaaaatgtctttttgcacaaaagtgaacttaaaaccaatctaaccttcataatccatgccaacaaggtatatgagctcaaagtggagaccattgggacccataagaatactagctccctcttaatccaattttgaagttgattcaacatctcactacagagaatcaactaaactccagtatcctatgtaaataacaatgaaacactaagtgctcaggtccgtgacctactatccactacatgtagactccctatgaactagtgtttataatctaataaggtagtgttatcacctatcaaaattacttttcaaattcttgagttacagatctcacttattatgtaatcaaataacatactctaactctaaagagcatatgtcaaatttcacaaaagaaattactgtggccacagatttcatgatcacatgtcctttggatcacccaaaaagacacactgtctcaatctcatgagatatcatgatgcctatattgagaatatctattatcactagtcttcatcaacaatgacccaatccatagggatatatgaccactttagggactcacccatagatcaaagtctcatattgattttggcacagactcaatatcctttcaaggttgagagtctatgtaatatagtagtttgatgaatcattacaattgatagtcttaagtcatgattcaccgtaggtcctatctagtgtgcatcacatacactagtgcactcaccatggaaaactcatcccgatggtcaagacaagtactctctctaattaaaaggtggtgcactacaatctctactggattgcccaaatccatgaatcaactgtggacaacttatctactttcacaattctgtactttttctaaaaagcacctctgttggtcgtatatattcttctttctttatatgttaatgatatgattattacaagtgatgatgttgatgggattgtagtgttgaaatttgatgtggcttcccattttgaaatgaagaatttaggtgttctatgatactttttaggtattgaggtagcctcttctctgaaatgttatcttctctcacaatctaagtacacaatcaatattctcgattgaactcaccttactaatactaagactattgatactcctcttgtggttaatgttcgatactcttcttatgatggtaaccccccttgtcagactctactttatattgtattattgttggtaccttggtctatttcaccattatatgtttgaacattgcttatgttatccacattgttagtcaatttgttacttctcctataacaattcattaggctgttattcttcatattctatgatatctttaggacactatatttcagagtcttttatttccatccacttcctttttagagttgcatgcttattttgatgttcactaggccaatgatcctaaagaatgtaagtctacccctggattttgtatatttttgggaaattctcttatttcttggaaaaacaagaaacatactattgtttctcaatcttccacaaaagttgagtattgtgttatgacgtctaccaccaatgagatagttttttagttacgttggttacttgctgatatgggtgtttctctttcttgtcccactctaatgtattgtgacaacaagagtactatttagattgctcacaactcggtctttttattaaaagaccaagcatattgagattgattgtcacctcactcatcatcaccttcaacataacactcttactttatcttttgttcctccttccttacagattgcagatttgtttaccaagtcacacctctttcctcgttctcaattgttggttagcaaactctcaacacttcttacaattacaccatgagtttgtgaatggatgttagagttatttatttagtagttttatttagttactatattagaactattttctttcctttttcaagagtaagggtaagttagtctttatttctttttattaagtctatttaaatcctaatggtgtgttttatctttttttcaaggacattcataataagaaaccctaaattttcattctctttaaatcttttggatatcacagcaataattactaatctttatttttttatcctaattgcaagatatagaattgattctccataggtttgctagcaacatcatcttctctacctggcaaagagatccttagagcagtggcagtttttgtttctgtttttgtctttggggttttgttttttttttttttttttttttgtatgtccatgtggcatatacacatatccctcaatttgatttttttttttttatctttgattatagggtgttgaagaacatatctcattctgttcttgtcattctcggtgtcaatggtatgtttcctaactatgttttcaacccaccctattgttatctacaagaaataaaataaaatatcaaagctattgcataaaaaaataaacttaaataataaaatataagaaaatataaatttttaattaatttatataaatttttaattaattataattatattagtttttttcatagtaaaactaaatacaagaaaataagttttttctaaatatttttttctcttttttatgctatttttcataaatcaaacaaagtttaaataatctaataagttggggtatatcatcttgtgccgagggagagttaagttaatagaaatgagtccttcgctattataacacttacatttataaaactacaacctcttaagaaacctaaaactacgatcttatttctttctacaaagagatatgttcataatatccttgctatttctctacttttgatctgcatagataaacttactcaaagttcaaaatggttcattccctcgtatgtaaatagcgtcggttgtggttttaacactaagatgacttgaagatgcatctgtctagttagttctatggccttgtctcatggcttgacactttacctaattaattaattaattaattaatttcctttatggatatttaataaaaagttgcaatcaataaatggctttccatccacatagtcccaccaaacatgtactaaaaatttaaattaataaaatattagtagggtatttaatattgttaacaagactgatagggatgttgtcagcatccagataattgaaaattcatcaaactctacattccacgctaagacctcataacatgcaaaacctctaagcttcaacaattatttgatttggcaggtggtcctcatcaatgacatcgtgccaacttgtccaagcggtcgacccattccgatttggttcgggtctgatccagttcttagaaaagacatctgggctctactaaggcccaattgttttgtttgagttgaatttgaaccctcgcgatccaagaggaaaatcaaaagcctaaccactggtcatgtatcacttttgaagtataaatatgaaaataatataaattaattaatataataaattttaaaaaatttaaataataaaatatataaacatataaattaaattaaatattataattttatcttcatcttaaatatatatttaagatttagtattacatatgttttatctaataaaatttaatacatttatatttatctctataatataatttgatatatcaaatataaaaaaataaaatattattaaaaaatttaattatatatatttagatatatataatatataaattatatttataatatcactaattcgaccatgattcaacaaacggttcaaccattgaacgtaaattgataatttttctaatttaatgacatgtctgattttgaaaatattggataattttgaaaaattaaaaatagtggacattctatttttaatttgagttaaaattttcaaataattatataatatttcctaaaataattgattttggaacatccctttttaaaaataaaaattctaaaataaaaatattttttcacactatatatcataggggcagatattattaccattttcacgtttgccactctggacaggtgtgacgtgaaaaaattgtagagagagagaaagcaaggaaggcacgcatgcagtaggtgggcgttcaccacttgtggaagaaagcgattatcactcatgaaagcaagagaaaaaaagaaagtattaccagaaaaataatacccaatccatacaattgagtagtacagcgacttgaaatagagacaagccacatggcccatagccatgccatgccttccattcattcttctagagtttgaaaaatgaaaattacatttgcctgtcacattctcccaatggagaagtgtttggaggactagaaaatgaatgagaatcaagaaataaacagtaattgattctttccatgaagaagcaactgatgtgaacctgtttattgctaaatggtaaagcttcaaaaagtgttcattgaacaaagtaattcgttgttgttagattatgacgaaattaatttttaaatatacttattataatttgactttaaaattttaaccatatttttattttcaaattaaagttaattttaattatttttaaaaacaaattgataattttttgaggatttcttggagtcacacttatacactacaaagtaattcattgttgttagattatgatgtatatttattataatttgattttaaaattttaattatatttttaattttgaaacttatcatctaaatcaaatcaaatcaatcttaaatagacttggtttgatctaagttgatttttatttaaatataaattaattatcttgatttcacttattttttctttaaaaagttgtgacatttcacatcgaataagagggaaagtcctcgtaatcctgtgttttaaaactatgagaattcctttggatccgcctaatcttttaaaattcagataataaaaatgaaaattttatttaattttaatttcccttttttatattattataatttacaatcattttcctttataagaatttactattcatcgtagcatgaaaccaagctaaatctagaaactttgaccaagaaataaaaaattgcaaaaagtcctcggaaatatgattgctaaaatatacttaaacttcccgctcatcatgtttcctcttcaaaaaattaggtgagatgtcatcaaacccataatcaaactttgatttcttttggctcctccaggttctttggctgaatcgcctattgtcacctcccctaaatccaaatttgtcgtcggctgttccctttgccaagccaaaaaaattcctgttcaattaaccccgccagccgtttaagtatatgcaatgatgataataatccaactctgccaaccacactcatcaattaaccccttcaattcatagatgacctctttcctactcaattcaatttagctttatgataaataaatatacggttggtgtacatcatttcacgtttacaaacaactatgaagccccaaaagtcaactgccatgaactcttcctctcttatgatttcattgcaatggctcctttctttaatgtttcttatcatcttccccacttgtgccactgcaactccctctaaactgcctaggctgagcacaattctgcgggagtcggaaatatttt

SEQ ID NO: 10667 - DNA, 4053 bp, Vitis vinifera
  Intron number 3 from transcript GSVIVT01020720001 (locus G SVIVG01020720001) derived from phytozome v7.0 (chr-ID chr1 2; pos 2763421 to 2767473)
gcttgattttcctgcagctgctgatccatcacaaggtgtgctttttttagcatatcatatctcccactttgattatgacaaatggtgctttgatgctttgaaatgacactcagaactatgctcttgttccttcaaaatcaagtaatgccctgattctggaatttttatttttcaagtaggatgtttattgttgttgcgaagtgaaattgtttacatgattgtagggaccttccttcctatgtagtgtttgtagggtgttttaggcttttggattttctttgttctttgttttgttcttttcttcctacttagcttggaatatggcctattcttcatcataccctctctttatgttaataaaacatttgtttcctatcaaagaaaaagatgccaaaccactgtagcagggatgttcattccactgcagtgagttgctgttaatgctaccatagcagtgtactgaatgaggattttgcatccttttgtgagtccttattatgaactcaaaactagaggttatgattttttaattcaagggatctgatagattattttgtgtttagtgttcagtggtttataaaagctttgtactcgagttattagttatttatttatctctttaggtcccagaggaattccactaatttaatgaatgatcaaggagtatttttatcttcaaactgtgaatggatttgttgaattttgttggaaaatttgatagaagccttttaagattgggcagctactctggtgaggtttattgataggcatgacatgatgaatgaaacgagtttgatttgctattatgaaccttactcatcttgcttagatttcatggacggttgtatggaatgtatttgagatgcaggataaactcttattattagttttaaagcaatgaaattatggataaaacagatgtattacagtgactcaggatgagctttttggttagcaaacaactcttagataaggaagcactacagttgttgcgtacatgaacaaggtttaaggatgtatgaattctaggtaggggtgttgatgatccaagccaaactctcctccaacctaagtcaggattgcaagtgtcgctaaatggtaacacatgtcttcaattttgacgagttgtttcaattggcttttgtgattgagaagaatatgaagtagaatcttactagactgttctcaagtctgctagataaacccgaaaaatttcaataaggtttgtagaggcttttatcctcctcagtgcatggtaacctccatgcaggctttaaacctcattcaatggatgacatcaacacctaatggatttttgaagggaaaagagggatggcctttgcaagtgttgagaggaccatatgcatgttagtactaaaccactgggggtacctgatttagacaatgataatttgtagtgaatatctaagtgtgtgctctttgatgttgatgttgtctaaaattgggaggtagatgccactcttctctctgttttaagttctaatacatgacaggtgaaaaaaataaaaataaatatgtttgtattgagatgatgatttttgatgttatgtcctagccttactgatatcttttgggagatcttttaaatggtaacttgtccttttttgacaatgtgccagtccaacaaaaagcatgtcaccaattccaggctaaaatttatctttgacataattttttctttgttataggctaatttttctttggttagtttcttatgcatatttttttagattaagcttgatttttaatattaagattgagataattaagcttgatcatgcttgatttttctaaagcttgtaggttcccaaagtttgtctattttgttgtcttggatagatcacctatgaggggggcaatgtgataggcattgcttagaatttgaacataatggataggtagagatgtatttctaagcttctaggtgagtttttagcaccttgacatggttgcacaacaccaaggcttcatgtggtggcaccttgcacccattaagtgcctatgacatgtggggagacatgtcatgcacgaggcaaggtgatgaatgaggctaaggatcatgtcaaggcttggtagtggcagcacacaggtgtgcacaagcaaggcaccatgtgggtggcttgacctaacaaaaattcaagtgcgggattttttatgatggaaaattttcctttaaagaggatgccttgagttagggtttccaagtgacaaaatgatttttcagattttctatttttttagaaaattcattatgcttggtcaaacagctatgatatctcctcctaacactctgggaatgacttaaaacgttcaaggaggggggtggcccactaaagggtggtgatggtgacaaattatgccacatcaagagcatgacatgagggcaaacatgagcaaggattgatggtgagccttgctagcttgcatgcatgagcgcaatgccatgtgtggtgcaacccttgggccttaatagggggttgcggttatggtgcatggcatgaggatgcgtgcttcggttggaaggatctatgtggttagcagacacatggacgatgagctaagaagaggacttagcaccaaggcaaggttgcataagcatgtgggccaagagagggctcaatacacatggactgcctagaaacacaagtaacaggttgggtggcacataaggccacctagacacataaatggcataaatgggcttgatgttcgtgggctcaacaagacgcatgggttggcactaagcatgacacctgtagcgcaccttggcattgaggcaagcccaagtaagacgaggaatgggagattgacaactgataggctgagatgtgctagacacttgacatgagccaaacaaatctttgcaacacaagaggcatgtggcaagcaaaggtgcaagcaagcaactaagtccgtatgatagaggcatgacaagagtgggttgttgagtttgggaacaggtggcaaagttagaggcaagcaacacatgcaactagacatgtggcaaatgactgaagccttaggataggctgaagcatttgaattcaaaagagtcaatctcctagatgagggggagttggttggctgatggatgcctctataaatcgtgtgcctactagtcattctctgcatcaactcaccaaagagattgtgggaatcttgttaaaagaaccagggttgttccttgtaaattctgtggagtaatatacaagttagagtgttactctgtaatcttgtgtgggctgtgtgattttccttgttgcatctcgtgcaggtctggttagagaaggttggcttaaagggtttttaagatccacacaacgtgaaaaagtagtggggaaattttgtagttgtgacattaaccaagtaatttaaatgaaagattcaaagcttatgaaaaggtctagaccagccatgattgatgatacacggttggatggtgaaaaagcatatatgaaaatgagtggaactgaaataagttgttgagctggatgagtaacaagttcaaagttcatagaatgggaaattaatgcaattgtttgaacctgaaacaccacttttcagtgacagatgaagaaaagttgatgagatggacggttatttaaaatggacacgttccattaagtactaaggtgcaagttgaaagctcggaatggatactgtgttgaggagatatttgttatctattattttcttggtactttgtgaatttcacttaacaatagtcatgaccttcaataggtagaaatgggagattggactgatcttagagggttggaacatgacttactctggaccatgttgtatcatagtttaatgttgattatatttagttggttttcacttgtgggattgacagcaaatattacaattgaaactgcattttggttttcgtttttatggcttaattggctgttaatttttttactgaaatgtctgtattttgctctgttacttgttttatcttctttttactaaggtttgattgttatatgtgcagcaagaccggcagagcttgttagggatactgag

SEQ ID NO: 10668 - DNA, 2744 bp, Vitis vinifera
  Intron number 4 from transcript GSVIVT01022995001 (locus G SVIVG01022995001) derived from phytozome v7.0 (chr-ID chr1 2; pos 17168995 to 17171738 reverse strand)
gaatcttttccattcttcaaccaggtaatatttgagtagttcccgcatttgcttaatctctggttgacattcacttgggtttttattcttattttatatatttatttatttgttttttgtagaagtgttgagaataatgttttggcctagttagtcaccttgcaatggaatttttcatatttctattctctttggcccaaacgccctcccatttttcgtattgatatggcataaagtgtggacaagttttacatgctccctgaagaaaaaaaagtaagaattagacatataaagaataggagtctaaccataagtagatgcgaagctgactccatccacaagtttgatgattggctaaaatggtccaagatccactactatggtaatcaatccatcacctgcttccttattatcggggagtggttttcttgaagtagaggtccttgttgactcatgactgtcatgcactcagccaaattgtctattaacctctataacttcagctataaccttcaactcatcattggcctttagttgatgatcttaccctgtctgaaacctgcagttagaagcgacttctctaagtttcctcaacaaaagccagtgtcctttcttctttatctggatcctatgttgttccatttaagttctctcactgcttttttggttttgtaattaggcttttatccttcctaggtctcttcagtttttgaaacttgcatacttttgtattacatgagatatgattcacacaggacatctcattgaaactcaattactgggctggagtctggacatcttcaaaaccccggttgacttgaccttgcccccgtatcttactatcttacactatttaaataccagggaggcttaaactcgagatctgtagatctgtagtacatgagatatgattcacacaggacacctctaatgtgatttctaattaaactttcttctttgaaacaataatcattttgcttatgtgaatcatacctcatattgatgaactagtaattaagacactaaaggaaaggaaatccttaattaggtctgaaattttccgcaagggttggtacttggtggacaggattagcagtgacttaaggcaagaagaagagcaaggtagctgtcaatgcactaccccatgagtaatccttgcttcagcgaaaacacccaaataaatctaaatctgttatcgaatccacttcaaaacaatgaagaataattgtacctgtgatacaaatagcattagttgtttagaaaaatattgtaataaaagcttaaatcatttttattttctaagaaaaaattaatacacgagcatgctgttgtttattttggtccaaggtaattttattagaattttggatgttatattataccatcaaattaactacttatcaaaaaaaaattataccatcaaattaacatttccccaatgactttttgcctacattctctgcagcagttcctttacaaactcaccacatgattttaaagtacacagttccttgacagaagctgaaggtctacctacctttaaaccagttaaatgcatgatacatgatgtgctgaatgggtatacaagagagagagagagagagatcaaatcaggtttaaagaatgtcatttcatgacctgatgatctggtaaaataaattaatgaccatatcatgtgttgaactatattaaaagagaacaaaaatcattactcaaccacaaagattgtcttcaatggtcattaagtgatacgattttaaaaatgtaataaattcaattcattgcattatggaattattagtgattcagtaacaataatcaagttttaataatgtaattacataattgcattttgagtgtaattgacaacaattacaggatgtaagtatatcacataatgaatttaactgaaaaataaattttatgatgtcttaaaacactttttttttttttttttttttttttttttgtatccctgcaaaaaaatactttaaaatcaagcgaatagaaattatttcccagatgtagagctattattcaagatgttattaagcatgcattcagatgtacagcaagtcttgttgactgcaccatacttgtagtcattgtaaagtaatattctttaaattgttttagaccttacgtcacatgtttctaattctaatacatggaaatgataagagcatgatgtgcttaaccagtttaaacttttaaggtccttctattcactgacggagcaatgtattttagagttgtttggagggttactttcctgagcactaccatcaaattttctaaattaaggatgccaggaaggaattcatcttaggattcaggatgttgaaaagaatgcatcttatgaagtattgagtcatagatgtatttgaaaagtttcccattagagccatcagatgcatttaatcagtgtgcaagttggccccggtgagtggaaatggactgtatctttacgggtttttaagcacctgcgaattttaattttttgggttctcaccctctcttttgttggtttttttttttttttcctgccattgaagcatgtcatagatactaagagtcattttagtaggtaaacatatggctagctaatgatcaattagttttctgtttgtgaatattgtttctattcttcaaaactgatgttttattgcacaaatattggcctgtcaagttcacatcaacattctgtaggtgacagcagatttaacgcctctaactgcaaaaaa

SEQ ID NO: 10669 - DNA, 27277 bp, Vitis vinifera
  Intron number 8 from transcript GSVIVT01034613001 (locus G SVIVG01034613001) derived from phytozome v7.0 (chr-ID chr1 3; pos 14377048 to 14404324 reverse strand)
gtaacaactatacaagtggtatgttccttttcttttctttttttgtttttctttttgttattattatgcttaggcttataagcttcaagattctatattatccacattcatggttattcaaaatcccaaatttttcgttctttttctcctgcaaaggacatctttatgtggtgttgtaccatattttgttttgcatgaaaaataccttattgttttcctcttaactatctataaaacttttgggacaatgttctggttgtaggaaaaatggcctgcaaaattttaaaaaaagaaaaatgaaagtgaagaatgtgaaacaaaatcgaaattgtatgtaccacattaaaaatctttcttaaggagaagtattttctcactatgtgaatagaagaaataatgttccaaggaatctggctctagatatacgaaactcaaagcttcaaaagcattttatggaatgctttccataactccaaaaatgccacaattcaattagagcaataaagaaataattaaagtatttttttggggaggacccctcttttcatattaatatatctttttgtagacatccaaaattttagtgtatgaaattaccattaaattgatcctcaaaattataactccttagcttaacaaaatttaggcttgataagtgataattcatatacattgaacatgtgtcatgcaattcaaaaggtgacatgtggggaaatttggaaggctgcaaaattaagtcaaaagagaattagaaataaatattctcttattggaaaattttctaaatgaagagacaagttgctaaaatcaaggaaacaaattctttgaattaaacaatcaaatcttggggatttctaatttaattgcctaattttagctataaataatggtgactttcttcaatggagaggattagaaaaacaacttcacaagggaaaagaggcttcattgggagaaaaaggtttttgcaaggcatccttgcaagtccaagaaatcgtaaaagtactacgttcttgactagttaataagatcattcaagaacaagccactttaggccctcgattgatctttgactcaaagaaaatactctcattgtcatactttggattgtgatcaaagtgattgaattagagaaaactattcatttgtaaagaatattgccataaagattgtacccacaaatacttcaatacaaataactttatacatatatttttcttgtagttttgatttttttttttttttgtaggactttcaaaacttgtgaatacacttttgtttttgataaaaaaaaaaaaaaaaaaaatagtaaagaatataaacttgatgggatgattgctataaattaatggagatagagatgaaataaaaataggaatacaaagatagatagataaataaagatagatgtagataaatgcacacatagatgtagagatagattgatagatggatataaaaagtgattatatttaatgaaaaaaaccactatgtgttctatatacatgccttcatcgaaggaatgattttggaaagagtaaaaaaattggaatactctttcttctcatttttagcaataacatttgttattatatacactcaattaaaaaaaagaaaaaaataaagcagattatcaaagttaatctcttcctaagaatgcagcctaatctaggctttcctagacgaattattgtactattgctattcattaatggggagaagaaataataggaaataaatctgtatacatggaaacaaatcagtttgtgatgatatcagctaattgcttctctgttggaataaagggtgtgcaaatttgtgcactctcaattttttcctcaataaaatgtcagtcaacttcaagatgcttggtcatctcatgtactggattgtaagttcaatggattccatctttaactccttgggaagaatcttgagccataataattcacatattccttgagccattgcatgacattcggcttctgcacttgatctgcccactactggttgctttttgctttttcgattgactaaattccctcccacaaatttgtaataacttaaggtatcttagtatcttttgaacaacctccacatgatactctaagggtgaatgcatgaattgacttactatctcacaacatatgctagatcaggcctttagtgagaaaggtagattaacttttcaatgaatctttggtattccccttttccactagtaaggataaaaatgtcggtcttcacgaaaatatcagtaggtgaattttacggatatattgggaaatatcaatgataattttgacataaaatgtcagtggaatggaattcgatcaaaactcataggaatattggaaaaaataataaaagaagtgataatacatatattaaaattgttttgtttaagaacaatatatgtagaacattattgtgatattcaataataatatgcaaaacttaaaaacacatggtatattgatttatctaattcatatgtatttaataaaacaaatgaaataatgatatattcatgatttttttatttataaatatttcaaattttatttataagtttatatttttcttatatttaattaatatataaaaagtatgaataactcaaatattatcatgatagtttttagattttaacagttaaatggaatttgaaaataagataattaaaattaattaatttattaaaatttatttttatatttcattttttatgcaaacataatattgctacataaattttgtatgctcaaatttaaattaaaggccagaatgcccaagaggcaatatacaccataacaagccggaagggcatgtgattaaacccaacagctcacttgtttttttaaaagctttgtttggtgttggttaatgggccatgtttggagttgattaaatcactgcttggagcgtgagcatgtttggcctaccatggatggcatggtgcgtggctgcatttggtgtgtgtcaatactttgacgataaagccgaaatttccaaaaatattggtgaaaaatctcaataagagtatctcctggtttttaactcatcattttggtatcattgagcaaatccaaaatatgcttcctttgtgaaacaaatattccttttttggaccttgccacttccatctcaagaaagtaccttagggcttgcaaatctttaatttcatattgctttgccagaagattcttaaaattcttcatttcgactacatcattgtctataacaagtatatcatccacatagacaataagtgcagtgattttcttgtgtgaaagagtgtttaatgaagaaagtgtaatcccttggctttgacaataccaaaatttaagaattgacttagtgaaccgaacctatcaaatcatgctctaggagattgtttagtccatatgaagattttcttaacttacaaaccttcccatcgtttaagttgtcttcaaaactagttgataaatccatataaacctccttttctagggtgccatgcaaaaaagtattcttaatatcaaatagttgtagtgaccaatctaaatttgcttctaaagatgagagaatcgtaatggaattaatttttgcaacaagtgtaaaggtttcttgatagagaattccgtaagtttgcatataccccttggtcactaatctagccctgtgtctctctttcgaaccattgactttgaacttactgctgaaaacccatttgtctcaattattttttcatttaggcaaatccacaatttcccatgtatcattcttatgcaaagctctcatttcttaaaaaatagcctctttcctcctaaaatcttttagagcatttgatacattttgtttgatgaaattagttgtgaaagctttataattggaattaagtctaaggaaagacaagaaattcgagagagaatatttagcataggttctcactccttttctaatggcaataggaatattcaaatctttagcacacattggattagaaaaaaggagagggaagagagtcagattacctaattttgggattgatgactgcttatacatgaaagagatggagtcttttaacttctgcttctgcttccttgagtgaacaaacaaatctgatctgctacctatggctggtagatttgcagctgcatttttcttggcctagacttgcttttttgactcatttccttgcatcaaacttgtgtccataacttggctattgctttggttaaatcacttattggtattatttaggactggaagaggaagggagttgttcatctgccataattgatctttattatgactcttcttaccttgaagatcaaccattggaaagtatgcttgatcttcaaagaaactaacatccatagagacacacttccttctagtaggatgatggtagctgttagccccttagccccttgacttggatgttggcattaagggcctcatgggtaggccttgcacccatgagcgccctaggaaggaagcaaggaagatacggaggtttggttggcatcactcaaggaggcaaagtgttgaggcaacacttaagttggcagcagcaccgcatgcccaggctgtacgctcagcgcacctgcgcactcccgtgcacccccacttccatgcacaccagcagccccgcattgacactctcgcgcacactagccagccctgcgtacatgctcttgtgcactcgcatgcacgttcctgagcactagtgcacacattctcacacacaatagataggtctctgcccactcgcggccccaacaatggtgttgacccactgtgaggcttatggaggatttttttatttatttaataaataaattcattatacctccttaagcaactttgatgtctactccagaaacgtccaaaacaacttaaattgctcttttaggagggagggtaagtgactcaaggtggacaccaaggcaaggctttggtgacaccaagacatgaccttgggcatggctgtagcacacgaacaacatgctagcatgcaggctccatgacatgtgtggcgtgcaacccatggccataatggtacagggcatggtacaaccttccctccctgcgttgccacaagggcattcggtcttgtgcattgaggtagttcatgaagccatggacacaatgccatggcatgatggtgctacaaaggcaccaaggggggggggggggggggggggtgtggagtgggtgactcaaggtgggcaccaaggcaaggctttggccgcactaagagggcactgaggcatagccttggcatggccatggcacacagacagtatactagtgctcatacaagggctccacaacatgtgtgatgtgcaacccgtggttgcaatggcatggggcatggtgcaacttttccttccccgataccgacatgagggcactcaactttgtgcactaaggcggttcgtgaagccatgggcgcaatgtcatagtgtgatggtgctataataaacatcaccgactcatacagatagctgatacatgcacaggggtgtaatgccatggctccttactgtaaccaaaaaggcttaggcatgtcatggggtgttgctgcagcaactacatcgacaaacatggtggtgcatggctgacatagacaagacataaaagggccttgcaataaatggttcataacatggatcgaagccccaatgtgccatcgacacctcaacatggcttgggtttgggcatcaacgtgtgtggtaaagcattttgatgcatcaaagagggttggacacgcactaggtgcttgatgtgggcctgactcacatgctataaaggcaagagaccagaatagcatgggccaacttgcaaacatggaccaaacattaccttggcctaatccgcttagagaaggggtcgtttggttgagtttacaaaggatggttacttggcacccgttggcaaaagacatcttaaaagaagttagttggcacctgttgggaaaaggccccttgagtgtagtaaccctggcacaacatgaaggaaacatgaaatatcttgtggctgcatgtggcatgaagggacaccttggtttgaaagagtgtcttcaactaggtggttgtgggagttgcacaaccaccaccctaggctcctgcttcgaattcaagtatttgaatttgaaattcaaattggaagccttttgtataaaagcctcctgcaatgtagagagacttagagagaatgcttgattaaattgtaagcgttgtgagttgggttctttgactctgcataagtgttgggacacttaaacaattttgtatttcttgtagttgagtaatagcacaagttgggaaaggttcccttatccagttgtttgtcatttacatttgctttggttgtggtaattaggaaggttggctaaaaaggaatcttaacactgaacacttagaaaaaaaaatggtggttattttgttgggtgtgacaagttgtatgggagcattgccagatatggccagtggtagtgcaacagaaacttaagggaaagaattgcttggatagaagaattgttgggaaaatggtcaagtgaggatggcttatagcctcgtgggcaatgcatacaacggggaaatctaagttcagaggaatttgttggagacacatgactagtttgttaaggaaaaggttgttggtttgaaggttgatatcaagtctctgatggacaactttaaatccaccttgcaatcttttgaagaaaacattgcagtcctcaagaaggcgatgttgcagtgatccctcttcgactctgacgccccttccaaaatttgggtcctagagcctaaaggcttcaatggcaataagaatgcaaaggagttagagaactttctatgggatatggagcagttcttcaaggttgctcatatctctgatgcagaaagggtttccatcaccagtatttatttgattggtgatgccaaaccatggtggtgcaagggtggaggatgatgtagagtctggaaggccttagatctccacttaggagactttgaaaaagcaaatgaaagatctgttcctccttaccaacaaaacatgggtggctagggaatcattaaagagacttagacatattgggtttgtgagggagtatgttaaggaatttagttccttgatgcttgaaataaaggccatgttggaggagaatatgcttttcaatttcatgtctaagctacaatgataggcctcgaattgaactttgaaggttaggagttcgtgatcttcgtgctacaatggttgtagtagattgtttggtggattataagatggtcaacaccatcttcactaggctgaaatctaagtaaaagggagccaggaaatctaaggctaagggaaagacttttaagaagtcaggatggaagaaattgaaaaagaaggcctctacagtgtcgaagctagtggagaagaccattaagttcatgtagcagacaatcagaacaacaggatgctttatttttaatgaccctcaccgtgccaaggatcgctccaaaagagagaagctctcagcccctgtgactgcagataacaagggagaatttgacttggtggccccttcaagtgtcaatcctcttcagctcttgaacatgattcatagtgaagcccctttccaaaagtccttgatgcatgtgtaagcacttgtaaatggtgtttgggtgaaggcaatggtggatagtgaggccgcacataactttgtggctaccagggaagcaacaaagttgggactaaaattggaagatgacaccagtaggatcaaggcaatcaacactaaagcctagaagatccataacattgccaaagatgtcttagtgcaagtacgagaatggaagggtacatgcagcctactttgcatactcttagaggattttgatatgatccttgggataaacttattcctgaaggccaaggtggctttgatcccactccttggtgggttgatggtcttggaagagagtcaaccttgcttcgtgcatgcattaaaggagaagactagtgcgaatgtttagcctaaaatgttatatactatttagcttaagaagggtttgaagtgggggcaagatgcttatgttgcaaacttgatcaagatcaaggaaggacaatcaatggaagtcgttgatgtgatggttgggattttgaaggagttcaaggatgtgatgtctacaaaactacctaagaagttacctccctagcaacccatagaccacaaaattgaattgttgcttggcacaaagccctttgcacaagttcctatggaatgtcccctattgaattgttggagttgaggaagcaattgaaagatttgttggatgtaggcttgatctagccctcaagggctccatatggtgcaccaattctattccaaaagaagcaggatggcaccctgtgcatgtgtgtagaccatcgggccatgaataaagtcacaataaagaataagtacccgatccccttggcagcaaaactgtttgatagagtccaaggccacttaaccaaacttgatttgagattaggatattggtaggtgcgtattgtagaaggagatgaggaaaaaactacttgtgttactctttatgggtcttatgaatttcttgtaatgttgcttgggctaaccaatgcctcgacaaccttttgcaatttcatgactgatgtcttgtttgactatttgaatgcctttgttgtggtttacttggatgatattgtggtatgcatctggactctataggagcatgagagacatttgaggatggtattccaaagactgagggagcataaactctatgtaaaactagagaggtgtgaatttacacaaaggcaaatcacatttttgaggcacaagatcagtgaaggcctgatcatgatggatgaaggcaaagtgcaagctataagagattggtctgtccccagcaagttaacataattgaggtccttcctcgagttagccaactactatagaaggtttatgaagtggtattccaagatcgtgtcttccctcactgacctactaaaggacaatagatgggaatggggtatggagtatggagtgctagatgacatttgagaaactgaagcaagccatttccactgaaccagtgctgcatctgccaaatcttgatctgccatttgaagtccacatttatgctttagatagggccttgggtggggtctttgtgcaggaagcgcaccaagtggcatttgaaagtcggaaactaaatgatgctgagcaacggtacttcacccacgagaaggaaatggcaacaatgattcattgcctatagcagtggaggcattaccttcttgggagcatattcgcagtagtcattgacaatgtggctagaaccttcgaaacatagaaaaaattaagccccaaataagcaaggtggcaggagttcttggttgacttcaaattcgaatggctgcattggcagaaaggcataatgtggtagcaaatgcccttagtaggaaggaagtgatagtattaagcaagctacaaagcttgatgcctgttatgaaagattatggcaacaggtcaaagatggtgcaacaaaaaaatattggttggaagataacctccttgtggccaaagaaaggaaattatatgttccaaggggtggcttgaggaaggagctattataggaaacccatgatgccaaatgggtagggttgctaagcttggtggagaaaggactttgacattgctagttagatcctattattggccgaagatgggagaggacattcaggcttatgtgaagtcttgcttggaagaaggttgtaaggctgttgtagccttttactatcctagagaagccttggaagagcatatcaatggattttattggcgggttcccaattagttgtgatttcaaatctatctttgtagttgtagatagattttccaaatattctgtgtttatccttgcaccagatgcatgtcctatgaaggaggcaaccaggctgttcttcaaccatgtggtgaaatactttgggctacctaaagatattgttagtgatcaggatgaacggtttacaaaacccttttggacaaagttgttcaaactcttaggtttggagttaaaagtcttctacaacaaaccctccccaaacagatggacaaactaagaggatcaatgccttgctagaagagtatctcaaatactatgtcattgcaacacaaaaaaattgggttgatttaatagacattgccttgttgtgctataatccgcataggagctctgcaacaaggatgagtcccttcgagttggctacaaggttgcagccaagaatgcccttggaagtggctaagcagaggtttggggaaaatagtcttgcagtatgtaggcttgcataatcctgacaagagatgttcgatgaagcatgagaaaaggtaactggatggatgaaaaattatgcagttaaggacaggcgacccttagaattttaggttggggattgggtcttttggaaattggctcctcaagtctagaagaagattagtggcaaaatgaggtagaggggtctaattccaagatatgatgagccatttgaagggatgaagaaggtgggtcaagtggtttacaggttgaagttaccaacgaaattgaaacttcacccaacatttcatgccagctttttgaagcggtaccatgaagatccagacaaagaatggatacagaccaagtgagctcctccattagtcatgaaacaatttgatcaagaggtggaaaaggttttggacccttaaaccatgggggtaagtaagaaaaattggcgaattgattttcaagttcaatggaagggaagtttggaattagaggcgagttgggaaaaagatgtcacttgatggcaatttgaggggtggtttaggcatacttgtagagtaagttgactagggcatcgacttcagcaggtgggggtaggtttgctacccccttagccccttgactcggatgttggcattaagggcctcatgggtaggccttgcacccatgagggccctaggaaggaagcaaggaagacacgaaggtttggttgacatcacttaaggaggcaaagtgttgagataacacttaggttggtagtagcaccccatgcacaacatgtccaagcggcacgctcaacacccttgtgcactcctatgtgcccgcgtatccactcacaccaacaacctcatgtgcacactcttgagctcctgcatgcaccaggttggcctgggctcacactcccatgtgtgtactcatgcactaggtgggcctgcgcccacattcccatgcatgcactcacacacgataagcaggtcgtgcgcccacttgcagccttaacaatggtgcaaccctagcaatggtatagactcaatgtgagacttatgatggatttgtgtatttatttaataaattcatgattcctcctcaagcaggtttaatgttcctttaaaaatttctaaaacaactaaaattgctctttaaggagagggggggagggtggggggactcaagctgggtactaaggtaaggctttggccacatcaagggggcattgaggcatggccttggcacacggacaacatgctaacacgcacacatgggcttcatgacgtgtggcgtgcaacccatggttgcaatggtatggggtttggtgcaacctttccctacttagagttggtacgagggtgctcaacctcgtggactaaggtggtttgtgaagccatgggcgcaaggccatggcattatggtactgcaacaaacatgaccaacttagatggatggttgatgcatggcacatgggcacaattccatggctcattgctgcaaccatgaaggcttgggcgcaacatggggtgttgtttcagcaattacatggatgacatggtggtgcatggctaacataggtaaggcacaggagggccttgcaatagatgggtcataacatggactgaagccccaatgtgccatgggaaccttgacatggcatggggttgagcactaggtgtttgatgtgggcatgacacacatgcattgagggaaagagattggaatggcatgagttgacttgcaagcacaaaccaaaattatcttggcctgatctgcttagagcagaggtcatttggctgagttacaaagggtggttacttgacacttgttggcaaaaggcatcttgaaggaagttacttggcacctattgggaagaggcaccttgagtgcaacaaccctgacacaacatgaaaggaatgtgagatagcttgtggttgcatgtggcatgaaaggacacctcagtttgaaagagtgtcttcagctgggtggttgtggcagttgcacaaccaccaccaccctaggctcttaattcaaattccagtgtttgaattcaaaattcaaatttgaagtattgtgtataaaagcctcctgcattgttgaaagatttagagaaaatgcttgatcatcttgtaagcattgtggggtgggttctttgactctgtataagtgttgaaacaattttgtaattctcgtagttgagtaatagcacaagttaggaaaggttcctgtatccggttgcctgtcatttatgtttgcttttgttgtggtaattaagaaggttggctaagaagggatcttagcaccacactcttagaaaaaaattggtggtgattttgttaagtgtgacaatagcacttgtatccctttttagtaggagaatttcccaagaaagtgcactttagagctttaagatcaagttttgtcctacctctatataaacaaaagcaccacactcaaatactcttggtgaaagggatccaatgatatatgaatgaggaaaataatatttcaatttgttaataggggtttgggaattcataatctttgaaggcattctatttataaggcatgcaattgtaagatacatcctcccagtagtgtttagcgacatttctagaaaacattaataccatagccacctctaataagtacctttttttctttttgttatcccatttgttgtggtatatccacacgagaagtttgatgcatgatcccatttgcaaggaaatatgaacccaaggtgtggctaagacattaccctccattatctgatctcaacatttgcaattttgggtgaaattggttttcgattagtttatggaaatgtttgaagatggtgttagtttcaaatttattcttgaggagataaatccaagtaacatgggtacaatcattaataaaactaatgaaccactggaaccttgaaaaacatttacttttgaaggatcctaaacatcattgtgcaccatggaaaaaggagttttaaatctcttattacttggcgaaaaggacacctggtggttttttttacgagtcacaagcttcacatttaaacatagacaaacctaggtttgagaacatttcggggtacaatgcctctaatgacatagaactggaataatcaaatctttgatggagtaaccaaacctctaccttttgaaccttgcaactcattgtttgataaacttgcacatgattattcacctttggctttaagtagtaaacttgcacatgtttattcacctttggctttaagtagagtaaagttcctatctctgtttaaaattgtcaatcaccttccccgtagctaggtcttgaaaaacacaacaattgggaaagaatgttacttaatgattatgggactttgttaatttattgatggacatcaagtgcacaagataataggcatatgaaaaacaaagaagggtaaagaaaaggttaaacaacaactagatgcttaccactaataagggttagagacccattaggaaccttaactttttcttttcttgaacaaggggtacaagttgagaacagattttgactcctttgtcatgtgatcaatggcccctaaatcaatgatctaaggacttgaagaagagaaaacattaagggttgcatgagttttacctgattttgcaaaggtacaagaagagaaagaaggaaccttggatttccctatcaatttgtataagaggtctagttgttcctaggttaaaataggactttttgaagtggaggtagcagctggtttttcctcaaatatagtctccatggaagctccttagtaggttttgctatttctattggttggtttgttttccctttgctccaaattatggtttttgatgcaactttcagcaagtctccttagtatattttagcttgttgcaattatcgcaccaaagagtctttttttttcattcttcctagatccaaacttttgtgatccggtaagggaattttcttgaatggtgtttagggttgaattctcttgtgaaggaggccttaacaccattgctttctactttcttcactatgaacatgtgcatacacttctcttagcgatggaaggggatctaagctaaggatttgagccctaacctagtccaacttagaattaaagccagctagaaccttgaatatcctttattgctctatccaaaaatgatttttgagtcttttgttagtgattatagatggataggtcaaatccaagaagggcatggatgattggttaataaagtagacggggctttacttctttgcgctgattattagcatgaaaggtcttacatgtagttatctaacaatttgggtcttagcataatgtttcttatgtcttgtagtgcaatcataaaattgtagtaagatatagttgtggtttatcaacaccatctagattatagggtttggttggaatgttggtgtttaatagagagccaaaatgtaagaaaaccatcacatccccaacaatgacttcatgtagtttgatgcataacatacatgatttaacaagtatattcaataaggaaaatgcataggattgtaaattgggaccacttagtcaagaatgagatcaaaataggaggaaatgagtttacacaagccaaatctacctttgatggggtgaaatccacctgaggtggattacataagccaaatctacctctgagatgggtttctcaagcaaatttggtgctcaaagtctaatgttgctatgttgacgtatggtcctcattttgtgcattttatcatcctaaatccatttgtagaggccagaagtgtttaggtatgatatataattgaaagaggtcactaaaggttagtttgtttcattgggcatatattaaatctttagtgatttattctatgaatgtgaaaagagaaatttattaatttgatgagctttgtttgaatacattttgacaaattattttccttttgaaaataagtcaaagatatcatactttgtgcataagttaataaaatttagggttttttaatccaataaagaggtaatctatgtctcatataaattatggcaagtcaatttacaatcctagttgatttaggaaaatgtcctatgtggcatgagtagttttagttttcttttgtcctccatataaaagggtagaggaagagaattaagagacctttggagatatttacatccttccttattcttctccaaaaccctagcatctcttgaaagtttcttgtattccaaattgtcaaagaaattttggagaaccagattgattgtattaagtggttgagtggaacctgcatcctctagtgtaaaggaccttcaaggatactatttaaagaacttttaggactgagacaaattggaagaaagtcagagatccaggttcaagatgtggctgcatcaagtctcatcaaaataaaatatattgaggtagcatctgaagtcagtctcggatcattctaagtctattctaagtttctttatttttcttaaatcggagaattcaaactgccaatgttgctacatctgatactgctacattttcagactcctcaaacaagatcgtcacaatgacagcagaggagttttctaaatattcacagtatcaagacgcactgaaagcatctactcctgttagtgctctggcagagtcaggtaaaacatgtcttgtctcctcctcaaacaaatggataattgattcaggtgccacagatcatattgtcaacgcggtcttcacctcggccggaaccctaagccccccaccgaaaactcagcacgacgcctttcctcatcggcagcatcgtgtttgcgctcaaatccacgctagaaatcaaacagtcggcgtcgtccgagatcattgaaagccccggcctccattcttctcgggcccgacacacgacccacgtttgtcagcagccctgctctgtctccggctcgtgctgccggaccgatctgagtttcttcgcccgccttggtcgccacgactcacgactttcagggtgagaaagagagggagtcaagggtttgacgcacgcttttgacccttttacccttttgtcaccttgtaagagaggtatttgtctttttcttcttggagtggtaaattgcaatttctggtctggctgattgctgtgaagattaaattttattgtcatggaagagagtaagaattctgttgctgatatagtgcctattgtgtcaaaaataactgaacacaaattaaatgggtctaattatattgaatggagcaagactatcaaaatttatttgagaagtgttgctaaagatgaccacttgactgaggaacctcctaatgatcacactagaaaactttggatgcaagatgatgcacggttatttctgcagatgaaaaactctattaatagtgatatcattggtctgctgagtcattgtgaatttgttaaagagctaatggattatcttgattttctgtactctggaaaaggaaatgtatctcggatgtatgatgtatggaatgcttttcattgtcctgagaagggagctaaatccctcactgcatattttatggacttcaagaaggtatatgaggaattgaatacacttatgcctttcagtccggatgttagagtacaacaggctcaacgggaacagatggctgttatgagtttcttatccggtctcccatctgagtttgagactgcaaaatctcagattctttctggttctgacattggttcccttcaggaagttttcagtagagttctacgaactgagaatgtctcatcttctcagcacaccaatgttctcgttgcaaaaggagaaaatgcagaaaatgcaagaagggtgaataacaggggcggaaacagggcatttgacaatcggggcaatgattcaagtacaacaattgtgtgtttttactgccatgaggctggccataccaagaagaactgtaggaaattgcaaaatcgaaatcggagaattcaaactgccaatgttgctacatctgatactgctacattttcagactcctcaaacaagatcgtcacaatgacagcagaggagttttctaaatattcacagtatcaagacgcactgaaagcatctactcctgttagtgctctggcagagtcaggtaaaacatgtcttgtctcctcctcaaacaaatggataattgattcaggtgccacagatcatatgacaggtaatcataaaaccttctctaccttcagaacacattttgctcctcctgttactgttgctgatggttctacctatgagattaaagggtctgggactgtgaaaccaacatcttctattacgttatcttctgtgttaaacttaccaaatttggcctttaacctaatctctgtcagtaaacttaccaaaaatctgaattgtagtgtctcatttttccctgatcattgtgtgtttcaggatcttatgacgaaacggacatttggtaaaggacatgtatctgataggctctatattcttgacgagtgggtacctcgaccagttgcgtgtgtcagtactgcctctcctgttgaagctcattgtcggttaggacatccttctctaccggtgttgaagaaattatgccctcagtttgatactttaccttcattagattgtgagtcgtgtcattttgcgaagcatcatcgtagttctttaggcccaaggcttaataaacgggctgagtctttgtttgaactagtacattctgatgtttggggtccgtgtcctgttacttctcaaactgggtttcgatattttgttacctttgtggatgatttttctcgaatgacttggatttattttatgaagaatcgttcagaagtattttctcatttttgtgccttctctgctgagattaaaacccaatatgatgtgtctgtgaaaatattaagaagcgataatggaaaagaatatgtgtctaactcatttcagaattacatgagtcacaatgggattcttcatcaaacatcttgtgttgatactccttctcagaatggggttgctgaaagaaagaacaggcatttacttgagacagctcgtgccctcatgttccagatgaaggttccgaaacagttttgggctgatgcagtttccacagcttgctttctgattaaccgtatgcccactgtagtgcttaaaggtgatattccgtacaaagtaatacatccacagaaatcactttttccattggccccaagaatttttggatgtacatgctatgttagagatacaaggccttttgttactaaacttgatcctaaggcgttacagtgtgttttcttggggaactcaagactgcaaaagggctatagatgtttctcgcctgatctcaataagtatctagtatcaacggatgttgtgttttcagaagacacatcatttttctcttcacccatgagttctgcaagtgaggaggatgaagaatggcttgtgtatcaagtggttaattcaagaccaactgttgggcaatcaagtgtggtcgattctgatgcatctcttgctccttcgggtcctgttgttcatattcctcctgctccagccaaaccaccaattgttcaggtgtactctcggcgcccagtgacaaccgatacatgtcctgcaccagctccttcgtcatctgatccttccagtgatctcgaccttcctattagccttcggaaaggtaaacgacactgcaaatctatctattccattgctaactttgtgtcttatgatcacctgtcatcttcctccagtgtccttgtagcctctatagattctatttccgtacctaaaactgttacagaggccctgaatcatcctggttggaagaatgcaatgcttgaagaaatctgtgcattagaggataatcatacatggaaacttgtcgatttgcctcaaggaaagaaagttgttggctgcaagtgggtctttgcggtaaaagttaatcctgatggctctgtggcacgattgaaagccaggcttgtagctagaggatatgctcagacatatggagtagactattctgatactttctctccagttgccaaactcaattcagttcgactatttatttctattgctgcttcccaacagtggatgatacatcagttagacatcaagaatgcttttcttcatggtgatctagaggaagaggtctatctggagcaacctcctgggtttgttgctcagggggagtatgggaaggtttgtcgtctgaaaaaagctctctatggattgaagcagagtccccgtgcttggtttggaaaattcagtaaggagattcaagcatttggcatgaacaagagcgagaaagatcactccgttttctacaagaaatcagctgctggtatcatacttcttgtggtctatgtcgatgatatagttattacaggaaatgatcatgcaggaatctctgatcttaagacattcatgcattccaagtttcatacaaaggacttgggtgaactgaagtatttcctgggaatagaagtatcaaggagcaagaaagggatgttcttatcacaaaggaagtatgtgcttgatctgcttaaagagaccggtaagatagaagcaaagccatgtactaccccgatggttcctaatgtacaacttatgccagatgatggagatcccttctacaaccctgaaaggtatcgaagagtggttgggaagctgaattatctcaccgtgacgcgaccagatattgcatatgcagtaagtgttgttagtcagttcacatctgcgcctacaataaagcattgggcggctttagagcagattttgttctacctaaagaaggctcctggtctaggcatactatatagtagtcaaggacacactcgcattgagtgtttttctgatgcggattgggcaggttctaagtttgatagaagatccactacaggttattgtgtgttctttggcgggaatctagtggcttggaaaagtaagaagcagagtgttgtatcccgttcgagtgcagaatctgagtacagggccatgtcacaggctacttgtgaaatcatatggatacatcaactcttatgtgaagtgggaatgaagtgcacaatgccagcaaagctttggtgtgacaatcaagccgctcttcatattgctgcgaacccagtctatcatgaaagaaccaaacacattgaggtcgattgtcacttcattcgtgaaaagattgaggaaaatctagtctctactggctatgtgaagactggagagcaacttggggatatttttacaaaagctctaaatggaactcgagttgagtacttttgtaacaagctgggcatgatcaacatctatgctccagcttgagggggagtgttagctgtatatatctgtacataccataatttggttgtttccttagggataataccttcctaattcaggactctcaattgtatatataagcaagtattattcatctaataaagacaaggaattgagaattaccttgattcggttacacctatttataggcttctctaagaaatccaaagtctattaagactctaataacctattatgattctaattctaattataacattcaaagtctactgggcctataataacctatcatgactcaaattctaattatattataactcaactagctaatcctaattagactccaacaaataccaatcccaattcaattttaattaatattaatcctacttaaagtttacttaggtcttgcctttcttccttgaataaactttaaaaggtttttccccattaattcatgattaaattatttgaactttacaaatagttttttttatattatgttatttagtatataaaaataatttatatatcatatattaatattattttataaatatttttttagtttttattttttaatcataaatttaatttataattaaaaaaaattgttttgtaaaatgagtattttaaaaataaaaaattgataaaaaataaatttattatactgggatatgtatatcccatgtaaaagggataaaaaaaagagtgaataatatataccaccacttattgaggacatgttggttattgcttttaaaggcatggggaactcattaagaggcaagacactttggcaaatcgcttgccttactttgttatggatggtatggcaagagagaaacaataggatctttgaggataaggggagaacggaagagatgttatgggacttgattctgtttttttcctctctttgggcctcttgtactgcagcttttaaaggagtttctctaagtgttttacatctcaactggactgcggtttgcgcttcaaaagtttgagagtgttgggtttttttctgtgtttttagttttctttagttgggtgttttctcttttgttcagtttttgttttgtgggaaggacctctcatccttctcttggtttcttctctttctcttgtatctcttatttctcctgtatcttttcctctattaatatacttttcttcgtttttgatcaaaaaaatatataccaccacttatcttatcccatgtttggttggctggatatagtatgagataggataagtgatgggataacttattctatcccatcaccaaccaaacatgggatatgatataatatttcctctcatatcctatcccatgctatatccaaccaaccaaacatagccttaaagttttttgttgtgtaccttagactaaaaaaagttgtataaatctaaattataaatataagatttattttggattgcatgttgactattcttgctccaaaattattttattgccttattcttgtccctaatcctgtaattttgccaccaaaacccttttaactccataaccaactctgcgagtatcagagctttctcaaacaaaaagaagcatttggagacttgtctattttgactgctaattagccctaaaaaattagtgctttccagagacagctttagaatagttgcaatagcaacaaaaatggcaagaagaatgttccctataatcatggttttccaaattcaatagattaacaacccttcttcaatagtcatccaactaaccgaaactctcaaaacttcatcaaggtgatttgccaaaaaagtgacaagccttgccgcatggacaagaaacagtttcgccttcatggatttctaaccagcgtgctgccaattgtgctcaacctctagcactacaaatctaaactggctagttaacccaggtgcatctcatgatgtcactactgatctgtgcaagctttcccttcataatgaatatggaggccttgtggatgtgattataagtgtaatggaactcgtctcactatcactcacattggctccactaaattacttttctcatctcattcttttaagctgtctaatgtattttatgttccttctgtgcagaaaaatatatcaaccgtttctcaattttgtaaaacaaaaacaccaagattgaattttttccatacatgttttcttgtgaagcatctgaacatggcagcacctctgttgaaaggactgaatagaaatgtttgagtagccaaaaaatgcaaactgaatttgtgagctaacttgttacttttgtgggtgttagctctcagctcaagattgacttgaaacgttttgaccatccaacctctcaaattcttcagctttctcttcagttgtcttcatctttcttatgagagtcataggctttcatttggactgtgtacattttttagttgtggtccttttagaacttctgtatatatatgtttagggacccgctcctatagaccgtagtaacaattttcaatgctgtgctctctttgttgatcatttcagaagcatacttggctctacctggtccaccaaaaatttgatgttttaaccatatttccaaaatttaagttcttgttaaaattattttacttcattgtttcaacatatttggatgggggtagtgaatacgaaaaagatctatcttttttcctacagaaggaattaccatcttatcaacccacaccacacatctcaacataatggggatatgaaggttatcctcatttatttggactagttgacactcttacatcatgccttaataactctggagttttggagtcttgccctccaaattgtcacatatcttataaattagttgcctacaccactattacaactccttcaaaggcttcacaatgctattccaaattatcaaaaacttcaagtttttggttctatttgttatttgttgttgaagcctaattgtaacaaagctatcctaagtcatgtttgtaaggtttttggggtattctcttctcaaaagtgctttcaagtactatggcctcacttcttagaagatttttgatccttgacatgtccaatttgatgaaatcatattgcctatccaataacttgttccgtcattacctatagtcacctctagtagcattgcctcatggagcccccatttttctacgcaaatcaatcctagatggaaaaaaaaggtcatcttgcaacatgggttaatttctgagacccttgaagtttggattaaatatacctaatcaccattggtttcaaattttgtcaattaacacccttataaatttattcggtttataaaatttatttttagagtgattttaggtaggtatgcttaacaattctctaaaaaataaaattcatatataaaatacgtctatagaggtgtgctaagtggcgaaatttgaaaccagtggtggcttagtgtatttacactaaatctccaggggagtgaatgaaattaaccccttgcaatatttatgatgcatctctatccacttcaaatgacaatgcagttactgcttctatttcacccacttccttgttaggttcttaatctcacccaccctcgtagttgcgttcctctacttctgcatttgttgtgccctctacaatgccaacctaaatccatcctatggtcacaatatctcatgatagtatttttaggctcaaacatattcttttcaccactcagcatagtttgcttccatcccttgaactaactcatgtaattcaagctttcagaggtacgaaatggctatttagtatgagccttgaattaattgctctcatgaataatggaaatttgacactttgttccatatcatgcttcacaaaataatgtcagatgcaggtgggttttttgtatcaagcgcaacttagatggaagtatgagtccttataaagagcgtttagtggcttaagggtcctggccttgaccacataaaaatattcagccctggaggccaaccaccactggttgatactctatattgctctttcacgaggctggttcatctattaaatggatgttaataacgtgtttcttcaaggatctttgttataggaagcttaaagagtctatttgggaactgtaacttgaaaacatgtttagtatttttttgacaaaaaacgtattttgagatttgttctaaaaacagggtgttttcttagaaataattgtataaatatggaaaatagctaaaaacaaaacactacaaataagttatttttaagaaatatttgaaaagacaaaaaataggttaagaacattctaagttgccaaatagacttatattctaaaaaatatcaaagaattatttttaaaaattgttctcaaaattttctttgagacttatttttgaaaacattcccacataggcatttatagctcaaccatctggttttgtggataccaatttttgtaacccatgaatgcaaaactatggaaggccatttatgacttcaaacaggcaccttgtgcctagtacaaagagtttagtgtatttctggtaccctatgctttgacagttctaagtttgattctcctttcctttctatttgttctcatgatggcatagcaatttatttctcggtatttttagatgatctcattatcacaggcactgaaactacctttgctaaaaaatttctctaagatttatgtgcagttctcagtcaagaaccctggttccttgcattatttttgggtgttgaggtgatttctataaaaatgaacctgtttctcactcaaaaggtatatttgtgatctccttgagtgattctagacgagtggtgctaagcctgtgagctcatatatgtctagcaaaaatgttcttaatctcaagatggtgcatttgcaacttatcccattgagtactaatgtgccattggagctctacagtatatctcacccatgtgtctggatatggcctacttgaccaataatttatcaaaattcatgcatgccctttgcagctaaatcaaactgcaactaaatggctactccattatctcaaagcaacacttcatcatggcctctttctcaaatgcagctctccacttaatttacatatcttctccattgtggattggctgcaaatcatgatgacagaacttctgttacagcttacattttctatcttggagctaatctgatttcatgttgctccaagaagcaatattctcttgctggatcttccgaagctgaaaactgagtaattgctgctggattaaattgggccacatccttccttaatgagcttcatgtgccgctctcaatcctttgggttatatgctgtgacaatattggagcaaccaacagctgtgccaatcctacctttgacgctccaatgacgcacattgacatatactaccattttttcttgtgattagatctctaaaagcatttttttttttactgtctcccatgtttcaacaaacgaccactggcagatgtgtccactaaagcagcccttagtcacacaatatcttaatcccttggggtccaagattggtgtccctactgggagcgccatcttccaagggtatgttaaagacgtggacttggatcttttccccaattagctcgagtcagaccttgattttaggattaattggctcctaacctagccacaatttgggtagtgaagtgcaaatattgattagtttattatttgatatttctttcttgtattttattttattttttattttctttgatagataaattttttctccattgggacttgaaccttaaacctcccataagcccttcccatccctttaccacttgagccaggcctcaagtgtgtatatatatatatatatatatacaattgtcaacactacagaggctctttcattatttcgattgcagtatttgtttattcaattatagccttctcatctcctaattttgtattgctcttttgaattaggtgggtatttttctttcaactattttttggttgcactgtatactaaagtttttggttccttaaaccttgtgtccaaattcctgggtaagatcttggtaggagactgtcacacataaataattagctataaaaaggtgattttagtggtacaccttcccctagtttgtttgatgttatctacctttatttttttgtcaatgaccatatggcagtccagaacaagatattgcacagatattcaagaaaaaaggaaaattaacaaaataaaaggagcttggagcaaaagcattgggcattgagagggaatatagcaaaataatttttattttctttaacattacagcattcactgtgattcagggatttctgaaatatttaggagaatcgggactaatttttaggcaaactataaaagagggttatttaaaaaggtctgagagcttaatattgtttttggacacatttggctgctactatgaagtacctgagtagaaagttatttaaaaagtcttcacataatcatagtctacactcgaacaaatagaacctattaattttctttttaattattatgtcatatggttgtttctgatcctggaatgttgaccaaaactaaaacacccttctttcgcttccatgagaaaaatcaagtcctggaaaatactgtagcaaataagtttgtttgacagaccttcccatgggcaggaactaccatccttggtgccataacatctacagtt

SEQ ID NO: 10670 - DNA, 9401 bp, Vitis vinifera
  Intron number 3 from transcript GSVIVT01026761001 (locus G SVIVG01026761001) derived from phytozome v7.0 (chr-ID chr1 5; pos 6467748 to 6477148)
tgagagtctcccaagctgctagtcagaagaatcaggtggtgatacaaatcttcctacctcatttgtcagtgtgaggttgatacagctttgtgtcaagggtttcaatataaatgagactaggcttggtggtcagggcaaagagcatggcctttttgcacttgccatgattcctatgctgaagtctccttgatgatgatgatgatatctgccatacttttagttcattatgatggggatgaccccatttttatactctacttttgatgaatggtgcccatgtggggctttttcttttgtcacattgttttgctaattttgatgattgcacctttaatgaattgtaccaatattgggttttttccttccctttttgttgtttgtggggtgttgatgaccacactttttgcgagttttgccggttattgggcttattcagcttttgttgttgtgcgggttttatgtgaccaaaaatgcgtattgattgttgcttagtgaaatgtagtttgatacatggtagaggagattagggaaagaggcgcggtgttgcaggcttatagacccacttccttagtttgagggaatggtcgaattatgaccttgacctctaggagaggtgaatgatcctgcagggggatcattttaggtcttggctggcaagactgatcataattctaattaatatagaccagatgagctctagccagttgcttggctttggccatcgtctgataatggggcttagattttagttgtatgaacagcacttcctggaggattagtgcccagtctttcccaatcttgcaaatttcactttagcaagcacatacgtgtgggtcgagataaggtgcagagtttattgagataattagaacatttcaaaatagtcaaaactagttgtttagttcagacgtagtacctttttaggtgtgcctggttcgaatagtaaacctgatagatcttccagacaattttcttataaatgatttgccattaggtataaaaaggtgtctgaccaagtttgacttggaggtaagtgttacctattgtcctcaccgtttactttgcctctggaagttctgatgtgatggataaagttcccttggaaacctcatgggtgaaaaagaggaacctcttggcaactcacatctttgattattgtttgcatgactgaccaatatgacgctgctgagctaataattgatcttcaaggattttaactacctctttgccagctcaggcatttgattgtaagagggaggtaccacatccataaaagattgcttgagaatagtgttgtaaggagagtgagaccttttcatcaaggaagaagctttagttccgcttttgctttgagaatgagctaatcgaggcattggaagattctccataagagcctttagttcgagtcaaagtcatgacttctttgtttgttgaaaacagttgtcaaagaccatgctggttgaacttctcgcatcaataagtatctaccaaactaacttttcttttagttgtgctgtgatcaacattgatttgatcgccgcttgatttttcccttagccttctcaagtaggtaggtgttgatagtgcgaattgtgataccgcaactttttctgtaaggtttaattcaggttgttcatctagcttgatctaatacatggggtaggttgtccttcgctaatgacttgagtagtggacttcttagagacaaggcttttctgaaggcctttgccattgttctttgatcattgctttatacctgcattaattctgatatgaacaaataaacaaattttctcaaggattcctcatgtgcttaccttacatttacgaggtagttcacacttttccttggtcgggagttgttgttgtagtattttagaaatagtttgtagagttgggaaagctgcgtattgaccatccaagcaattagtagaaccatataagagtaggtcgtcataagttgatggtaaaaacttggaaatgtagtctttcatggttgcttgctagtaccatgagttgctgacaatggtaaagatggttcaatggggtttcccatgcaggttgaactttaaggccacacagtgagtaggcaactctttttgaagcaaatagggtgtggttggtggtgcacacacttggctccattgctttgatacctcttaggctaagttgacttgtaattttaatcaatggacctttgtagacaattcttcgcatttatgtcccaatgttgttcgactccaagctttgacatttcgaagatttttagtttgaggccaactaatgatgaggttttatcttatgatgttgttctttgagagttgttcatgttgcatctagtcatgaattggaagtaacatagacaggtagcacacaaatcttgagttgtttgttgtaaaatttcgacatcgtacttcatcatgacagacttggtctttttctatccccttaggtgaggtgaggatcctgattgcctttctactaggtctggccctcttggctaagcttcctaacttgttactcttgatttagaggttgtgattatatgctagcttgagattcccgatttgttgtttgaatgatcttatcatgatgtggacttattctgcaacctgtcttgtcctgaaatagttcctatgtcacaagtcaacatacaagttcaattgtttagtttgcatgcaatcgattgaatttgtaatgcttccagggtagatagtataaaaagattcagggggcactaggtttataacagaggcttctattgcccgtcctcattcctcttgggatgtgtttttcaattgacacagaattagagtgcttttagaaggtttgatagaatctatagaaaaggcttcacttagtgtttagtggaagaatattcctcagttcttatttcctgggcgagacagggttctttaaattctgggtgcatgggaatctcatggacagatttattgatttaagaatgagattgatggcagaagttattggattgctagcaaggcttatcaggaagttgattccttcagcaatcaaggttttggtacttcgaaaatcttccaaggatctttgtctcctttgttatgatgtggaacccagactcagggagtgggaagccctcatttgttctggaagtttcattttcttgttttgttttgtgcctttttatttttattttttttgctctcacctgaaaggatccttcatccttctaggatcgttgtaattcccttttataatgttaatggattgtttctggtttctaatttaaaaatgtgatagctggagatggggtgaaaccactagaacataaaagactagaccagaggaggaaatcacttaaatatggatgcttgaggtaggggtgctcattgaacaagtgatttgtgaatgttaaagcttaaattgaatgcagactggaattttgcttgggctttgcttgagtttagctatccttattttgccttttccaatttttgttctgtaggtttggctcagaatgagcttcagttcatgagcctaactaagcttattcattcacatattgcagcattcttttgtattaaattctcactcctaattcctgcattgctattgcaagttggcacctgcattgatgcctcatttttgttccttgtgatctgtacttctgaactgcttgctgtagagtcagttttgtatgggttatattacagtagccttacaatgcctacatcaaatgttcaggagattaatcaaatcaatgtgttgtaatttttaaagctttatttttcgagcaattgggcttggaaaatcttgagttgctcatttcattggttagtgagctttactgagcttcttaactagtcaagctggagttctgcatttttgcatccctgtggtgttactaggtaagagagggaatgggaatgttgctttagtttaataatatttgaggtttatgatatgcgagttttaaatgcaatgataaacaatatccttcatatcaaaataggagtggagctgattatggatgagagatcaggatcaaactggtttctaaaatattcaatatatattgcttcattatgggtagcagcttctaacactttcagagatagagagtgccacattttgggaaggataatatggaaggatatatggaagctacattggaactttaaagaaaaaaggccttaattatgaagacttgactattgctttgttctaaagaagtaactcactaacaatttcatcgatgaaggatttttatacagatggagtgttagttgtcattttaacttcatatttttttattccacaaatgacgtctagaatagcttaaaggctttcaaattagtagtggttctaagttcataaaaagagtcttacctcattaattgtgttaaatgatggcttttcaaatccttgcatgtgttatcatagaaaaagtttgttcaaagttgacaagacaaacaagataattttgattttatgtgtcaagtattttggtcatttgtgcatcaaaaaaccctcttaggtgttaactttggtgatattagcccactgggatgtgctttgagacagttgtcttgaaccttagatgtattttaaactatggatattgagtatccaacaagtaacaaacttgtctatgacaggctattgtttacctaatttttattgtctaaaatttcctgatcatctctattatctttataaatttgcatctatttagatgttgtgtctgtgacacgtgtttgcattcttatccccaggtttaggaactttcaaattgtctgatataaatgtatttacgtatgcttgttggacttgcataattttataaagagaaaccacatgaaaacttagttattctcccagtagtaggtttgggattcacacatcccaaaatcactgccatgagaatatgatgagcttgctctagctttactcaaggccctattaaatctcatatcctttgccagtaagactcaacactctcaagaagagtagccttgaacatttcactatgtgcatatcctcaccttcttgtcttcaggcctctaacatcctcttcctctgctgtgcttgagctttcacattctatgaggatgaggtgggtcagtcaattttggtgggtaaagttctttatgtatgcatttccaatcttgtggacaaggtctgtctcttgaaacaactactgcttcccttaccacatggtgcacccacgaaatttctaatggatgtgcattttcaagctttatttgtttgtatagtattattgtcagttgtgtaaatgaaatttaaaattgtgggagttatatgttctgatcattgtatgcttatgtcttttggtagaaggaagagtaagaataagaaacatgacactcagatttcttagctaccaccacaggagtctccaaattttccctggagtatagaatgcttggatctgtagggatttcagttgagaaaaggggaagggaaatagaattagaaaataaatgaagaaaatgagaagaaatacagaaggaaaaaaaaattcttgcatgcccacctaggatccttgaaatatgcccaatagtctaagaataactgaagttttagatctttgggagttgaaaaggaagaggatatggggaaacagcgagtttcagatttttattatcctattatcagacatttctctgaatgatatacgataatgcatcatcaagacagttagatgtcacaagatgtttcaaatgaccctccccatgggcttatatagaaggcaggaagcttttggaaacccctggagtcatctacacttagctacaaggtggaagagtgtggaagcttctagaattgcctagagatgcccacacatctctacacatggataggagaccttggaatagagtggggtgttctagagtcttctagagttatcttgtacatagccttatacatagtcttgtgtaagatgttctagaatattcatgatttgtaaggaaccctccaacatatcagagacttcctaaggtgtctataaataggagaaaccctcatttggccaaagcaccactcaaaccacccaagaacctaaccaaccaagcaagtgatcttcctaagcacttgtaaagtatccttgagagcaattaaagcttcctattctttaagtatcgactacggttctcttagcttccaaatcgtgtctaagttagattggctagctaagtacgaggggaaggttgacttagcaacttcaagcggagtgagttgcctaagtgtcgtatgtgagcttaggaaaggcctaagtccgtgatagttggtatcagggcacgattgtgaagcgggtattgtgaaggaagcatgtcggggtccaatgttgaggacgctagtgagcaaactcgtgggagggagacagagcctactgcatggggtaggggtaggaaggataagtctcatgatgccattgctagcatgtaggcaaggttagccaaggtggagctagctatggtagacactcgggaggggttggacttgatcgagcagggtatggagaagggtatgaaggatcttagggaacatatccaagacctttgtgagaggatgctagtctctcaggttcatccagtgtcgcatgaggagtttgtgtccttccaagagaaggtcatgagcatgcttgctagcatggagtcaaggatggaggccttggtcactcgaatggagatccgaaaccaggaggttaggcgagagttggatatctacaaagttgttgtgtcggcgcgggtcatggccacacaggaggcatctagggtggaggtgccgaagccataggggtttagttgcaagcgggataccaaggagttggataacttcttatggcacatggagcgatgcttcgagactatcgctccaatggatgaagccactaaggtacgcaccgcaaccttctacctcaccgataatgctattctatggtgccgtaggaggtttgctgatatagaaaagacatttgctccgtagagacatgggagaacttcaagaggcaattctatctcgaggacgtggtttacttggttaggaaaaacatgaggcatctcaagcacacagactcgattcacaactatgtcaaggagttctcttagctcatgcttgaggttcctaatatgactgaggatgaattactattcaattttatagataacttacaagggtgggccaagcaagaactaaggcatcgaggtgttcaagacttaggcactactatggcattagcagagtctttaatggattataagagagaagactcctctaagtttgagtgttcgaaggatagccacgccgagggtgggtgagatgagggtgcgagggaccatagtgttgctaaaatgggatcaagcaagatgcctaacattcggaaggaaagggtaaggtggaaagaaaagagtttacgcctaaaatcaagtgcttcttgtgtgatggtccacattgggcacaagattgtccaaagaggaaggtgctcaatgtcatgatcgaggagagggaataggaagatgaagcacatatgggctcgatggagctactaggtgccctccaagtcgacttaatgcctagtacgcctaagacttccttactattaggggtgcaagtaaaggaggcaaaaggggagcaagttgaggtagcctacacatacatggacaaggtcaccaagagataggtgaacttgatgggcaagggtaagtgacgctctaagcatcaaaagtgtaggtgcttgcatctgtccgaggccgcacaaaagaaggaggtgaagaatatcctggctgaacgggtcactaggagacaaagggtccctcctgtgatagagtatctagtttgatggaaaggactacttaagcagcaggcaagctgggaatgtgcggatgccttgagaaagttttggaaacacatttaaaggtttcaagctgaggcgacgatggggatgttgacgacatgggtgggggagagtgtcgcaagatgcttcaaatgaccgtcctcatgggcttatatgaaaggcaggaagcttttggaaaccctggagtcatctacacttagctacaaggtggaagagtgtggaagcttctagaattgcctagagatgtccacacatctctacacatggctaggagaccttggaatagagtggggtgttttagagtcttcttgtacatagccttgtacatagacttgtgtagaatgttctagaatattcatgatttataaggaacccttcaacattctagagacttcctaaggtgcctataaataggagaggccctcatttggccaaggcatctcccaaaccacccaagaacctaaccaaccaagcaagtgagcttcctaagcacttgtaaagtatccttgagagcaataaaagcttcctattcttcaagtattgactatggttctctagcttccaaatcgtgtctatcttagcttcgctagctaagtacgaggggaaggttgacttagcaacttcaagtggggtgagttgcctaagtgcctcaagtgaggttaggaaaggcccaagtctgtgaggataataattaacaagatgctatataaatatggcttgctatcgctacaaatggattgttctttcataatttgaatgattgtttttattagcattctggggttagggcaggcagtgtttggttttgtattggctacttacaatagtgattcatattgaacaatacttaccagttctggacaacacttataaattagtaatatcagtctagtcacttgtaggaattgtattctccacaagttgttttgacttttatcaattgattgattgccacttaatagaaaagttatttccttttcattgaaaaattgtagttcatatcactttttcattctataactaaaatttgtattgggacctagctttctagtcaaatttcatagaagaatttgtttagcatggcatgcagctctgttagtagagcaagtaccctaactctccatttgatagtcaaggcagaagagagaaaattattgaaacttggcacctcatagattgttgggtttggcatgcagttgttagatttcatggtttgtttcctttcctacagattctctgcagttaaagaggattaatgcctctgtacaggcttagaagcaaactcaccacagctcatctggatttttgtgataatcaaataaatagattggaactttacctatcaaaaaaaaaaaaaagaaaaaaaaaacagattggaacttctgtatccttcactcaataatttacatcgacatatattaaattgatgatgcatcctaattctgttgcagcattttagtttagaaatttccctgtttagtctttttaatttttaatttctaatattttttaatttgtatggttgttagataacagaata

SEQ ID NO: 10671 - DNA, 15913 bp, Vitis vinifera
  Intron number 4 from transcript GSVIVT01011532001 (locus G SVIVG01011532001) derived from phytozome v7.0 (chr-ID chr2 ; pos 12947485 to 12963397 reverse strand)
ggtatgcctctcctattatgccctgaaatttcaacaattgccttattttgttttgttttatttttgtctcaagcttctcattcagaaaaatgaatgtgggctgtataaagtttattttgaactatataactgaatttatttttggtaaaacttcttaagttaataaggttatatcactaagaagtattcaattacaatgctatatttctgggtgtaagttaagaagtttatatgtggcttatccatttacccatttatgatgagagttctggttggattaaaattttgggctagtggatatgagcccaaccactcatacataccagagttctagtgtggaatcttgccatcctttttagacgattgagtgtagaattattgtagtttagattattttttctagcagtaagaccaatttgagggatttatattttccctactgctatatatggttcaaaaaattaaactgttatctaatatatttcctacttgtagtatcagaattccatagttctaatcctttttgctagggtggttgatttgtatttcaaaatgaatgatatccataggagaaagtctacaataagtttgaaaagatctaaaataaattgaatttatgtatcctatttaaatctaaaatatgaacttaatgaattccttctccaaaaatagatgaatattgtcaatattttcagggggtatttatttatttttgtgtagtccttgttcaattcagatctggttgggatttttgaactttgtacaattgtcttgtatttcccaataaacgactatggagcatttgggcctaattcctttggtcatattttttgtttccttatggataagcaggttccacaacatttgatttttgtttcttttgtgattatgaaattatttataatcttcttgtgttttgtttatgtttaattgtgatatataggttttgatgtgctatgcctcatattttggatccactgattaatcctataaaggctagactcaattagtgcttccaaaacctaagaataagatgatgagtttcaggtaaatttgtggaaaataaggatgtggagatatgtataaggagaaaaaattctgatataaaacctagcatatagataatcaacaaagtgtattttatttatcatttatcatagtgaaaacttgtacaacattactttgtgcatgccaaaacctcgtggttcactaagagtaacccttattagaagtgtacaaaacataaactacatcattttccaaaatgatttagccatcctataatacaaagacaagtctaaaaagatctctcaacatgaacaaaacaataaccaattactaccatatctaaagctcaaacatcaattcccatgtacaagtgactttcaacttgcactaagagtagaaagaatagggtgagttcatagcttagtgagaaagtttatgctcatcccatgtatgtcattaaaaaatgaatcaaactaaaaggagcatagagcaacatgcattttaacttttttaatcattagaaaatacacaataatcttacatataaataaaagttaattatagagggttccatctttactttgcctcatccattctcccaccaatgtacatattattttcattgttatgactaccactcaaggacaagtcatatcttgcatcttttgggacttatacctaaagataggacaaaccctatgtcttttgagacaacaacccaaaggtaggactaatcccgtgtcttaaggactaaaacctaggcataagatcaatcccatacacccacattggagtgtctttctcaagatttttagggattatcacccaaggatctaaggttccatataaacaatatatccaagtataatgattgcagcttatcacagatactccccacatactaatccatcctttgaatattacttgtcaatgtaataaaccatatgattcctgcaatgtaaacataccatgaactgcctccacaaaattaaagtcataatacctcataccaattcatatctaaataataatacaacatcatagaacaatgacacatacaatatggacgacatgacacattgaaatatctcacaaaattatatgaaatatatgaatttgcaacaaattaataatttaggaaaaaaaacaaagatacatagtagaataagataaaattgcctcccttacactcacttttccttcacaattcttctctatatacagactattacccgtaggtgctacaaagaataagtaaaaaaatgtaatttaggtttagaactataaaactaaacaattaaggtttagcgcattttctatttttataatttaaaaaaattaaaattgataattccatttgctcattctctaatctacatgcttgtatgttttttagttaaaattaagatgagtaaatagtcttttctatgcatattgttgtatgttggttttgatagaaacaaagtgtagaaactctcaagaagcaatagaacattgaggaatctgaagtgatatattttatgaagcttcaaagtacttatttatatagctagcttaaaacagaaaaacataacaaaatagcaacaaacctgctacctatagatacttcctaaagaatagaaacaaccaacaaatacttcctaaggaataggtaaatcttccacgtgactaacttattcgactacttccacttcaatctactcaactccatgtcagcagctcctaggacatgtcattcaacactcctccttgtctctggagctgtagaatccaagccttttccttaagaactcatatctagctttgggaagtggcttggttaagatatcaacattctaactttcttatccaatttgtctctcttaacatgtggaatataagagaaacaaagacaaccaaatgtttttaaattttgcagccttggtttatggccataccatgcttcaaatggagtcttttgttgcaaagcttttgttggcagtctattcagtagaaagactgatgtatatgcagccttagcccagaatttctttggcagccctttgtcatgcaacaaacaccttgtcatttccataagtgttctatttttcctctcaacgactccattctgttgaggggtataaggtgttgtaagctggtgctcaatgctgccattcagtgatggtgttctctaaggtcctcccacatcagtgtgtactaactgtaacttcagagtagctctctaggccttgttttgtgggaaaggaagtcttgtttgtttccagtaccgataggctacacaagtaggaggcttcacctctaattcaggcaagccttttccaagatcgttcttcttcataaagaaaagggcggtatgatggaagtgccccaaacgcctatgccaaagcattgtattgctttattctttgtgaattgcagcctgctcttcttgcatcaaatccaaggcaaagcttttgtctttcatttggattataaatacctctctaccttgtgcatcagcaatcatgcaatgattgtcctccaacaacaccttatagtctttttccaacagctgaccaacactcaaaagattttgattaatcttaggaacatattagacattagagattaatttcaaacctgtgtggccttcaattgccactgttcctttgccttttactgcaagatatgctccattttcaattctaactttggaagtaacaattttgtcaagttccttaaagagcccttgatcataagtcatatggtttgtacaaccactatctataagccaagtttctgggcagttgttagtggcaaagcatgataccacaaatagttcctcattttgaagttcttccacagcagccttgacttctccttgctgttgttgagatttgcatatcctttccacatgccctagctaaccacacttgtaacatcttacatccgagctccaccaacaccttttttgtggatgattggattttttatagtaaggacatggtggaaacttttgagtgttgttgctgctgttattaatgctttgcatatctttcttgtactgagatatggcctgaaatgcaccctccacagatccttcttgtctcataagcctcctttgttcttgagcctgtaatgcattcaacagctctgccaaggtgatacttgacacatcttttgagttttctagagatgatattgtagtcttaaacttttcaggaactgttataaaaattttataaactattctagaataaaaaaagtcagtaccaagcagtcttactttgttaacaatactaagaagtctatctgagtaatccttgattgtttctgattctttcatcctttgcatctcaaattctctaatcaggttcagcacttgcatacctttgactcgttcatttccttcatattccttcttcaagaagttccatatttcatttgctgttttcagtgtcatgattctggtgaaaattgtagatgagacagttgcaaatagactagattttgcctttgatttcctttgcctcctctcattgtgtagttttatctgagccatagttggattgtcgaacaaaggaggaacttcatattcctcactaatagcttcccacagatcactagcatcaaggtaggcttccatacggacagcccacacttgatagtttattccatcaaacactggaggtgctagtgcatttagtgaagcttttgaggtcattctggatattgtttgtaggttttttaggctcactcacctcacaagttactcaagaacttggctctgataccaatttgttggttttgatagaaacaaagtgtagaaaatctcaggaagcaacagaacgttgaggaatttgaagtgatatattttattaagcttcaaagtacttatttacacagctagcttaaaacagaaaaacataaaaaaaatagcaacaaacctgctacctatagatacttcctaaagaatagaaacaaaccaacaaataattcctaaggaataggtaaatcttccacatgactaacttatttgactacttccacttcaatctactcagctccatgtcagcagctcctaggacatgtcattcaacattgtcacactagataactagtgtttaaatttctaaaactcacagttcttttaataggattcttggcatggactagactctagtactcttccttcatgatggaaaaatagatggtgtgttttttcttggagctctagatgaccaaattttgtccaagggagatggaataacttaaggttgattgcctatcatgaggataagaggctcaatctacatcaaggaaccctcgctctaagaaggagacatgatggtttttcatagataaagacaatagtgaaggttcctttgagatattgaaatattttgttagtttcctacttgattcgtgcccaattggtgtctcagctgattcgtgtccagctggtgctccttgattgagggagtaatcaacaaaatttataacctattacaccatatactagggtagcaaagaaaaagctactatagcatagtgactctaggatcgttcactgggaagggttttcaaattacaaatgataccaattcaaagtgaattggtgttgtttcatttcaaagttagcttaagaaataaaacataaactttggttgaaaaaggtttagatttaaactaatagcacaacaagtaatggaaattacttatgaagaaaaacattccttggagatttaggttcacaggggaggttcctcatgcaaaaacatagatctggtcagatggttcatttcctcgcattagagaattaacatatagtcaattctctaatcggtgttgtataaatgcatcccttaattggatttcagatttaattccctctcactgatgtaacttgcaatggttcgtgcctcttacttagcatttaccattcaaggtgatctttaaccttggacttcctttctcaagctcgcaagagataactaatggatgtctcattggagtccaaaagcttaccaagtgttggcaattctagaaaatcctaccttcaagtcacctcccagaggctcgcaaggggtaaactagtgcatctccatggacggagatcacttgccttaccaactgttggcccaagtgactccaaggtgttttaagttaactaaaaacatagaaatcactaaaggatcacactttctcttcattcatggctaaaaccacaaatctactaattcatgcacttggaacctttctcggcaaccttagctccaaggaactaaaggtttagttactcattctctgggggaacttcctcagagagtgcataactagtaaatgaaaaatacaatcaaagtgagaaggtaaggcagagcaaaggctctgtattttacttcctttcaaacttttgcaaaaggttccttcttgagaacatgctcctgagagctaattatatgaaaattacaataataattattaccttgatatttaccctttttcctagcttaataactaaggaatcctataattggtggcttacaaggagaattttgggatttagacaacaaaaatctgaagaaaaatatccaaaagtgttggtcgcaaatatcgggaagcactaaggaccatttcgcaggtgaaaatgaggtctgcaagattttgcagacgcacaaaaagggctgcgaaatcacttcgcagcaaaaggctgatttcgcagcgctgtgaagttggctttcagcttgcggtgttcggcttccaatggctgtaactccttcatttcagctccaaattgcgtactatttgaagcattggatttctgacttcctaagctttgaaatgacatatagcatgaataaattggactttaggaagtgctccaaaagtggctgacatgactatcataaaaaattgcttcatggcagatttttctttgcttcccctccttgcattccagatttgcttatggcaaaggacttcaaagatttggttcttcatgtttctgagctttccattgctttgccatggattccaaataactctcctcaatctcatattgctttggtgatcaaaaagctatcaaaacaccaaaacttaacacaaattgattagaagtgcttgcaaaggtccttaatatgttaattgggttaaaaggcaataactactactcaaaagtgtttaaaagagttaattacaagctatgaaataacactttttgagtagtaatcactacttgttattatctaatagattagacataaattagcatgctttagtcatgtagtaggagatcttgggtttagtgacaatagcttattggcaagcctcttcaatacttggatacaacttagtttctatgtggaaattaaaatttttggaaatattttgtattgttgtatgattatgtagctattagattccttatttgtatcttaataacttttaaatttctatgtttaaggtcttatcaattaataccgattttctatgtttaaattattttctcattgtttctgcttttattgcaacaaaaaatttcatttttatgtggaaaaggcttgtatgggctacgaaacatccagtaagataagactggtgatccctatccttcactttgtccagtaagtttttcagtcttggttcccatccatgtcagtgaagaatactaaacccatgatagtagtagctcctctagtgtcaacaaaggaaggcacattcctagtggaaagaaatatgaatgaaagatcccattgaagtgaattgggttcttgtatctatgaaataatgagaattcttgttctctctcaatatctatctcaatttgaaaacctaagaattcttattaagccatcattttcaaccctcctgatgtaccactattagtggaatataaaagccaatttttttacctagaattctcatggtattaaagcatgtttaagggtctctttgaaccttttctcatgttttgtttcctttttcacctctttgtctcaattgaccttcattgcagctaagcactaggttttcttagggtaaaattttttagcaaagtttgctccatatccgttggtttgtttgttataataattctgatagaatcttgttcatggctcttagttctaataaaagtttgacattactttggaggttatttttaaaaatttaaatatagttaaggaatcctactactctatagataacgaccatagattgaatgttttaatatattttcacttattgtctcatttgttgatttgttttggaaagaacattaaaaataggtcttcttgatgaatcaaacaagatttgatgattggagatccaaaatttaagtagtgggatgctaaaaattccatggtaatatcatggctaatcaagcccatggaattagagattagttaggtttatctattctcactaacaacgaaggggttgtgggagactattaatgaggattacataaatctaggcaatgttactcaacaatttgaacttaggactagacatcatgatactaaacaagggaatatttctgtcaccaattattatcccatgttaagtggactctagcaagaatatgatctatatgctgataatgagtggaagtgtactactaatagtctaaagtaccagcagatgtaggaaagaaacatagtttttattttgtataaagacataatttttggaggaagcaaagaaatatatgttttttttcaccaaggagcaactactataattgtataggtttacgagttaagaacaatcttagcttaaaaactcctcttttttcaccagagaatctggagaccttcctaatatccttcatactttatttaacaatcccatactttatttaacaaaccaacccttggatcattaattctagggcttttaatcttatgattagattgtcaaatttgttttccatttacattttatgtttagggaagcaaaaagtgagaaatcacatatagatctttatcattagttataagaaagggttcaatttctatctcaaaagttttgacattgaattctactttctgtgttcgatgtaatcttctttctatgagaaaactcataaaatatcataatttcaatgttaagctcttaccttcttactatgaatttcaagatcaacatatgccgatgaagttcaaaagtacatgagatggcttaagtccatgaatagacttctttagttgacaaacatactcccccttacactcaaacctaggtgattgaactataaacactatttgattatagttaccatgaagacatgcattgtttacattgagttggtgaagagtcaatcttgatttgctgcaaaaatacgataacccatacaaaatttagtttggtaacaggaaacaaagtctcaataaagtcaaggttggaagttaaagtgtatctttttcttaccaaacaaacattcaatccatcaattgtaccattaaggttgtgcttgatagaaaataacaagtggcagccaacaactacaacattagtaggcttaggaataagatcctagttatgatttcactttaaagcatgcattttctcttccattaattgctctccctcagccatgatgagaaaaaactttattgtaagacttaggtggcgtttgtttttttggtttaattctaaatagaacttatatttaacttaatactaaataatgcttaatagtattaagtattaagttgtttgtttttttttttaatattttattactattaagtactaataccttttcacaaacttcatatccacttgattccctcaacttttaccgcaagttgctttaccaaggcttataccccaatgagtacactttctgttttgtgctcacttcatgtggccaagccttggctcttcaagagggcaaacaaatacaagcccaattaatcaaacacctctctttggtcaatgtctatgctagtacttgacaaggaacaatttgacgaggtagattcccttccattttggctgaaactgctaattccgaggtttgggcaaaacaatctaataggggttatcccatttactttgggaaacctttcatctcttcaacagctttcagtggtattcaatcatttggaggggggtattccacatgatttaagaactctcatgggcatcctaacaaacagtttgagcacaaatgctctacccaacaaactgagattcagcaatctgaatttcttcaacggaagcattgctcagagttttgggagtgggagcccttggtggattcaatgctgtctgtttggtcaaaatagacattgtgataccaaccgcgagcttcttcgtccccaaagctagaattacaaccaccggcatcttcaaaaccgtcatagtcactctcttcccacttagccttccgacgctctcttcaacctcaccaccaccatctaccagactacccccatcaataccaccaatctcctcttcttcacattcaacgatcctgatctccaaaaaagaatccaaagatgccagagcctgcacaaactcaggacgctgttgaggctccacaggctgctgcaggattggatcggagacacgagaatgcctttttctgggtttcttgaggcgatcccgattcttgacaaagagatcgatgacaaaggatcgtcgattgcagagagctacaagggatgggtgggctagggttgggcgtcggcttgcaagttggggatgtttaaaaaattggctttttctatttagccaaaaattttaaaaattcagtaataagtcatcaaaaactaaaaaaataaacaacttaaattctgaaagcaaattgctttcagtaaaaagccaaaaaaacaaacgccaccttagaaaaagtaatttaagaaagagatgtaaagaaagctctaaaagatgaggacacgtgattcacaatcactataagaaaatagattatttagcaacaaaataattcattattgaaagtccaaattgtctgaagaaccaattgatgaagattgatagaggaagggtcaccaagatgatagtgtcatgcaatactatggggagtagtagtatggataactaaggacttgtgcaatggctagaagcagtttttttcaaatcccccaaaaatcgtccttttactctttatatcctgaatgatgcaatgtgaaggataaaatttgattgaatagtgcaagtgagaggcaggtttgcaaatagacaatatgttgaaagggaaatcaaggaaataaaagtgtaaaatcaaacatagtaattgttctaatcccatgaatatgatatttataactaattgcaatagttacaaaggatgaagtaaatgatcagaaagattggaaagaagtaaggaattacccatcatatgattaatgcacaaaaaacaataatcaaaggaatagtagttgaaggttaaagacaggtattacctaaattatgcataaaagtagtggaggtagatgaaagtgtaaaatgcttcacatgagaatttgttttggcttaaatatgctattttgggatcaaatcaccattctttttaggttatttaggtatagggttgtcacaccccatattctagaatttctagttactaagaaattaaccttgcacacatacaataggatgttttatcttgtttaaggtgattaacttaaggttttaatgcaaatttcaatgctatatagagtgtgcaattcttgcaacttaagcctcatttatttatcttaatcttttcctatagatgctagctagaaatatgtagtttcattctatatattttcttttcttttctcatacattgtaagataaaacaacttgaaaatgtaatttgatccaaaaagagtagtaggtatctcccccttaaaggtagcttgagtactttgtttgctgccacggcttcctttatcaccataggttgtatgacctgcacatccaccatgactttcaagtggagaggtgagcaactaaggaggataataaaggctaatgcttcagatttgtctagtgtaggtagatttaggatgacatgttaaacataggcaaaggattctctagtaataggcactttttcattagaaatgatttctaagtatacacgctcaagctctggttgaagaccagaaatgaatttagttatgtgaaattcttcttagtggaacttatacatctccaaatctaaagtcaagggttgatagatattcaactcttcctatatgccctttaattctaagtattattgttgaattaatatatggctttgtcgataagagagaaaattttgacaaattacaaaaatatgaggtgtatttttcacaagcatatatttcaaccaatgtactccaagtaccctcacaagcatatattgttaaatacctatgacttcatactatttcaaagcaaagtcaagacttgttcatttcttcttcccaatcatagggctatcaaaaagtgggtcttttgttggcacttcattatctatggtgtatgagaaagaaatcaagtttcaagattatggtgagactttaagataaaagaaatataaaaaaagtagtaactagctaaggagactttgagatgaaagtgacttactaggcatctaagagggatgttgctttaggacgaccatgctttgatatcatgttgacaagaagagtgttgaaaagatgaaaattcatctcacattttttaatgcatcttgaataaagttgtaaaggtatttataagtctataataataaaaaataaaaataaaaattattcccataatttgttctataatcttttcgacaatctctcgaacaattaatttttttctataatctctcttataatctttcctataattactcctatgctttcaacaattttgaagtatgatataaagatgttgagaatgataggaccacatttgtatcaaaacttgccttgatattgtggtataaccactttaccatttaggttttagccaacttagtatttgtcccatgatttggcctaaaggataagaatcgtaaatgttggaataccctagataaatctaatccaatccccagatctctaacaagtacatgcatctatagatcataggcccaatggaaaactagataagcctcaaaactttattctatggtgtagaaaacaatagagatcacatacttacaatttgaatgttctttgatctattttagttgatgaagaaagatctcaaagacatagaaatcttattcttgatagctctttcttggatcttggaaatagaaaggggtaaacttctctctagaggtatggaggctagggttctctttgaatctttctctaaaaagacaataataagcttgagtttctaaccctaagccctaagagggtttatataaacctccttatgggcttaagtgacttaagtgcatcttaggcttgggttacttaatctaaattattgggttctaattaattaattagctctattagactctgattaattaattcatttagtttagaaagacaattattaagctcttgtacaaccttgcatttttgctaaaatacttttatgcacacatgaataaaaacctaaacatcactcatgataatatgtcaccaaggaatgtgagtttgagtgaagactattaggacctaaaggaaaatagtagccgaagctgactcaacatcctactatagagaatcaatcgcactccaacatcctatgaaattaaattaagaaataaattgattaaatccaatttaatcaatttcttaggtacgtgacctactaacaaccatataagctccccataaactgttgtccataatctaatgaggtagatgctatcaacctcttgagtttacctctatcatccttgagtcttagatcctcctattatgtgatcaactaacatactctatcttactaagagcgtatattaaatccactaatggaattattgcaactccacaaattttatgatcacaaatcctcacgatcacttgaaggaatacctcatgtcaatcatgagatatcatagtgcttgtctccagaatgtctattgtcacttaccttaatcaacaatgactcaatctataaaaaatatgactacctcaggatctcattggtaggtcaaagttaatgaagaactcaacactagttcaatattctctcaaggttgataattcatatagcatagtaacatagtaaaatcatgactacttgatagttaatgtcataatctaccataagtcctatccaatgtgtaatcatacatattagtgtactcaccatgggaaacccattttgatgactaaaaaaagtcatctctccaattaggagatagtgtattataacctcatatggattatctaagttcatgaatcatttgtaagccactcgtcaacttataaggaatccatgacttagatcttctatataatttctaatgcacccaaattatgtacaatgcaagtgatgtaagtaagtgcttcaaaatcataatataaatattaataaaatcatatattattacattatgtcatactttttaaagactttatcctaacaacaaattgaaaattgttgagagaaaattcaaatatattataattaaaagctttttattcattaataagaaagtatgtattgttggaagtgtttcatacatacttaaagttaatttatgtttggatagcctcaatacttcaaaatgcctatgaatgctcatggtgtgtggggttaaaatcactcataaaacatccatggctcaataactattctttggaatagttctcaaatcttttgatttagatggagagagatagaggagatattatgattagatggtaaaaaacctccctctaatactaatctcatacttaggccaacccactaagggatccacctgggctactcataacctttcaaaataatagaacaatccaataattaatttatattttagtgttctaatttgtatgagcatttaaattctgcatctgatttagatcattcaattgttgttattttgttgtggagaagttcaatgaaaatgtatttacttctcgaatcaaaattttactattaggattaacttgattattggtggaagtatatttccactataattcgtttaaaaatttatattcatccttaagaattggttttatatatataaggcttgtgtttctttacttactcttagaggcatggaatttttaaaattgactcaggtattttttttttttttaatctcagtgatatgtgcatttagttttgcacatgaagtttaggtgataacctattgtaatcactcgctatatttttgttgttcatattccattaaatgcataacttcatattcaggccttgtttgaatagccaaaaccctttttttttttttttttttagcttgataggagcttctatatctatttggctaattttgttcaaagagcttatgacttcaaaagagcttaatatgcaagtcaataaaatgttactttctgtagaaactatattttggctcgtgcaagaagttatttgatgtttaataagacttttattctataatattactttttaaaagttgtggatttggctttagcttttagttgaagttaaaaggacgaagccatcccaaatgaggccatggtcacttagttgtaatggttttaaagacatttcgaccataaaatggtatatgttgcccggtgtttgtagagatttttgtatatatggataattgttgtgtattattacaatttgctatggttgaaagaaatagacgtgactataattatgtcataagtcatttaatatttttcttacaattttgatcatactttgaacatgaatatattaggtacggatgatttatagactatttgatggttaattcccaggttaatcgaagaagatacaaagacactaagacaag

SEQ ID NO: 10672 - DNA, 5154 bp, Vitis vinifera
  Intron number 1 from transcript GSVIVT01031439001 (locus G SVIVG01031439001) derived from phytozome v7.0 (chr-ID chr6 ; pos 18563347 to 18568500)
agacaattgtgttttagacctagttgggtctacaaattaagttttgattcatataagtttactatttaagtccaaaacttagaggaaatgtgaaaattgagaagaatgatatgaattttttatcttttcaaaaatgatatttattgactattaaaaaaaaaggtagaaaaatattaatttaaattttattccttttgcaaattccaataaaatttaatataatttagagatttggaaaaaaaatacacccttttccaaaaaaataaaaataaattattattatttaaaaatcaaacaccttggaaaatatatatatttaaaattatgtatataaaaaataactaaaaatatgtcaaatttattttttaaaaataatatatttttttaaaaaaattagttttataaaaataataaaattttagaataattattaaaaaaaattaagataaaaaagtttatcaaacattatggtagaaaatagttttgaagggtatattggtctcttcatattttatatcattctcatcaattatacaactttcatgagtcaaatcttaatttttgggccaagttgggtccaaaagacaattgtcctaaggaaatttcatgctaccttgagagagagtgttttgactattaaattatgttgttggtgcataaggtggaggagacttgcaacaaagataaatcttatcctcgtgctaaaacaaaaaggttattaaatttaataaattatttttatatattactttaagtcaatttaattaattttaatttttttatatataaatattaaatttagtatttttttttccttattgctttctgagaccaacacttaaacaatctaacaagttttgggtatgtcatgtcaagggagtatgtaaattttttataatagtatgatgcattaaaaaaataataatttgtaaaatatagtagtaaaaataatattttcaaaactatcatagtttcaacacataagaaagagaccatgataaaatctatccggaaacttcaaattaataaaaaatagtctattatttctttttcttttaaaaaaaaatgcaaaaattgtctaatcaagaggggatttctaaaaaaataaaaattaaaaactaaaatcgtttcttgaagagacgatttcttaaaaacaagaaaattatatcaatacaagaatcatctctccaaaagactatttctaaaaaatattgttaaaaaattctccaaagagatgatttctcacaaaaaaaaaaaaaaaaattgatttcaattttcttgaaaaaaatacaaattttcatctctcatatatttaaatttttttaataatagatgtagtataaaattaattgattttatataaaactaattataatttttgtggatatattacttgtagataaaaatatttataaaagtataaactaggttacatagtgaattaaatatttattaataaaatattttgataaaaataaaaactaatttaattttatactcttttgttctttctacaatacataatgaatattttgatttgaaaactttatttattactttattactcctttcattttcacattactttttaatatttttttaattaattggatcacaattatttttgctcaagttagaatcttgaggataaataaattttaatttttttataagtgatcatgttaaatttttcttaacttaaattatattatatttaacttgtaacaaaaaatgtttgaaagtttttttaaaaataaaaattttaaattaaattatggatttgattttatttgagtttttaaaaaaaatatatatattaggaattttagtttatttcagtttttaaaaaataaatcaatatttgtaaattgtatttaagcattagacataacttttaaaatatatatttatttgtaaattattacataacttttaacatgtaaagaatatacatttattattaaattgtttgaacgttagatacaatttttaacatttagaatatatttatttttaataaataaaaaattcatttaaaaaattttaaaattacaaaatctattagatattagaaaatattattattattttttaaagagaaaattagaaaaggaagaaaaaattatcctttcaattaaagtttaatttcttatctatcaactgatttgtaaagatataaaaaaaatcagaaaattaaaatgtgattattgatttttaaaataaaatttcaaattaaatgaagattattatgaacaaatatctattttatagtaaacttaaatttttattgcaaacatatagtttaaaattatataattttttttaaaaaaaaattgacatgttatattttttaaatagttatacaacttagagtgtgtttgacattgtttctaggaaatgtttataacctttataacatttgaataataaaaaattacaaatattaaaattttttaaaatacattctaaaatcactaaacatattattattattatcatcttattaaaacgatgaaaaatgttatataaagaatatcttgatcatattttatggttccttccaagcttataattctttgtatcatgataatgttttatttctccttaaaatgcagtaacaagttaaatatggcataaattaatttaagaaataacaaaaataaacataaatttatcctcaaagttttaaaattgagtgaaaataaatatgatttaattaaaaatattatttttttaaaaaaggatattaagaagtaatgtcaaagtgaaatgaggaagaaaggtattaaatcaaaatttgaaattaaatttatttttatcctaaaaataacaaaaagaataaaacaatttttttaattgtaaaaataattaattagaataatttaaagaaaaaaggatcaaaatatattttcaataaatatcaagttgaatataaaatagtattattttagtgcatctataatcaacataatttatatttttataaatgttattatttagaaataatacattaaataattaattgataatattactatttataaataatataaccatgttaattaataattatttttacatattgaatttggtatataaaattaattaattttataataataataataataataataataataataataaataaataatgatatttttgaaatgttccatatatgaaaataaaaatagccgatgttgtatttttaataagttttaatcaatattttttataatatattgagttggaaaaattatgaatttgtaataaaggaaatggggtcactaggaaatccgacatgattttggtcaaatcaataattgattgatttgcatagagccagaccatccattcaagcggtttgaccatccaacctttgaacggtccaatttgtaggattagaccaaaattggaccaagatccaaccaatccaaccattgatggtccaattcgttggaccggatcgaagaagccatcgatggttagaccaactgatttttaaaatatcaaacataatttcacaatatttcctttaatcatggaccacgccttggtggggtctccatttctattgtttttaaattgtcgggctgatggtatgtgtccattattttcattttataaaaataaaatataaaattattttttctttaaagtggccagttattattatgattttcacgttttccattttggggctgcggtcatgtaaaaaatttgtatagggaaagcaaggaagcacttgtggaagaaagggcttctcaattatgaaagcaagaaaaacgttttgcccatgtggaccacttaaataatactcaatccatacgattcagtattactgcgacttgaaatagggacaagccacatggctatgggccatgccgcgcctttcattattctagagttagaaatatgaaaattacattaattacctgtcacattctcccaatggaaaagtgtttggaggttaagaaaatcaatgagaatcaagaaatacattgattgataaacagagtttgctttctgtccatggagaagcaactgatgtctacctacaatgtattttggtatgtaagactatttgtttggcgatgaattactttttcacctaaaaagtgtttttgaaaaaaaaaaaagtctttcatgaaaaattacttatattattttttggagaaatacttagaatatgttttatagtgatgctagacatcgtttttaatatttttaatacttaaaattttttatcatttaaatgttaaaaatgttaaaaatactttctagaatcaccccaaacgcacttttagaatgcatttgacagtaattttaaaaaaagtttatattctttctaacacttgaatgataaaagtttttaaaagtgtgtttgataatgatttttaaaagtgtttttagtttttttaatacttgaaaataaaaattttgaagtgttaaaaatgttaaaaatgttttctaaaatcactattaaatgaactctaactattaaaaatattggaaatatgtcctaaaatcacttccaaacgggctcttaataagcaattatcttaaaaacactttttaaagaatatttctatttaaaacatttcaaataaaaataatatcaaacacactttaaaaatatatttgatgacatttacttctaagtgtttttaaataaaagtaataaaaaagtgtttttaagagacttgcgtatgtgttttttcacgaaacattggaaatgattttaaaattttgttaaacactatattttttttctcaaaaacattttttaaattaaatgtgatttttaaaaatattgttaaatagactttaaaaaatttattttataatgatttttgcttgtgtttctaacatttttagcactttgaaaacaattcttttaataaaaaaattttaagtattaaaaagctcataaacacttcgtaaacttactattaaatgaattccaaattaaactttaagaagtaatgatacgacctgttataaaatgaggaccatagaattatcgtcgttggaggatcctatgggggcagtgagttaccataccatgtacttaatctcaatattgtttaattttcataacagagtccttgaacttcgtttgtctcttttcctaattcagtgcttgcttc

SEQ ID NO: 10673 - DNA, 550 bp, Vitis vinifera
  Intron number 1 from transcript GSVIVT01020054001 (locus G SVIVG01020054001) derived from phytozome v7.0 (chr-ID chr1 ; pos 11028363 to 11028912)
tgcattttcaggtaacgtttcagatccaatgttgtttgtgaactactagcttccattctctatagttcatgcttgttctcataccatgatgatttcggatctacgtgtgcgcatctacgtgccaacatatatttctcccatttcggattcatcaagatagatgtaaatcatagctaactctgttttcctggaaaatgttttgtggtgaaacaaatggaggcttgttcatttcgctgggacaaatggtgtaatgaatcgattgttgagcttggttaattggtagatgtttgtggaagtaatgtaggacttctgatttgaaatttgtgtgtttcttatgttgtttagcataattttaattgctatttggctttaggatttgtttatagattgattaagaagtttgggcaatttgatgcagtgttatggcgtctctctttatatgattaaacctcttttgtttcttggtaattgacatcattgaggttatgttggtattttataatattgatttattggtaattgacatcttgcaggattttaaatttgtgtt

SEQ ID NO: 10674 - DNA, 1730 bp, Vitis vinifera
  Intron number 5 from transcript GSVIVT01025523001 (locus G SVIVG01025523001) derived from phytozome v7.0 (chr-ID chr8 ; pos 14347773 to 14349502)
gaacggtatgtgttgtaatcacaattccaactatttgtttgcatggtcaagatttctggttgtattattatttttttttgataggaaaccacacatgaatatattgatagaaaaagaagtacaataggaggatgaggaatcctcccgccaaaggtgaaactaaacaacccaaaaagatagcaagacactacactatgtcaaccatgcacaagcacccttgactataccgtcccattggaactacacactgctagccaatctagttgtaatacattaaggggaatgcccttaaaaaccgcggaacaaaaagcccaaagagaagcaaggaaatgaatggagtcccaaagattctctgaattcctatctttgtcctcaaatattctagcatttctttcccgccacacaacccaaattaaagctatgcacgcgttttgccaaaattaatcattacctttattttgcttccatctggcagtcagtgcacacaatgcatctcttatccgatcttagttattaggtagttttggatagggattgcacttgatttatgttcctaattgaagaaaaatattattttccatctcttatgtatagttatttagtagttttcaaaaatataatagtttgaattatttggattaacatagtctaaggacaaatggtctttatggcaaattttgttgcattgacatgctttgttgagtttgattaaaacatagatcttcttgtgatttaagtccagtagtatgactatgaaggttctacttctggaaggatagaatttctcattttagaactgtaagttagcatttgattattgaagaaaaataattattttccacttgatttggattaacatagtgtaaggacaaatggtctttatgacaaattttgttgcactgacatactttgttgagttcaattaaaacatagatcttcttgtgatttaagtccagtagtatgactgtgaaggttctacttctggaaggatagaatttctcattttagaactgtaagttagaatagaatttctaaattcagttctaagtttgacaatcaggaaaataatccactatcgatcttcttatttgttataacctagttgcttttggcaatgaaaatttagcctataaaaacttttttttttttttttaccaaaagaatgaaataaggaaaataaagataatcactgttgactgaggatggattttggtggtgtttatcattaattatgttcttggggcagtaggttttagagtccattcttagcaatgagcctctgaggcatgcatgcattgatacatatgaaccagttctattaggagttacaaagtctatgtgataataggttctttaattctgcattgagctgatagaggttgtctgttggaattttcttttgaagtggtgcttttagggtagactttctgggagtcttttacccaccttagaaccttttggtcgagaagcaattctttgctcatacaaaatcatgatcaacttcttgcgcttgaatactatttatttgacaactcaaaaccaaacagtagctagattgacaccatcatatagttatggtgtttttaaacctcgacgtttttcctatcacatgcatcactttgttagttcaaagtttacaatttgaaattcttttggagcaattcttatggtttggtttcttttacatcactgcagaagggaagtgctggagggacaactttattattcat

SEQ ID NO: 10675 - DNA, 2457 bp, Vitis vinifera
  Intron number 10 from transcript GSVIVT01022808001 (locus GSVIVG01022808001) derived from phytozome v7.0 (chr-ID chr 2; pos 16863951 to 16866407)
cttgtaagctcatccttcccttttctcgtatggtgttgctaggtataatgtaaaattgaaagttttagttgaaatcaatttgctttttggtcttctttgatttctctccatatttattggtacatatgttggagtaccattaatttaaatcataaccttgtgaagaaatttaaagggaatcaatgtttaactgatttgtatatttgtttgttctctacaactcattgtctaagggaatcctcaagttttaaattcagcctcttaattctgtatttgctataactatttgaagacatcttttaaaaattcagtttctaaatcatcagtcagaattatattgattcaatactgtaacaagaaccttttggaaggattcagcttttcctttcctagtggattttcaatgctgtttgctcctcaaagtgcctctgtatgatctcagtttgagctgggagagttctgccaagcagtgtggttaagtttaatatggatgaatgctttttggggggtccagacaggctcaagtgggttggagggattttcaggagtagttattgtatttatgctttctgttacggtcaaagtgatgcttgaaaaatttagacaagcctatgatttcaaggacaaaaaattcatagaaactaccttttattcatttcaccattctttattttctctgggacaatggacatgatgtataaacttgtaaacttgctaggtatttggaggctgcaataccaagacaagtttttgtctatgttgcagtaatctgggctttatgcactttgtcttgatatttatgtttgatcttcaccaacatgcatgcaaaaaagcatacttgcacaaagacttgcaattctctacgaaattgccaactgagaggctattgcttttacaaaagtctgtttcgatcaaatttaatttgttccatccactggacagtgctaagcttaaactttcctgtccttaagaagttcttttagatgccaaggtttatcgatggcattcaatccaatgaattcactcttgtggcttgattaggactttatattatatttatgaacgggcgttataatagtctaatgagttttggattactcgttcccaagcactcttgcatcttctatatgtggatggaaatgcaaaactagtgcttagaagtgcttaaggacctgctatgagataaaatatggcactggaagacttaatatatgtcaatcctaatgtaaaaaatttgactaaactgtaagacagaaaacctagaatataagacaactattgtacaatgcaggatataactagaaattaatgtaaaacagacactaaataatgttttttacacatgaaattctctcaattgttggaaggctaaacaacttcttaggaaagacctgctgtggcactaccttagttgagatgtcatgatacttttgcctttgtgctagcatcccaaagtttcctcccttcttgcagttatgggggctgctagcccaaaatgatagtaatatgggaaaactgcacgtcaatcaatccacaggaagttttggtaagctaggatattgggagggatgtgataaggaattgattgctccaattatggagaatcaactgttcaccagctggttttctttagctccacttcattgaatccagcttggacctcaagaccatcaaatacccctaagccttaacatttacagttttatcttccaaaattcataatgttcgaacatataaaaaaaaaacatatttttttagacaaataattcatatatgtataaatggaattaggtcattaaaataatgaagcatgagtgttcattttctccaaagtttaactctcatataagtgtgtttttgtggggatctagattgactaacaggatgcagattctttcacttagagaagaactagatcccatgtaatagagttccttttgtatatggctagagccttgttttcatatttttttaaaggatctcttgtctacctttttttcctgtcatgatttatttctattaagattcttctttattctctgttagaataagtagcataatcaccactaataatcatctatatcctctgacttgctattagtatcatgtctcaaatattacttatttatttatttattattttagtagctaatggaactaatggactagtagaaataaattttgaaaggtctagtgcagagaattctctgcaatattagcttgggagactggaatgatgtccatccatttccattttttgctatgcattccaaaacattatttttgattgcaaatattgattactttttctgttctgagtaatttaaccaatgtttttttttcttttgtcccctttaagttgatttctgtaaaatgtcttgattattatgttcctatatttaatgtcatgctttgtttctagaacgcaattttggctttggattcttcaaccttgga

SEQ ID NO: 10676 - DNA, 3543 bp, Vitis vinifera
  Intron number 17 from transcript GSVIVT01013566001 (locus GSVIVG01013566001) derived from phytozome v7.0 (chr-ID chr 5; pos 20978011 to 20981553 reverse strand)
tctaacgaatctggtattgtccttggaaaacttaggtatgctgtatgcagtattatattctgaatatattcaactatgtggtggtttgatagattagttagttgtctacgtttcttgatagagttgttggtttctatgtctaacaacttgttatcattatatatatattctgattatagtgggcatataagtatgcgttcttcagattctaaggtttccctttgcctcatgtgcgcttgtgatagatttcattgaataaatgagatttgggattggatttgtgcattatgcatttgtatcacttcagaaattgtcttgtgggaatggggatatatttggcattcgcacattattatggtgtagaacctctaatctcctgaggcaacttgttgtctcaactgtagagggatttatttttatgtgtttgaagcagctgctagtttgccaccagatggttaagaccagatcttatggcatcatgcatctgtaaaccaccaaaacttaataagatccttgagctttctttttagccccttccaattctcattttgaacacaaaatatcattattcttattgacaaagagttgattgttgaatgtggtatgaccctagacacgaggagggatgtaactgaagaaccaaatgttaatggtgggcaaaattttttagaggccgtgcaaaaaggtattttgagaagaaaaaggaaatttatagcaccatcaatctgcaccatgtctaacattgtgtgttcccacattttccttttgaaagcagattggtttatttgaggagcaaaaagatgatgccttgcagcattcagagtgatgactagataagatcaagcctggtggcttgaagcaatgtctgtgtttgatatatttaatttggcaatgcttagggaggttgggcttgtcagctttctttctttttacgagtcatcatttggggataacgagcaaaacattagatttaaggcttttaggcctgctatacacctctgtatgctagtctctcttcattagggaaatatctacataatgaaaaaagacatcagattttagaacaaagcctctaggaacagatgtccaaggctctgaatactatcctttctgcccttaaggaaaaatctatttaacggtatttggatgatttccaaactaataattacatgaattcaccaggactggacttgatgaagtatactaactggaaatgaatatatgttgtatgctgggccaaaaaccgctcaaaacatagccaatcagttgaatttggtgatgtatcttatagatcttgtaggcacgcctttgttgtagttggtcttagatggtaaattttagatttttgcctgaatttcacctttggctgaagaatgaatgcagtccaatttctggacttcatcgcttcttattttggatgacttttttttctcatcacatcgtagttgcagaaaacaatttggattaggtattggaataatttgagactcagcagtttgttgtagttaggcttagatggtaagttttggattctgaccagaatttcgcctttggttgaggaatgaatgcaatccaatttctaggcttcatcgcttcttagtttggatgaatttattttctcatcacatcatagttgcagaaaacaatttggattaggtattggactaatttgggaatcagtagaaaaattaaactgtatacaaggatgaacccagagtgcatagaaggccttaagccaactgtgaactcttaatgaaataaaaaaggttaaactccctttccctaaggaatcctttaagcacataaattcatagaccagtaaaaaataatgaccttgatgtaaggaaaaagagaaattaagcaaggaactttctattgtcattgtcattgtcattgtcattattctatcaacttggaatttggcaatttaacatatatgaagtgttcaaataggagtgaagagttcgcttgttcttatagatcaagctcatccacacagattaggtttgagtggctgtgacatggtagcgtatttatacctgacttagtctgtagtctaggttcctgatttgatccatagagctgtgtgtgcacactttggaaggctctataacttgttttctatgatgtctgagattctgcattgttgacttgtgagaaagcactaggtttctgacaaccacatccttggagaagttttgattgctgatcctggtgccgtgctagttggaatcatggtttgaaatatcggtaaacatagatatatcgatacttggattttacggatatatcggaaatattggtgaatattttgatataaatattgataagatgaaaatgattcaaattcatggaaatattcgaaaaaaaactctaaaaaaggataaaataggtaaaaatacatatgttaaagttattttgtaagtgtaattgacaaaagtatggttaatgagaaaaatatcagtaaacatggatatatcggtcttaatatataatttattatttatcttatcaaattaattttaatttataaaatattagaacttcattattattatttttatattttagtattttttttgaataaatttatatttttaatatttaaaataaagacattcaaaattaaaaggataaatataaaaaatttaaaggtgaagtgatagtaattttttaaaatatgattaatgagatagatgatgatacatttaatattaaaactataatttatttaatttaaatgcagtcaataatgtaaaataagtgatgatgcatatattttttttaaatttaattatcatataaataatataaaaaaagacttgtcaagaaaattattataatggcttttagatttttattcattaattaaataaaaattaaaataaaataattagaattaatttatttattctttttataatgaactttaaaatatttattgtgcatgtatattaacaaacatacacttggcccagtggtagatagcttcaagtccaagccttttgcttgggttcgaatcctcttgggcgcaggccttgggtgttaaaaaaatttgaataggtgttgtaggagcaaatcccttgacgcaggcattgcaggcgcggtcattgacccgcgttgatttcttgaaaaatcaggaaaccctgatgtaggcgttgcaggtgcggtcattgaccttcgttgacttactgaaaatttggtgaatttcccaaaatatcagggaaagcgcagaaatatcgaggaaaaatcagctgaccgactttcgttgtgaaatatcgtgttggctgtccctgataaccgaaatttcggcaatatatcgctgaaatttcccgacatttcaaaccatggttggaatggatagggagatgtcctcacgttcttgatattttgctgattcagagtagtgtgtgtgcttttgtaatgatacatattgaagttgcactagtagatgatttatttatttattttacttctttatcaactttatatttctataaatataaagtaacattttcttaatatgttattatagtggacggc

SEQ ID NO: 10677 - DNA, 11454 bp, Vitis vinifera
  Intron number 1 from transcript GSVIVT01014097001 (locus G SVIVG01014097001) derived from phytozome v7.0 (chr-ID chr1 9; pos 357234 to 368687)
cccaagtgcgacatctgccaggtctgcttctcagtttcgcttcatgttcttttgtttggttcggaagaaaacagaggtgagagaagaaaatagagaactgttcctcagcttagggaagtgaaataggcgtgttaggggtgaattgagaggaattggtctgtaggtggaaaattggacgctggagctgtgccttttggatagtgataggttttaaaatttttagagatttatcgattcagaatacacaatgaatattgataatatgtttctcaaatctatttagttggaaagtgaactgaggtaggaaagaaaatatagatgtgtgtattgcttagcttagatgtgcaattagatatgctaggtcttctgttgaatggatgaattagttttgtaggttgacataagagatttgtttgtttattttatttccctatgctttctcggcagccaaatggagagctagcagagaatgaaattattattggttttgtgtgtgtcaatgatacataggtctaaggaattttagaggcttgttaattttggaattcacaatgaatttggaaatatggatatgttgtttttctgtgtcaaattgatcataggcttgattgccgaatagaagtgtcaatatggatgttctcagttaggtggagggataagttctgtagcatagcggattgtatttattttccaatgttttcttagcaatcaaatataaaattaatgaaagatggatatatgctgtttgtgtttgtgtgcatgatggataggtttgagaaaaatttatagattcatcattctcagaatttataatgaatctgaataagacatatgtttgtttatttattgtgagtgaatatgatggatagctttgcttttgattgctctgtttggttcaaaagcaaatcatgttatattcaacctcaaataagttgaatagatgtaataggtgctgagttgagtggaggatttacttttataagttaattatgtcataaaaagttattcagaggtgttttgtttgtttatcttatttccttacattttctccacggccaaacagaaatgtagagaacattgatggtatgttcttgtgcacgtgtgtgtgtgtaaatggtgaatatgtttatggaattttaaatgcttatcaatttcagatcctaggatgaatgtggaaggcaaagacatgctttgttgtgtatgaaacaatgcaaaggcttgataagtgctctatttggtcagaaagaaaaacaaaagtgcaaatattgttgagctcaaataagtcaaataaatgtattaagtgctctattgaatggattcgaggaattagttttataggttagtaatcatgttctcttactttctttctgcagccaattagttttatggattaataaaggagatttgtttgtttatttattttatttgtgtagaaactgagaatctttctaatattcattcaaaattgtattttttacataaacggatccctatttaatatttacacagagagcaaacaaaaaaggaaaaaataaaaatatggaaaaattaaaatcacacaaattacccacaattggggcctcaatctttccctcaatatcctacaaatcaccattcaaattataccgggtttccacactccccctcaagttggatcatagatattaatcatgtctaacttgcaaataaaatcttcaaagcttgatttctgcaaccccttggtgaaaatatctgtcaattgttcccttatagggatataagtcatgcaaataattcttttcttaattttttcctttataaagtgtctgtccacttctatatgtttggtattgttgtgctgaacaggattatgagaaatactaatgacaactttgttgtcacaatagagtttaatggggagctctattgtaatgcgtagttcttccaacagtttctgcacccacagtccttcacacataccttgtgcaactgctctgaattcagcttcgacattgcttctggctgttacactctgtttcttacttctccatgttactaaattcccctagacataggtacagtagcctgtagtaggccttctatcatctgttgatcatgcccaatctgcatctgtatagatctctaccttcttactatcactcttcttaaagaataatcctctccctggagaaccctttagatatttgaggatcttatacactgcttctagatgactttcctttggtgaatgcatgcactgactaaccacgcttacggcgaaagcaatgtcaggtctagtgtgagaaaggtagatcagtctacctactagtcgctgatatttctctctatccacgggttttccatcgctttccgtcctttttcttgccttgataggggtatcgcttggcttgcatccgagcatgccagtctcaatcaacaagtcatgtacatactttttttgggaaatactaattcccttccttgatctagcgacctccattcctagaaaatactgcatttgacccagatcttttacctcaaattttgtggctaagaccttcttcaacctttccacttctcttgtgtcatctccagtgagaatgatgtcatcaacatacacgattagaacggtcatccttccatcgttggactatttgaagaacatagtatgatccgactgtccctgttggtatccttggttcttaatcacctttgcaaatctatcaaaccatgctttgggtgattgcttgagaccataaagagatttcttcaatttgcataccctggtttcttcttctttcttacaaaaccttggtggtagcatcataaacacttcttcttccaactcaccattcagaaaggcattcttgatatcaaattgatggaatggccagttgaggtttgttgccaaggataaaagaagtcgtatagtgttcagctttgttattggtgcaaatgtctcggtatagtcgatgccataggcctgagtgaactcctttgcaaccaagcaggctttgtatcgttctattgtgccatccgtcttcgatttcactgtgaatacccatttacagctcactggtttcttccctcttggcaaattcatcacttcccaactcccatttttttccaatgcccttatttcttccatcactgcctctttccattttggaatctccaaggcttcttgaatatttttaggaatctggattctatcaaggttagttgtaaaagcacaacattttgcagaaagagcattataagacacaaatttcgagataggatggagagtacatgaacgaggttgtttcctaagagcaatgagtaagtcatctgttacctaatcataagtgtccttctatattaagcgaaggggtagatataaggcatgagtggattcaaacacaacaacattgagatagtcaaaggttaagggtggtctagtttcactcatggactttccctgaagcgagtagtagggtgtatgctaaaaaaatgtgacatctagactaacatatagcttatgtgaaattgggtcatagcatttgtagcccttttgtgtggaagagtagccaagaaagacacatttaagcgctttgggatcaaatttgttctgcttaggtccgtgagtgtggacaaacacagttgacccaaagacacgaagtggaagatgtgcatcgagtctagaacgaggaaaaaactcttggaatttctggaagggtgtgacaaaagataggacccgactaggcattcggttaataaggtatgtggttgtcaaaatggagccaccccaaaattgtgagggcatgtgagatgtaaacaacaaagcacgagcaacttcaagaatatgtctatttttccgttctgcaaccccgttttgctaaggggtgtcaacacaagaactttgatgtataaaaccattttcttgtagataagtgctcaaggagtgattgaagtactcagtaccattatcagtacagagaatttgaattttgatgtgaaactaagtttgtatcatagagtgaaagttcatgaagactgatcgaacctcagttttatcagtcaacaaatatacccaacatagacgagtatgatcatcaataaaagtaatgaaccattttttatgggtcctattaggggtacgtgagggtattcatagatcactatgaattagagtaaatggtatggatggtttatacttagatttaggaaaagacgcccaatgatgtttgataagttcaaacacttcacactgaaaatccaatgaagttttatttgaacatagtgaaggaaataaatgtttttaagtattgaaaactaggatgacccatccttttgtgccataacaaaagtgcactatccttaggatgagatgcagaattacaaacaataggacactgtccacgcacatcagtttcgtcaaagtaatatagatcctcacgttccttagcactgccaattgtcttccccgatgataggaatttagctaagcaattagactttttggttaactagctaatagacagcaaattgcaagataaattaggtacatgtaggacaaggttgagagtaatagactcagaaatacgaatactccatttgccagcaactggggataaagtaccatttgcaatttttaattttaaattgccggcacaggaagagtatgtagaaaataaatgatgagcatcagtcatatgattagatgcaccagagtcgataatccagggagtaatatgagacatggtgctaagtgctgttagaaaggtacctttttgggccaaagaaccataggacaaagtgttagaagactgaccagaggcttggaaattagaaaaaaaactcatataatttcacaagctggtcggaattaaacctcacactagaagttgactgacaaatttctgtgggggtgtgttgtttgcctgggtttcggtggaggcttgatgactatgggctttattgggctgtctgggcttccaatctacaggcttgccatgtaaagtccaacaagtgtctttagtgtggcctaacttctttcaatgctcacaataagccctcttggactgtcttgggcttggcccgctagatccagcaacatgaggcccactagatccagcatgaggcccacatccagcagtagcatgaggcccatgggttaaaagggctgaagcctcaggcccaaatgagagatccaacatcactctccttctgctttcctctcgttgcaccttagagaagacttcttggatggagggcaatggccgacgactgagaactctgctcctgacgtcgtcaagctcgcagttcagcctcgctaggaactggaagaccctcttgttctccatcttcttaaagcgcacactgtcacccgtgcactcccgctcctcttcacagttgagatcgagatcttgccacaaacccagcatctcagtgtagtattccgtgacttccctatcttcttgcttcatttgccagagccgcgtcttgatttcaaagatttgggaagcattcttggcatcggaatacgtttcctgtatcgcatcccacacatcctttgccgtcgggaggaacatgtaagtcttgccaatggctggcttcatggagttaatcaagcatgaggtgataaaggagttttcgaaccgccatttctaggatgttgctacatcggtcggaggtggtcgccgagtctcgccggtaagaagccctaactttccctttctgtcaataacgaggttgattgcttgcgcccactctctgtaattcttatcgttaaatttttcaatggtaagatggagtggggagttgtcgaatgcaccgacagggcccattgaggagtgtatctccgacactctttcatgggttgccgactgactggactcatggttgtttcctctttgggcagccatggactgattagggttttagagcaaacacggctttgataccatgtagaaattgagaatctttctaatattaattcaaaattgtattttttacataaacggatccctatttaacatatacatagagagcaaacaaaaaaggaaaaaatacaaatatggaaaaattaaaatcacacaaattacccacaattggggtctcaatctttccctcaatatcctacaaatcaccattcaaattataccgaatttccacagtttgcttatgttctctcaacaggcaaacaaaaagctagtaggaattgaagatatgttggtttttctatgaattctgagtaggtttatgctttagaggaatttaagtttgtagtgtcaaaatactaaaaaaaactccacagaaaccgagaactctaagaactttgatcagtttattgtcttcccatccatctatatacatatatatacatatatcctatacacagagtctaaattcctaaattttatatggtaacattaacaaatacatggtaagccaatttgtcaatcttttcctatatgtacaaccaatttgattcctaatttgtatatggtaacattaacatttcttatatgcatagccaatttcattcctaatttgtacatggtaacattaacatcccccctcaaattgatgttggtaagtcaaccagcaacaatttgccaacaagaaattgatgtcgctgtcgagtcaaagctttggtgaagatatcagccacttggagatcagaagagatgtgaggaagagatatcacccgactttccaaggtgtctcgaatagaatgacaatcaacctcaatgtgcttggtacgttcatgaaaaacgggattggtggcaatttgaatagcactagtgttatcaacatgaagaggtgtagaagtagtctaaggaaacccaagctcctcaagaagacggcacaaccatacaatttcagaacaagcagtagacatggcacgatactcggcctcagtagaggatttagaaacatgatcttgtttcttacatctccaagaaattaaggcatcacctaaaaacatacaccaacccatagtagatcgacgtgtatttagacacccaccccaatcatccatcaaactgcagcaagatggagatgtcgaggagaagtcataaactgactggtctgatgaacagcataggagatattaggtcgagtagtggtcaagtagataagactcccaaccaagcaccgatagagagtaggatcatccagaaggtccccttcatctttcctgtatttgacatttacctccataggagtatcaacagaagaagtgtcctccaaaccagccaaagtgataagatcttgaatatacctatgttggttcacgaaaataccactagcccgatgatgaacttccaatcctaagaagtatgtgagttgtccaaaatctttcatatggaaagttgtatgtaacaactgctaaagcttagtaatcaaactacagttagtgccagtaatgataatatcatccacataaaccaagagaaggactatacccaacgcagacgtgtggaagaagagggaataatcatattgactttgggtaaagctgaaggaaagagttgtactgtgaaacttctcaaaccaagcctagggcgcctgcttgagcccatacaaagaacgttttagcttacaaacatcatgaggaaaagaattagtcataccagagggaagcttcatgtaaatctcttcttggagatcaccatgaagagaagcattcttcacatccatctgatgtagttgccatgactgtgaagcggcaatagctaagatggttcgaaccgtggtcattttggtagtaggagcaaatgtctcctcataatcaaccccatattcctgcttgttacccaaagctacgatgcgagctttgtaccggtccaaagagccatcaaaacaaagttttacagagaaaacccatttacttccaataggtttgactgtaggaggacaaggaacaatatcccaagtatgattctcctcaagtgcttgaagttctgcttgcattgcattttgccaacactcatgttccatggcctgtttgtagcaagagggaatagaaatactggataaagtagcaacaagagagacaggagagaagaatccataccaatcagggggttgagaaagacgagtagaccgacgaagagtggtggaagtaggagcaggatcaggcgccgagtcaagattggaaggggccacagaggaagtggaattggactcatgtcgactacatctttcatacccaaaaccaggtttgaacccttccacaattgttagggattcggaaaaactaggtagaagagatacaaatgcagatggtagctcaacatgagatggaaagaaatattgattttcaaagaaaattacattccgggaaactcgtatacgacgagcaaggggatcataacaaacataacccttgtgagggatagcataaccaagaaaagcacacttaatagactgagcagtaagtttatgtcgttcatgagtaggtagatgcacaaaacaaacacaaccaaatgtacgaagatcagaatataaaggagaatgaccaaacaacttagagaaaggagaaacatgatttaacataggagagggtaagcaattgatcaaatgaattgcagtagaaagtgcttcacaccaaaaacgaggaggaaccgatgagtcaagtaaaagagttcttaccacatcaagaaggtggcgatttttcctctcagcaacaccgttttgttgtggtgtcgaaggacaagaacgctgagagatgatccctttgctttgaagaaattcctgaaactcattagacatgtattctccgccagaatcagagcacaagaccttgatgttggcatagaattgagtcttaataagtgcaagaaatcgcttaaaagactgaaaaaacttcagccttagcccggagaaagtaaacccaagtaaagcgactaaagtcatcaatgaaagtaacaaagtacttgtaatgtgcatgataaacaataggtgcaatcccccaaacatcactatgtataatatcaaaacattgtaaggcacaagatgcagaatgaggaaaaggtagaactttacttttgccaagtttgtgtaatgtacaatcgaaagaaagatcaagagaagaacattcattcccaataatccagaattaaacaaagtacgaagtacatcagagtttgggtggccaagacgtctatgccacatcttatgtccaaaaccaacaacattacatgcaaaggaaaactaggaataatagtggaaggagaaacatgaagaggaaagagtcatcccactttaggccccttcatgatcatcttcccggacacttgatcctgcacaatgcaactagaacgggagaaattgacattacaattattatcaaccaattggccaacagaaagaagatttttggagaggttaggagacacaaaaacattagttaaggaagaggaaagatcaccaacaacactgataggcagagaactaccatcagtagtgttaattttcaaatttccatcataatttctgacattggaaagagaaagaacaatattcgtcatatggttagaagcttcagagtcaaaataacatggcttagaagaaatcgtatgattacctgagagcccaaaagtagaaatgatcatttgttgtaccatttcaggagtgagtgtgttcgggtttgctaaggctgtaggagcaagaataggaacaaccgaagaggcagcaggcaatgcagtagaactagaggcaccagtggaggcatgataagcagtaccctgcttcctttcaggccgaatgggacaagcaaagatgatatgaccttgtttcttgtagtagttacagaacttcttgggacaatcccaagcaatgtgaccaaaatctttacaactaaagcattagacagcccgcatatctcgacccttattatgcccctgtgctgcataagctacagaaatgggtgcactaacattagcccgatgttccatggtagcttgagttacaatacgctgctcctcacgcaaaagttcactcaagcaggcatccagagatggtacaggatgatgattcatcagattagatcatgcaatttcaaagtcgggttgtagcttcatcaagaattgatcttgcttgctggttgcatgcactgcttggacaacagagagagctgcagcgggaacattagcataaacaatgtcagaataatcagtccaaagagtttgaaaaccagaaaaatattcctcaattgagagacttccttgtgtgaaattagtcatctcatactctaattgaaaacgcctagcaaagttgtcttgattgtaaactgtgtggagataattccacatagcagcagcagttttataaggcctcagattgagaacaaggtgaggttcaaccgagctaaggatccaggtcataacccgagcatccttaatttcccacttagacaaagcctcggcatcatgaggtgcagattactcccatcaatttgaccccataatgcttttcctttgacaaataatttaaattgaaactcccaagcacaataatttttgccagtaaatctaataggaaacgattccaacttatctgatgacatgatgcaaccgagaaacaaaggaaatagcccaccagaaaattgtaatagaaacggccaagaaccaggtcgcgatgaactcgatcaacactgttttcgatgccaagcatttgattggtagaagatcacgaactccacttagaaggtgccgaaaccttgctctgataccatgtcaaaatactaaaaaaaactccacagaaaccgagaactctgatcagtttattgtcttcccatccatctatacacacacacacacacacatatatatatatatatatcctatacacggagtctaaattcctaaattgtatatggtaacattaacaaatacatggtaagccaatttgtcaatcttttcctatatgtacaaccaatttcattcctaatttgtatatggtaacattaacatgtagttcacatagagatctgtttgtctatattattttccagcagtttctcagcagccacataaagctactgaaattgaattttttttttttttttttgcatgtatgtgtttaatatgtttttagtgtgtgtgtgtggagtgttggtgctggtgtttcttatatataatgaatttagtcttttgttttcctctccccctctagttgccagtttcaacatcaaatgtatacatcatgtgtgcctcattgcatcatttgtttaggcagtattaatgtatatttactttttgcttgtcaatttttttttttttttaaaaataattaaaataatgaatttagtcaaaccatgcccagagagtaactaagataacttttatgttcttgtaatggaacattctggaactcattgagttttatataagttatattctctttttctattaactagtaatgacaaaagaattgtcatccctttcaggagacagttggctatttcttctgcctagaagacag

SEQ ID NO: 10678 - DNA, 6813 bp, Vitis vinifera
  Intron number 1 from transcript GSVIVT01001986001 (locus G SVIVG01001986001) derived from phytozome v7.0 (chr-ID chr1 9; pos 6077446 to 6084258)
tgcatacacgaaatagggtaagttttgatgtgatagcgttttccgttattgattcatgggatcctagctagcctccatatttcttttattgtcaatattagggacaggaaggtgctaaaccaggtaagcactatatagatcaatacacactggctgtgataactagagttccaagtgtggaatgatgtatttacatacaagtattgataatgaaaggattaattgccagcatagagaaggaaacaatattgattaccattctattgttagtattaggaatatctcttaagcactgttagtaatcttgtaaataacatgcatacattttcagcaaggataattttcctttgatgctaaagaggtaaatgaatgaatgatcaaaagtattgttgttggtatacattacaaccattaaatatacacacaactttccaaaagataaactgtacaaggtatgcgcatattactcctaaacttaagaattgaccatcgagtgctcttgatttgtagttgagattggctctctcctaatatgcccctgcaaatggtgcttccattagaggcatcaatcttgggccgaattaaagaatgtaaaatgagacctaggaaggggtttggtgagtatattagcaaattgattgtgggttgacacatgagcaacttgaagggagcctgtagctaccttttcctgcatagaatggtatttaagaacaatatgcttcatttttgaatggaggacagtatttgcacatagagatgtagcaccaatgttgttgcaaagtaaatggggtggcttgggaatgagaattcataactcaagaagaagattagtgacgcaatctatttcaaccattgccgaggttatagagcgatatttaactttagtaaatgagcgggaaactataatttgttgctttttagagcactaagagattgggttttctcctagaaagagtacatacactgagatgaaagtgtagtcatcccgattgcctgcccaatcgacatcctagtaggcaattaattgtaatgaatttgagtgacggagtaggagaccatagtctaaggtatgtttgaggtaccgcaagagacatttggaggcaatacagtgagtttgagttggtacatgcatgtattgagccaatttatttatagcataatgtcacgagcctagagttccaacatagtagcacgacccgtgcaacgatcccatgggcaaatatcaaaggggctcaacttgcatgtcatgcatttcaatgccattatgctgattggtttcatcctgctatggactcatcaagggaacgaatctagctcccgaccagtttgtgtagaggatggccaagctcctcttcattgtcaagtccttgactagcgacaagctccccaaacttaactaggtcggcctgcttgaaatatgaagaaacattccaacatcacatacacgccttttccctggagcaattctcattacattaagctcaaaccaatcaacttactattcttgatcaacactttcgctacggtcacaaacatcaaacaaatagtttgtgacattctcccccacctaatctcttgcacgcctcatgcaaggcttcatgtcttacccaaattgatgccctcgaatgctgccgccctccacaagccattaatcaccaaaggtccactattgaaacccactgggccaaaggggacgtccacaccttggacccgacatcacttgtcgtgtttacccggtaacaccttggaagtgtgcacctagacaccaattttcacctttagtaggcgacacccacgcgtattactagacagttagggacacctcacgatttggaggcacccatactcccttacgagtcctcataagtgcaactttaattcacgccacagtacccaccctcgcaccgttgtaacgttaggcttcatagactactagtattgccatcaggatagataactcatcggccacatattgttagaagggaacaccaccatgctcaacctcctgccttgctctgacaccacttttcacgggcttagagttccaatgtagcgacatagctcgtgcggcaaccccatgggcaaaaatcaaaggggctcaacctgcatgccatgcatttcaatgccactttggtgattggtttcgtcctaccatggactcattagggaaatgactccacctcttgactagtttgtgtaggagatgaccaagctccttttcattgtcaagtccttgactagcgacaagctccccaaacttaaccaagtcggcctgcttgaactctgaagaagtattccaatatcacacacacacctttttcctggagcaattcccattacattcaactcacactagtcaacataataccattcttgattagcaccttcactacggtcacggacaccaaacaaacaatttgtgacaataagccatattaggtttggatatggaaaggtattgcatattaccaatgagattgtgatattgggagacatcaactggtggagatccatcattttaaataagtcgagtaatacaactgagtagtgtgataataccctccatatgaaatcttgcaaagagcttgtgaacatgtttttattgagagaagaaaaatccatttggtgatggaataacctccttactcaggaaaaaatgaaaaaaaaatccaaggccttcaatggagaatcgattagagagagctgtaatgacatggcgaatgaatgatagagagttctttataattagcaagtcattcacatagactaaaaaataaataaggataaagttgtgagaatgaataaacagagaagaattagagcgagaggcttgaaagcttgaaagcctaaagatagaataaaagtcttaagctcagtgaaccaagctcggcttgcttcaagctgtagatagatttgtgcaaatgacagacatgatggggttaagattgatcaatgaatcctagtggctgggacataaaaacttcttcatggagatgcttgtggaggaatgcattgttgacatctaattgatgcattttccattcataagagagagagtaagagagaacagtttgaatagttgtttgtttgaacacaaaactcaatatctcatgatagtcgaggttgcataactagtgaaatcccttagctatgaggtgagccttgtattgagctatgctgctattaggattatgcttgatccagaagacctacttgtagccaactaattttgttgaggttcgcaaggaaccaactcccacgtagcacttgaggcaagcacttgaagttcttcattcatagaatctctccattctttttgtgttaaggcttggattatgatagtgggttcaaaacctaaaggcatgggatacttggtggtgctaaggggtttttttttttttttttttttttttgtggtttgaggatgttatttttggatcaagtttgcatgggatggtagggaatggggttggtgatggagtttgggagtgcttcattggtattcgatgtgaaagagaggtcaaccacaaaaaagagacatgaggaacatgatgtgtgataaagagaggaggattggtggagtttccttattgaagatggagcttggtaatgtgctatgagtgggcagtttcaaagagagttcaaccacaaggggaataacttgctgtatggaggcacaaaggacttgagacgtgaatggaaggtggagcgaggagtgcaaggtttgcggtgaggattggagagtttcatggaataaaaatatggggtggataggttgatgtggtaaagtaaggatggggtagattgatggacaaaatggaaagggtggtagttcgataatgatcatgtgaagtatgggaggcaaacacgactcaaggggtaggacaactcatggaaggggctgtttgttgagataaattaggaatggaggttgtagtctccttgatgcgaggaataagggagatagacacaattggaggggtgggacaactaattgaagaggctggttgttgagataaattaggaatcgaggttgtagtttccatagtaggcaacaaagaccaaagggataagagcaaggatgctcgatagaagaaagtgagtccagtttcaacaatatgtatgtgacaacgttcaatagaggtgatatgttgagatgtgtgtagggggaagataagatgttgaatctcatgatttgagaacacagatgttaagcctttctttaccaccataagagtaaagggtactaatagaagatttaaaaaaaatttcaacaattttcttgaactttggaaatagtgaaaaattttcaaatttatgcaataaggggaagaaccatgaatatttggtgacatgatgaacaaaaaggacataataagaaaatccatcaatagagtgaataggggaaggtcctcatacatctatgaagatcaaatgaaaaatgactctacaaattagattcgtcaaagggtaatttatgacttttattatagtaacaagaatcatgagatgactgagacaaaatggaggaaattgaaagattattttgagagacaatttggtgtaaaattttagaagatgggtgaccaagtctatcatgccagttgttaagaaaggctttaacacccatgcaagctcgttttattccaatagtggaagcatctctagttgaccactcataaacattattcttgctccatcctcgagcaatgagtgcccttgtgactagatccttcacacaaaagacgaggggttaaactcaatggaagcattatttgattggcaaaattgtgagatagaaattaggttttgtttcatggttgggacacacaaaacaatggagaaagaatgagtaagatggatttgagagagttatctttctaatatgagtgatattcaaacctctatcatcactaatgacgatgccatccaggcctttgaatggttgtccagtatccaagagccaattagttgaggaattgttggtggtgatagctggattggtaataggcgtgaatgaaagaaacaatttcttagcagtgtaacactagcaaacagtatgaccttttctctcacaaatttggcatatcacagtggtgttcttgctaaggtgttgattcctgaaatgagaagggcgttggccttgttgtccttcctattggggaaatattttttgctagggttttttttcactattagaagatgaaaattgagcattgttaacagtaatgataccaagatttccagtggaacagagctcttcccgcttgaggaaggcttcatattccactaatttgtcatgcaactcatcaaaggtaatcatagtatcccatgcttgtacaacaacgacgatttctttgaattcaggatcaacaccattgagtgtgtgagtgatgaggtattggtttggaatgggtaccccaagaagatttggttcatcaacaatgtcacggattgtggcaagataatcgattactggttgagagccacggttgagaagagtgagttgctttgctaagcctatggttctggatgatgagggattggcatagagctttgcaagacgatgccatgctttaacggaggttttgcatgagtgaaccacagggacaactttgtggctaagggaaccgatgattcttagaagaagaagtttgtcttgtcttgtccaaaaaatatagtccaaatttgagatttgtttgccattgattatgatttttgaggatggacatggcttggttccgtcaatgtagccaagtaagtcatatccaaagagcagtgcgtcaaactaggttttccatgaataatagttagtgggagtaagcttgagtggaggttggctaactgcgttgatggcaatgagagtgttggtagatagggggaggtgggatggtatggttgagcttgcatcaaccatggtgaaacgtaggatgaaagagaagaaaaaaagaaacttgtgggagctagaatggttctgataccataaagaggtaaatgaatgaatggtcaaaagtatcattgttggtatacattaattacaaccttcaaatatacacatgactttccaaaagatacatgaactatacaaggtatacttatattattcttaaacttaagaattgaccattgagtgctcttgatttctggttgacattggccggctctctcctaataaatcctttaacatgttgctggtaaatatttattcatgagagagaactgattggttactttcatctggctgacacattcgtcatttttcctacttcttactcattctgacttatgcatgcatcttagttaatacgttattatgaatgatagtatgcaatctgggaagtcattctaattaagagcatgacatccttatttttcagttctgtttactttaatcaatccttttttttttcttttctttttgagaatttcaatttcaccaacatctatatatatatttttagaactcagtttcacttgcatatagtgttgtagcttagcatgtgattcaaagggcagggactaaactttgcttccctttggttttttattttactagttgacttacattcttatctaaaagaatgtcccgaactttaacaagatttgtagagttcattcacattcttacaaatgtagaactgatagctttgagcggcttgaacttgtactttagacttgttttaattaccatagcatatatagcggcttttctcttatatatgaattgaatgtatatagcatgttttcaaagagatcttgtcactgatcatagcaagtatattgatctacagtgggatattcttacttgtggac

SEQ ID NO: 10679 - DNA, 7349 bp, Vitis vinifera
  Intron number 6 from transcript GSVIVT01023714001 (locus G SVIVG01023714001) derived from phytozome v7.0 (chr-ID chr1 1; pos 9889256 to 9896604)
acattcagacatatcactcggtatatgaattgaactaacattttgctctgcaaattgattctgattgtacttttatgtcatttactgttactcagcctaaattctgcgtattccatgataccacatatataatatattcactttcctgcttgtagaacttggcctatttgtttacttaatgaactttattaaattttgcatgacttaacttcttgaaatggtaatctccagagtagaaggttgaacggcttctttgcttcattatctattgaaaaatgaaaaagatatctcaatgaggccttacaaaccagctgtttcacttagtatctgtttctaggaaccttagctctcaggaagagagtgagtaattgaaactattgtaaagtttttttaaataaagaggaacttatatttttagctagaacttaaatcttaaaacaacaaatatttttataagtgtaatagtataagaaaaactatttttatgtctgaaaaaatggcatagaaaaatcatggtagcagtaattattggattagttgcaagagcatatagagagcaggagtggagagtgaaagaccacacaagcatgagcctgaactctaaaatgatatattttcatacattttatggtgtctttttgttagataaatagtgaaaactgaaatactaattttactattggcaaaatctaagatagaacaactgggtggcaccatgctctgattggtttgaccaacatatccaagcatgcatcaaataaaatttcttttagtataatttttctaatccttgtgttcttgttcatttcttttctctttattccttttttggtagatttagaatttagtagcaagaatctccttttttaggttaggatcttgcttttggaactgccattccttagagctgaaccttgactccacctagatagaatgttgcattagcataagagaaattcgagttatcaagccacacaacttttcatcttcaaaatagttaagaattttctctaatctcagtatttgataatattgactacctatctgtccatctatatgtacatatatatattgatattgcaagcttttgtttttgtgagcaaaaatctatgaaagaatggcatccgttaattatcctactaagtactaactataagtgaatatcaattatggattagcatctgatgagagagaaaaaagagaggagggtgcggatgaggaaaaggggtgtgaataggtgccttataaaattttcaaaaaaagtgaagtgatccacaaatgtagtcttcccctatttttctcttctcaatgtttcagtaaattaacaaactacatgtagaaatgatgcaacaacactctcccaaaaagtttaatatatgcgaggtactagcaaatgatatgaacactcttccaacatggcaaacaaaaacttatccacaaatatgaggtttaagctataacagaaatcaaaactgagatctaaaagagaattgagagaataagcaaaacatagacacaaggatagaaggtgaaaaatctttgaagagacccaaaaccatgggccaatcacaatcgtaacatccactatgaggaaaataatgaggacaagttttctagaccgcttgtctagtaccttgggaaacttagcttcctatcatcttcatgtaatgcccctttaaatcaccaccaaacatgatcttggccacttcttgttacccatgtaagaagatgtttgaattttgccccaaaagatgatgaaaacaaaagtagggatgaagagaaacattcactgaaccttttttgaaggaaaatttttctttagaaatgttgacgatttgattgaagataccaaggagctaactatggaatttgattgaagatatcaaggaactaactacctaatttcaaagatttgattgaaaataccaaggaattaattcccttgttgagatagtatactgcatatttccctgttttatatgtagggtaggggatttctagaaatgaattgactttatgattttttgaaatttatttttctacttttttttttctttttattttttttattttttatgattgtacagtaaaaaaattgtatcattttgttagaaatttaatgaataagaactatacttttccacatggtatcatagcttgttcaaggtttctaagttctcttctaatttttcttgatggttttcattattgccaattttaagtggcctttatttttgttattttctacctcaaatggccttcattttcgtcactggttagttcttcttaacaatcttctttactgttgatttgtctctattccactactactatgttgaaaatcttagaaaatttgaccttaagtgttgcattccggaatcaatcatctatcgaagaatatcaaaaccttcaactctcattcaaagttaataatcaaaactatctagagtggtctcaacatgtgcgcacattcctaaaggcaaggggcaagctcaaccactttagataagaccaatacatcatatgctccatggctgattgggtaagcagtccatggctagttcttgttgggtttatgctaattcaacctaaggcaatcacctaaaagagagggaagagggggagggggtgaggggtgatggtcactttttttttttttttaatagctttggacacttagattctaagtttcaaggaacttccaacaattcctcaagagatgcctcactcttgaacaacccctcaaatgatacgctatacttaagaatccctaaatgatacctaacacttatattcttcactcataaagatacaatggataaatttgatctaacaatatcctagcacatgttaaagctcaaatagatacaaggtgaaactagaattgataagttgcattaagaaagaatgctcaatgcactcaaaataaatttgtaaggctcaacaaactattgaagaatagtttgaaacatttgttttcaacaacaaaagtatagaagccttgtataagagttgcataggtaaactagccattaggcacagtttacatgattggttgacatggatagtttatcaattgaccttggtggtttactggttgcatagtagttggtctgaaggtacaataggtgattgttggaagcaaaaaccttgaatggttgactgtggtggttgattagtggcttgacaggtcgagcttttagctcaactggtggctaccaccaaaaacatgttgaaacacttcaaggctaagtcaatcagttgacctaagcggtcgatcagttgggtcaaccactagtcaactatatataaaatgtaagaaattgatacaccataagtaatctttaatggctcatattgtttcaataagaaaacttaagattggaaaaccatttttaatgatgaaatgcatgtaacaacatgagtttttatccttgaaataattaatctcattttttataaaaaaaatattaaaaaaaaaagcataaatgagttctataatttttgaaacttttgcatctttagagcaaaatccttaggtaaacttgactagataaactccttaacattttgaaaacctttttaaccatgaaacactaatcaaatgtagttttcatttataaagttttttcatttaattttgaaaataataaaatcaatttaggcgctcggatgattcttaatgcttaaataaaaaattaatacgatatgaacctattacactaacaaccttacaaagagaccttagaaaaatgatcttgcgataccatctctttgaaatttttgctttcttaatttcctcttggtttgatgtattgtcttgattgcctctcaggaaatcttcttgccatctctttgaagtcttttttttttttcttgatttcttggcttgatgtaaaaaaataataataataaaaaaataaaaaaataaataaaaatcaattttaagaactttaaggagtaggtgttcaataatataaccaataaaaacaacacaatgagcaattagcactaggcagtttagaagaaatctagatgcctacatatatgatcatttaagcataaaacatcaatattgataggtttgctaatataacttagttaattcacctattttccaatatagctactttctaatttgtgtaatttagtttcctaatttttgtaagattgtgcattataaatacggtatcattttgttataaatgcaatgaataaaaatcatttttttccacaagaaagagatttttcatctaaaaaccccataaactttacttagagataaacacccctaaatttggcaaaggttttgaggctcaaggaggcaagctagctctcacaacaatgaatccctaatctggaaatgtgtttaaatagtagggattcaaacctaatccaacagcttaaatcaagaaaatgatgaaatttgatatgttgtgatcaaaacgtgattgatttaatataagactagaacattctaggtgacaattgatctatcaccttcagtggaatcaatcaatactcaagtcaattggtttaaaacaaaggttttaaccccccttaagctcctaaccttattttttatgaaagtattataatttaaatcttgtttgttcaatttttgaactcatcctccacttcaaaacacttaccatttcctttagctatcttcattctttaccatctttggaatagcaagaattcgagggaggatttgaagcatttgagttgggagtatatgatggaaagacattcacactaacttaaaaaaaattatataaataattggtatatgagaaggtattcccacatcttgtcttttagaaagatgttccccttgttataaatgatctttcagagaggggatgtgatgaggatgaatctccaagatatatataaaaaaagggaattagtattagttgcaattacattgggattagtattacttggaattaaattaggattaatatttgttggagtctaattaggattagctagttaagttataatataattagaatttgaatcatgataggttattagagtcctagtagactttggatgttataataaaaattagaatcataataggttattagagtccttgtagactttggatttcttagagaaacctataaataggctaatcaatgcgaatcaaagagatgaattgatattaataatattatgttttctttcattgcaaagttgcaaccctcaatgatgagactccattgattttcttctaggtgaagctcttagaaggctttagcgagactctaaggttttcgatcttttcttcgttgtttttttctttctctttatttcttatcttatatttttctctaccataaaatttattccttgttcctctccttacaccctaaaaataaaaccgtagcccacctacccttgagtgtaggcaaccatcctagggttgtcctacatcaggatgccatctaataattcattgagagaatgagacaaagagaaaggtttatgcattttatttagttagttgaactaataatttgttatttagcaaataagctttggttgttctctgttaaagaactcttgtttaggcagttgtaccatccatacatattggcatgatccaagatttcaatttgtctatggtaaatgcattatagcttagaaattaacagaagaaagagtggacttgacccattgaataaggattacatccactattcccacaattaaaatttgatagagttgtttgaattggcagtccaaaggaacgcctcggtaaatgagatgtgggattctagcctcggccaaggaggttggaatataagactctccagaaaccttaatgattgggagctggatgctttaggagagctgctgcagttgttgagggttttgaggacttctcttgaagaggacgcagtgatttggaaaggagagagtcacggcctctttcggattagagatgcctacaagctattggcagggtctaatgtcattagcttcccgaaaaagggcatttgggtggataaggttccaaccaaagttgctttttttgcttgggaagcgtcttgggagaaagttttaaccttggacaagcttcaaagacggggatggcagtttcctaacaggtgttttttatgtggttgtgaagaggaaaatgtaaatcatttacttttacactgtacagttgtaagggctctctgggagattgtcctggccttgtttggggctaattgggtgttcccagagaaagtcaaagatatgttagtcagttggaggggcccttttgtggggagaaagaggaaaaggatttggacttccattccgttgtgtattttttggacggtttggaaggagagaaatagattagctttcagggggggctctctagctattcagaagctaaagaattcttttgtttgtaacttgtggagttgggctagggtgtatatgggagaggagtcctcttcgcttataggttttttggaatggctcgccgctccttaaggggaggtgagtgttggttgttggtttggctactgtgtatacgtcctgtatgccttgtgactttttgcctcgtttaatatagttgagcgcacttatcaaaaaaaaaaaaattggaatagttgatcttttttttttcttcttgtcttttttttttttttcatatataaaaaaatttctttggattctacaagatttgttgatattttcaactaaatcttctttttcctaggtgctccatagggagaaattgctatttctttcctccatagagaaaaggttattccaggtcacagcataagagccagtttcatttcatgggtgttgcctttgccaattagcacaccagtgcacaaatgtcaatgttatggtgctattgaagggtttaaccaaattagttctaataaattaattgcttcccctctccattgattgaaatatataggaggcatgcaacttctggacactaggtgggtgagtttttggcaattctgcttttgattctctgtctagttctaagtgtgggagtactaggtacaagccaacaaaccacagctttggctgcttagattataggtatttgggccaagatcttacaagggaagcaagaatgagttggattatatgagcagaatagaattttcttttaatctaaatttcatgcatatgctggtagttacaaaacctttctagaatctaaaccatctttctatggtatttgtactttttttttttttttgtttcataaccaactattcgaatgattatgcaaataaagggccaactttttcccctttttataatgtacaacagaggactagggagcttgatacaccagacttgcttga

SEQ ID NO: 10680 - DNA, 17146 bp, Vitis vinifera
  Intron number 1 from transcript GSVIVT01027798001 (locus G SVIVG01027798001) derived from phytozome v7.0 (chr-ID chr5 ; pos 7869601 to 7886746 reverse strand)
cgtcgaaggacgatcgtggcctgctcctctcagaggtaatttcggcaacgccccatgtttggttgtcccacatcattctcaattcatcctgaaaattcaagaatttgagtcttcaacctgttggtgactcttgaatatgcaaagaccctttaattcaaaacagagtttaatagtgatcaggcgtacaataacctctttttttagacttcaaagaaagctctaagctaattatttgcgtaagggcaagataggagaggaaaggcatattggtgatctgggtatggtttttgggagagtgggcgttgtgtaaagtggaattgttaattgggattcaagtggcgtaacaaaaacaactggggcaaaggttttgttgacttgagaattgcgttggactgcagtgtgtccactctgattgcagaaatgttgatagaaaaggagaaggatatgctattagctgttcaaaatagtgtctaaagttatgctgtaattactggctattctgctgctttggttgggtcgctattgagtttgaaggagagctattggttcaggttacttcacattttcatgatctattgtagcccttgaaatctctcacctatcataggctactggcataagttttggtcattagaagctgtttttctgtgaatatgtttgcaaatatgccctaagctagttctaagtttttagcagtcctgttaggccatattgattgctcatgctgatttctgtgtttctagactcactgtagtttgtttccatagttcatattcttgattttcggatatgataacacctaggaaactcagttttgaaaatgcaaccaccaccccaccagcaaatttataggatttgatactaggagatttgcatgggttttagctcctaaggaccaaggacagtggcagagccaagaattcattctagggcaggtgaggtgggaggtggaaaagaatgagatttatttcagtggaggaaaaatttaatacaactgcattgtttagttgggtggcaagcaaatttggctcttgcggatcaatcaaaccatgatctttttggtgttttgttttgatttttcaggtgagggcatgaaccccttgagccaaagaagccatgaaagttccactatttcattttctactagatattgtgagtgttcttgagaagataggaaaaatatgcataattctttatttgagtttaaagcaatcagtgagtgttcttctgaacgtgggaaaactgtgcacactacttttttgagcttagagcaatcaattagggttcttgtgaagctaggaaagttgtgcaccattctttttttgagcttaaaccaatcaagaagaactggctagtggctattgctacagatatttgccaatgttggtgtgggttgcatatgtatattaagctgctctttagccttattgaggaaacattccttaaaattgcgagtaaagaatatggaggagagaaataggattagaagagggaattccaaataattataaatattattgatcaatagtctctagtgtttaacatcactaggcttatatacagataaataatcctaattcttgtaggaaactaattttaataactctaataaatttttatcactaaataataattacccttaataaatagtaaataataaaataaaatattatgacgtcttatatttatgcctaacataagtgcacattggtgtcatcttagcatggattttgtcttaggattgtcaaagactactagaggtcatgattccattttggcaattgtggatagattttctaagatgacccattttatcccgtgttctaagaccattgatgcttcttatgtggcaatgctatttttgaatgaaattgaaggttaagtggtttgccttctaatagtgtgtgatagggatgtcaagttccttagctatttttggaagtcactttgaaaattgtttgatactactttgaagtattcgtttgctttctatcctcaaatagactgtcagataaaagttgttaatcattatttgattaacttgcttaggtgccaagttggtgggaaacttggcaattcgtatcttgttttacctattgctgagtttgcttataataactcggttaatcggtccacaacaaaaagtcattttgaagttgttaatggttttttgcctcgtcaacccattgattttgttcctttgccaattgattactatccttctgattctacttaggaccatatttgtgacttacatgttgagatataatgaaaaattgcctttagtgaagattataaatttgctattgatgcacatcataggtataaatagtttagtggttatgctatggtttcatttgtcctaagcgttacctaaaaattccattaagaaacttcttgtccactgacttggcccattccctatcattcaattacttggatctaatgtatatttacttgatttgccatcacacagaattgtaagtccaattttcggtgtggcaaatttatttccatattgaggcacattcaagcctcgagttttaccttcttctgtttctgtagagccttcctccaatttggtgcttcttgctcctttgttttattggtgctaactaatgtgattgtggatttattagtggattggtgtgttcatagtcttgaaaggtgcacttagacccgaggcacaaccactcccttgttatcatgggtcacttgccaaggtatgcaccttgtttgagagacgcgccttgtctactttattttactttttaaatacttttattcttgaaatttctaactatatattggaatttatataatttcattaattttttattgaatgcttcttttaaatattaaatcttaagtattttattgattggattagattttggatcatatttagaaaattgatatgcatcctaggtcacgtttcacttcacttaggcgcgcaccttgtgttgtgccttgcacctaagctgtaggaaactttggcaccttaggtgtgccttgctctttttaaaactataagggtgtgttactttcccatctagtggtggtcaacacttcctcattcaatggaaaggtcctcctattaatcatacttgaattactaatgaggagttttgtcgattggatcttgatcttttagatcaatgtttgcaaatacaatttaccagaatcaagttattttcaaatgagagaaaatgatagagataaagatgttaaattacacacttagattagatgcaaatatgggaagtgatgatattttttttttatttaatatttgttttagggttagtattattagtgataaagttttgttggaggtaggattattaaaattagtttcctactagagttatgattgtccatctatcatgggcccagtgatgttaaaaactggaaactttttaacaataatatttataattacttagaatcctctcttctacttctctctctcttctctacattcgtttctttctactgtcctacatgaatattatttggaaacttcaaagtgcatgaaatactcatgtcaaacatgatgcaaggtttgcatggatttgttcaatgcctattattcctcttatctggtggatgcttgctgggcatgcccaactcattaaaagaaacaaattcttaattctcaaatgttccctatgattatttttttcttggttttttttttttttttggttacatggttagttgaaaatgagtggagtgccatgttgaacacaaatataaacccttgtgaatatggggccaaagtggggcttctttccttttcgagtatgataggtggactgcacatgctatcgtgtgtgcacttgatggattcattggagaagcatgtaatagcaactacatgtgtcttgctaagtgggccctctccatcctaattaggcagaaacaagatcaacgatatttggcttaattttgccttggtggacctccaattgtagcttctaaaccgaaaccattgaaccatcctgtattcttgatgacgggggagggtaagtccatcaccaatgtgcaccaagctcatttgggcttccctagcactactcttgatttgggttggcatgatgcatctgggtggcatgcctctgagaattcagtgaaagtggagaagctctcttgatacaatgatagcttgactgggcaaaccccttttggaggggtgtgtgttgaaattctgccatattaattttttttatctttccttatatgtattttgtctttaattgtaatgatccagaaaacatgtaggctgttgttgacactagaattatgcatagattggatatgtaatatcctggaatagattaagagctgtatatatgtcattgaccctagaattatggatagatagaatttgtagtttcctagaacatactaacagctgtgtatatatcctaatgtaatctcaattgttcagcatcaatgaaatcagtttttatcactgtgtagaaccaaccattagaaatatcctcttgatggagtaagagaaaggtagagaagccatcaattgaaggtgggaaagtgagttctcattgctcaccttagcatgttgatgtatcccacccttcatttatagcacaatatgaatgctctctcatgaattgagttggagataacatgtattctctatgttgtcaaactagcaattgtagaaaaactgatagtaggcactgttattggtagtgaggtgcataggtttgtgttaagagagagagagaagaaaaccttgattctcattcatatagtatctacttacaattgagaaaatatatatatacaaggttaggagtcctaactaccatacatgtgacctatattaaaaaaaaggaaagattgtacactataaatttattatattcaacactccccctcaagctggagcatatacgtcatatccaccgagcttgttacaaatgtatttaatcttaggacctatgaaagatttagtgaagatgtctactagttgatcatttgaattaacaaaacttgtaacaacacatcctgatgcgatcttctctctaatgaagtgacaatcaacttcaatatgtttggtcatttcatgaaagactggattggatgcaatatgtaatgcggcctggttatcacagatgagtttcatctattcattctttccaaatctcaactctcgaagaagatgtctcaaccatatgagttcacatgttgccaaagccatagttcgatactcagcttcagcactagatctgaccactacatcttgtttcttactcttccaagatattagattacctccaataaaaacacagtaccctgaagtggaacgtctatctgtgggtgagccagcctaatctgcatctgtgtaaccaacaacctgagtatgacctctgttctcgtacaacacaccttggcctggtgtacttttgatatatcgaagaatgcggattacgacatcccaatggctatcacatggtgactgtaggaattgactaacaacactcacaggaaaagaaatgtctggacgagtaatggtgagatagttcaatttacttacgagctgtcgatatctcccagggtctcctaaaggctccccctgtcctggtacaagtttgacattcggatccataggtgtgtctatcggtttacagtctaacataccagtttcttccaggatgtctaaagcatacttcctttgggaaaggaccacaccggaactggattgagctatctcaattcccaagaaatacttgagtttccccaagtctttggtctgaaagtgggtaaaaagatgttgctttagtttttgaataccatcctgatcactgcctgtactgacgatgtcgtccacataaacaaccagataaatacactatcccaaggagttatgatgatagaaaattgaatggtctgctgtactgcgaagcatgccaaactcttgaacaacagaactaaaacgaccaaatcatactcgaggagattgtttcaagccatgtagagaacaacataacctgcacactaaaccagactccccctgagcaataaaaccaggaggttgctccatataaacttccttggcaagatcaccatgaaggaagacatttttaatatccaactgataaagaggccaagaacacatagcatccatggagagaagcaagcggacagaagcaatcttggcaacaggggagaatgtgttaccataatcagaaccataaacctgagtataacctttagcaactaagcgggccttaaggcgatcaacttgaccatcaggaccaaccttaactgcatagacccaacgatagccaactgtagatttaccagagggtaaaacaacaagatcctaagtgccattagagtgcagagcagccatttcatccaccattgcctgtcgccagcctggatgggaaagagcttcatgggtgctctttggaagagaaatagaggatatagcagaaacaaaagcagaatagggtgaagataatcgatgataactcaaaaaattgtaaataggatgaggattacgagtagagcgagtacctttctgaatagcaatgggtaaatcatcaggagaaggcagagccggggcaggagaagccgaagggataggaagtgagtcagcaagttcctcagcaaaagggagaggagcagcgacacgagggcgacgatgataaacctgaagtggtcgaggaggcacaacatcagatggggagacaatgggaaggggcaagacttcagaaacaggaagagactcagaagtggtggaaaagaatggtgaatcctcaaagaaagtgacatcagcggagataaagtatcgataagtctcaagggaataacaacgataacccttctgaagtctggaatatcctaagaagaggcacttcatggctttggtggcaaacttgtcctgtccaagagtgagaatatgaacaaagcaagtacaaccaaagacacgaggaggaaggaaataaagtggttggtcagggaaaagaaggaaatgaggaatctgatcatgtaaaacagaggagggcatacgattaatcaaataacaagcgctaagaacaacgtccccccaaaaacgaaaaggaacattactatggaggaggatagtacgagctgtctcaacaagatgtcgattcttgcgttcagctaccccattttgttgaggagtatgagcacaagaagaccgatgaagaatcccatgatgagacataaatgaagtaaatggggctgaaaaatattccctggcattatcactgcgtaacacacgaatagaaatattgaactgggtttggattttagtataaaatttctggaaaatagagaataactcagctcgatttttcattaaaaataacaaagtacatcgagaatagtcatcaatgaaagtgacaaaatactgaaatcctaaagtagacgcagtccgacaaggaccccaaacatcagtgtggacaagctcaaaaagagactttgcccgattattcaaacgctttgggaacgagacacgagtatgtttcccaagctgacatgattcacacgaaagcgacgacaaagtggaaaaacgagggaccattgattgctgtgttgcttgacttcccagccggatcttttaatcaaaaacatttataaaacctatgaccttatactggcgtagcaaagctactataatatagtggttctagggtcgaactcagggatgggttttcactctaccaatgatagactctaaattagaaattgattctgatgatttcctttagcacaaacttgaaatttaaaagaaaataaaattgttttgaaagtggtaatttaaactaaactcacatagaactaagtaaaaaggtagaagaaagaaagtctcccagagctaaaggttgctaggtttaagttccagatgcaaagtggaaaattccggatttttctcctcgcattggggatttaacctatagttatttcccgaaccggtataggtttgacaatgaagttttaatccataaaaagtcactagagatggtagtcaaggtccattaatggcttaagacactatgggctatcaccttgaatcactttccaatggctcgtacatgataactaatggactgatatggatctagcaataagcatccacagagaccttaagcttaccatgtattggccagtcaaagtgatcctaagggatttaaggcaaaaccttggctttaaaagccatttatggactccaaccacctgaattcaatgcacggaaactttccaccttttaatctggacttttcacctagcttccttcactccaagaaactaaatgtttagcctctcatcctctgggaaaacatcctcagagggtgtttggcttgcaagaaaatagaaaatagaagagaaaagaaagtaaaagagatctctgtatttcactaagtaacaaatttacaatagttggtctcctggagaaagctccccgaaagatatattttcagtgattacaagagaatttatataggaaggtagttttacccttccttggatacttcctagctaaggaattacatggttggttgaatacaaggagaaaatggaactttaaacacaaaaatatcagaagaaaaagagtcggcaaaaatatccaattttcgcatgctgagttccaatttcgcatgttggtttgaggtgtgcgaaattctcgcacagtggactgaggatttcgcaccttaaacagtggtgtgcgaaattgtccctcagcttgatgctgttgtcttccgaagtccataacttcctcatttcagctccaaatcatacgtggtttgaaccattggattcttgactttctgagcttcgaaatggtatatagaatgtaaagaatggactttgggaagtgctccaaaagtgcactaaaagactgcagctgtgtcccctgttttcatcccctgttttcttcttctccattgtttctcccttgtaaactttgaacgattaaggcaaaggattatgaggctccatagcttgatttcttcataaatttaagctttcaaaagctttgccctgaactacaaatagctctctttcattcttaaattgctttggtgagcataaagctatcaaaaagcaccaaaacttaacacaattgttagaaacgattgcaagggctcctaacatgctaattgggttaaaaggtaataattactactcaatggtgtttaaaagagctaattacaagctacaaaatagcatgttttgagtagtaatcaaccatcttctggaacttggagagactagggtgacccaaacgactgtgaatgaggagaggagcatcaatggaaatgcaaactgcaggagatgaatccgaggtgaggtgatagaggccttgagacttacgtcctatgccaatcgtcttccccgtactccggtcctgcaaggtcacaaatttattagaaaaggtaatagagcaattaagagtacgagtgattttgttgatggaaataagattaaaaggacattcaggagtataaagaacagaagtgagaggtagagaaggcagagggagggccaaaccaatacctttagctacagtttgagaaccattagctaaggtaacagtaggtaaagcagagatagtagtaatagaggagaaaagatccttattaccagataggtgatcagatgctccagaatctagaatccagggtccaagagaagatgtgtgggtaaggcaggcagaagcattaccaggctgggcaacagaggcaacagaagcctgagatgcctgagatgcggaggagctcggaggctgaggcagctgagaatcagaggactgggccacatgggtagtgcgaggaggccgtccatgtaactgatagcaacgatcgcgagtgtggccaagtttattgctgttgagagagagagagagagagagagagaggagaaaaaccttattcttattcattgtaatctctacttacaattgagagatatatatatacaaggctaggagtcctaactaccatacatgtgacctatattaacaaggaaagatagtatactatacatacattatatttaacactccccctcaagctggagcatatacgtcatatgcaccaagcttgttacaaatatatttaatcctaggacctctgagagatttagtgaagatgtctgctagttgatcatttgaattgacaaaacttgtagcaacacatcctgatgcgatcttctctctaatgaaatgacaatcaacttcaatatgcttggtcctttcatgaaagactggattggatgcaatatgtaatgcggcctggttatcacagatgagtttcatctgttcatcctttccaaatctcaactcctgaagaagatgtctcaaccatatgagttcacatgttgccaaagccatagctcgatactcggcttcagcgctagatctgaccactacatcttgtttcttactctttcaagatattagattacctccaataaaaacacagtaccctgaagtggaacgtctatctgtgggtgagccagcccaatctgcatctgtgtaaccaacaacttgagtatgacctctgttctcgtacaatacaccttggcctggtgtacttttgatatatcgaaggatacggattacggcatcccaatggctatcacatggtgactgtaggaattgactaacaacactcacaggaaaagaaatgtctggacgagtaatggtgagatagttcaatttacctacgagccgtcgatatctcccggggtctcctaaaggctccccctgtcctggtacaagtttgacattcggatccataggtgtgtctaccggtttacagtctaacataccggtttcttccaggatgtctaaagcatacttcctttgggaaaggaccacaccggaactggattgagctatctcaattcccaagaaatacttgagtttccccaagtctttggtctgaaagtgggtaaaaagatgttgctttagtttttgaataccatcctgatcactgcctgtaatgacgatgtcgtccacataaacaaccagataaatacactgccccaaggagttatgatgataaaaaactgaatggtctgctgtactgcgaagcatgccaaactcttgaacaacaaaactaaaacggctaaaccatgctcgaggagattgtttcaagccatatagagaacgacgtaacctgcacactaaaccagactccccctgagcaacaaaaccaggaggttgctccatataaacttcctcggcaagatcaccatgaaggaagacatttttaatatccaactgataaagaggccaagaacacatagcaaccatggagagaagcaagcggacagaagcaatcttggcaacaggggagaatgtgtcaccataatcagaaccataaacttgagtatagcctttagcaactaaacgggccttaaggcgatcaacctgaccatcaggaccaaccttaactgcatagacccaacgacaaccaactgtagatttaccagagggtaaaacaacaagatcccaagtgccattagagtgcagagcagccatttcatccaccattgcctgtcgccagcctggatgggaaagagcttcatgggtgctctttggaagagaaacagaggatatagcagaaacaaaagcagaatagggtgaagataatcgatgataactcaaaaaattgtaaataggatgaggattacgagtagagcgagtacttttccgaacagcaataggtaagtcattaggagaaggcagagccggggcaggtgaagctgaagggataggaagtgagtcagcaggtgcctcaggaaaagggagaggagcaacgacacgagggcgacgatgataaacctgaagtggtcgagggggcatagcatcaggtggggagacaatgggaatgggcaagacttcagaaacaggaagagactcagaagtggtggaaaagaatggtgagtcctcaaagaaggtgacattagcggagataaagtaccgatgagtctcaagggaataacaacgataacccttctgaagtctggaatatcccaagaagaggcacttcatggctttggcggaaagcttgtcctgtccaggagtgagaatatgaacaaagcaagtacaaccaaagacacgaggaggaaggaaataaagtggttggtcagggaaaagaagggagtgaagaatctgatcgtgtaagacagaggagggcatacgattaatcaaataacaagcggtaagaacagcgtccccccaaaagcgaaaaggaacatgactatggaggaggagagtacgagctgtctcaacaagatgtcgattcttgcgttcagctaccccattttgttgaggagtatgagcacaagaagactgatgaagaatcccatgatgagacataaacgaagtaaattgggctgaaaaatattccctggcattgtcactgcgtaacacacgaatagaaatattgaactgggtttggatttcagtataaaatttctggaaaatagagaataactcagctcgatttttcattaaaaataaccaagtacatcgagaatagtcatcaatgaaagtgacaaaatactgaaatcctaaagtagacgcagtccgacaaggaccccaaacatcagtgtggacaagctcaaaaggagactttgcccgattattcaaacgctttgggaacgagacacgagtatgtttcccaagctgacatgactcacacggaagcgacgacaaagttgaaaaacgaggaaccatcttctggaacttggagagactagggtggcccagacgattgtgaatgaggagaggagcatcagtggaaatgcaaactgcaggagatgaatctgaggtgaggtgatagaggccttgagactcacgtcctatgccaatcgtcttccccgtactccggtcctgcaaggtcacaaatttatcagaaaaggtaatagaacaattaagagtacgagtgattttgctgatggaaataagattaaaaggacattcaggagtataaaggacagaagtgagaggtagagaaggcagaggaagggccaaaccaatacctttagccacagtttgagaactattagctaaggtaatagtaggtaaatcagaggtagtagtaatagaggagaaaagatccttattaccagataggtgatcagatgctccagaatctagaatccagggtccaagagaagatgtgtgggtaaggcaggcagaggcattaccaggctgggcaacagaggcaatagaagcctgagatgtctgagatgcggaggagctcgaaggctaaggcagcggagaatcagaggactgggccatatgggcagtgcgaggaggtcttccatgtaactgatagcaacgatcgcgagtgtggccaagtttattgcaataggtgtaatgaggacgttggcctctacctcgggtaccactgcgtcctcctcgagaggtagtttgagaaactaacacagaagaatctgaagcgctatcagatggcaaagtctgagtggacgagatacggaggaggcgagcaaacacatcatctaaggacggaactgatgaactaccaagaatctgatcacgaataggctcaagatccggacggaggccaataagagtaaggaccatgaagaacttgtcaagctgtgtttgttgagccccaacatcaggagtaagaggcatcacagtcaagaactgctccttaagagaggcaatctgaccaatataagtagatagatccaagtcctgttggctgagatagacaatagcagaagccaccttataaagacgctgaatatcattcgtgtataatcctttggcctgagtccaaaatttaaaacaagttttataggcctgaagatgaagaagaatccggggatcaaccgattgccataatacactacacaactgtgcatctatcttcctccactgtacgcggtcaacctcagggatatctgcctcctgggtaaccaagtgatcctcatatccttgacccataaaccaaagttcaacagaggcagaccaggagagataattctcactgccaaccaatttctctgaggtaatcagaggagatctagagagaacagacgtaaagatctgatttttggtggtcatattcacgtatttggatcgaagagagccctaagatgggttcagatttcggcggagagagaaaaacagtgaaaccacggctgtgagaggtgcaatcaatggagaaaaaaaggtcgtgacgtgcctggagaggaagagaagcaacacccaagcctcggggatggagggggagccctgtcggaggtggccggaatggcaagaaagccaaaaacagggaaaaaatggagatgcagggctcggggaggactgccggagggctagaaggccaagacggcgccggacgagcctggagaggtgtcagaagtggccggaaagtgagccacgcgccgtcacgcgccggcgcgtgggtgatagtccggaggagaagggcggcgcgtgggggtgcgtgagatgccggttgccggtggggtttccactggcgtgtagatcagcctccggcggttcggaatatgtggtctttgcccggaaaaaaggtcgccggaaaatttcgccggaaaaggttgccggcgtggtggagatccgacgacgatgaggttgtccggggtggttcggaaagagagtgaggggaccggagtgaaaacatggtcactggacggttcgccgaaattgagtacacggctaaaccgaaaaattaggttttctcctttggctctgataccatgttgagagagagagagagagagagaggagaaaaaccttattctcattcattgtaatctttacttacaattgagagatatatatatatacaaggctaggagtcctaactaccatacatgtgacctatattaacaaggaaagatagtatactatacatacattatattcaacaattgcaataggtgcaatgaggacgttggcctctaccttggttaccactgcgtcctcctcgagaggtagtgtgagaaactaacacagaagaatctgaaatgctatcagatggcaaagtctgagtggacgagatacgaaggaggcgagcaaacacatcatccaaggacggaactgatgaactactaagaatttgatcgcgtacaggctcaagatccggacggaggccaataagagtaaggaccatgaagaacttatcaagctgtgtttgttgagccccaacatcaggagtaagaggcatcacagtcaaaaactcctccttaagagaggcaatctggccaatataagtagatagatccaagtcctgttggctgatatggataatagcagaagccaccttataaagacgctggatatcattcgtgtataatcctttggcctgagtccaaaatttaaaacaagttttgtaggcccgaagatgaagaaggatattgggatcaactgattgccataatacactacataactgggcatctagctttctccactgtacgcgctcaacctcagggatatctgcctcctgtgtaactaagtgatcctcatatccttgtcccataaaccaaagttcaacagaggcagaccaagaaagataattttcactgccaactaatttctctgaagtaatcataggagatccagatatgacagaggaaaaaatggaagttttagtagccatatccacttatctggagaatgaagtatatttggatcgaagagagccttaatacggcttcatatgctgctgaagaaggaaaaactgaagaatcgcccgtgtaagagaccaaatagaaaagaaaaacaaccgtggcaccaccggaaaggtagaagaacacttcccaaggcacgtgcagggattggggttgagaaaaaatagccggaggacgccggaaaaactgttcggagggccgacggaggcaaaagaaccccaaaagaggcacgtgcagggctcggatggcagaaacaggtatgaagggtggctagtcggcgtcgggcgaggctggaggaggaagcgtgtcgccggaaagtggctcacgcgccctcatgtgctggcgcgtgagatgcagtcgccggtcggaaaaatgcacgtggccgacgcatgggtggttttctggcttcggtgctttgggaaaaattggagatctcttctaggcgctccttgcagtgttggaaaaagacgtcgccggaaatgtcgtcggcggtgaatgttttctgacaacgattcgaccgatcggaaagctttggggtctggggaaggtgactggaatgaaacacggtcacaggaaggtttcccggaattgatgacacggggaaattggaaagaattaggttttctcccttggctctgataccatgttaagagagagagagaagaaaaccttgattctcattgatatagtatctacttacaattgagaaaatatatatatacaaggctaggagtcctaacaaccatacatgtgacctatattaaaaaaaaggaaagattgtacactataaattcattatattcaacagtttgcaatttgtagcggtgctactaatgatgtgacctcctcatttaacttttttttttttgataatcgaggaaccttccatggccaagcccttaggactctccatggggacccaaacctcggggtgctgaacgagcccgtaaaaatcagcaccgggtaaattagggtatcatcagttgcaggattcgaacctgagaccatgtgcctcttattgggaccacgcctcccagcattcaccctgatcacgtggtgcataatcttgtgtgtatatacatatttgtgtgtatgtgtgaatgcgaaattcaagtatctacattattgaattattaaaaatgacacttttggaaaagcataatcagtacttgttgctaggaaataacttgatggacattatttcaggagattcaacttgtatttgttctataatcatctttcctttcacccccctcctctctctctctctctgcacaggtacctatattagggcttattaggtctttacattgtaatgtacaatgagtggtgagaaccaaggattattaacacgaattgcatgctggcaaaaatgttactgttctacaaggatatttcttaatatacatgtttttgttttatgaaggccgactttggattc

SEQ ID NO: 10681 - DNA, 10033 bp, Vitis vinifera
  Intron number 1 from transcript GSVIVT01036681001 (locus G SVIVG01036681001) derived from phytozome v7.0 (chr-ID chr1 9; pos 23987538 to 23997570)
ggcaggtaatggttgacttttccatagaagataattactgactcaatcaagactttgatttggtatcatctagagctagatgaggagagaataaagataaaatgttatgaagttgattgataatggaacacatattaatcttgtatagttagtaaagctagtttgtgggcaaaattttgccacaacccaaatgccaagtattaatatcactgggaaaattctacggtgcctctggaggtatcatgcctccattttatttgagtcattagatggaaaagatttcatctcagacatccaaatgataagttaaaaaaaaaaacaaatcccggctgaaattgagtacctattttttttctccttttctcgtatttcctcctatttttcctctcttttccatacccatcccccactcatctccacatctttgtgttttttggttgatccgtgtattttagctcttctccgggtacttgtgtttttctctcttctccatatatgatctgtgcatttcgactattttcagaagactaaaaagtgttatgtttctcttactcatctccatatctctgtgctttttaagcttccactcttatccatatatgatccgtgcatttcaggtgttttcggaagattaaaaagtgttgtcttttcaaatatttttgttattttcgggtgttttcagttgtgtttgtgtgttgttggatgttttcatgtgttgttgggtgtttttaggtaagatattctagttgtttcggatactaaattcttgatgtaggagtggcatctttccgacttctctctcttctccgtatccccctctgttgtccatatttcattttcatatttagggtgttttcgggttttcaagtaaatagtgtaatattcccgctcccctcttcctctccatatccttgattttcttcatatttcatatttggtttaagagttataagggggtgtttttaggttctaaacttttggtttggagacctgaattgaagacatagctagaagaagaagaagacgacatgaagtatgaagaaaaagaaatctgaaaggacacaattttttgttaatcaaaatacggttgtgtcgtaattatttgaggagttctatattaagaaaaaaaatgtgagtattgataatgtgttttacaagattgtattgattatatttcatgttttttgttagatttatggattgatcattgattcgtccccattgcaatcgtgccatttgattctggctcagacgggtgttatcaacaaaatttataaaacctaaatcacctcacactagggtagcataactaacatagtatagtggctctaggatcatcaacatggatgggttttcatcgtaaagttgaatttaatgaaggaaataaagtggtgcttttccttatgaaaattagcttttaaagaaaatggaattgtggttgcaaagattgattttaagttaagcaaaaataataagtgaagttaactacaaagaaaaggtttctaggagttttaggtcactaggattaggttccttagacaaaggggaagatttcggatcttctcctcgcgttggggacaataacataaaggatggttatctctcaaactggttttatatttagcaattaagaattgatccaaagggttcatggaaaatgatagttgcttcccattaatggcttcaaacactaaagactctcaccttgtatcaccttccaatggctcataaatgataagtaatagacatccatggatctagcaataagcatccatagaatccgaaaagcttaccaagtattggccattcaaggtgcttttaaggactctaaagctataccttaaaataaaaaccattaatggttaacaactattttcatttaaagcaaggacaactcccatgattactactcaaaaagtgatattttatagcttgtaattaactcttttaaacacttttgagtagtagttattaccttttaacccaattaacatattaagaacctttgcaatcatttctaatcaaagtgtgtaagttttggtgtttttgttagtaatttgatcaccaaagcaatctaagattgaggagagttctttggaatccatggcaaagcaatggaaagctcagaaacatgaagaaccgaagctttaaagtcctttgccataagcaaatccggaatgcaaggaggggaagcaaagagaaatctaccatgaagcattctagatgacagtcactatcagccacttttggagtacttcctggagctcaatttatgcatgctatatgttgtttcgaagctcgagaagtcagcaatccaatgcttcaaatggtgcactattcagagttgaaatgaaggagttacagccattagaatccgatcactccaagctgaaggcaaatttcgcacggctgcgaagtcagccttgggctgcgaaaatggtgtccttttgctgcaaaatttcgcagccctcttacagtggaatttctcctgaagcttcccgatatttgcgactgacattttgagattttttgctttagatatttgatgtctaaatccccaaactctccttgtaacccacctatcataggattccttagtctttaagtaagaacaaagggtgaataacctcttatatatagtttgtaattttctttacacaaaaatcaataatctcgggagcttgttctcagagacaaccttttgtataagtaagaaatatatctacagagcacttgctctgcttttcatatatatttttgttttctcgttatttttctttctagccaatcaaactctaaggatgttttctcagaggatgagaggataggctctttgtctcttggagtgaagaaaatcgggtaagtttccgaatgcaaaattggaagttttgttgttttagtttttaatgaagagaaagtgtgacccattaatggtttttatctttttagttaacttaaaacacctttaaatcacctgggccaacacttggtaaggcaagtgatctccgtccattgagatgcactggtttacctcttgcgagcctttgggaggtggtttaaaggtaggattttctagactagccaacacttagtaagcttttggactccaaggagacatccattagttatctcttgtgagcttttgacgggtaatccaaagttaaggatcaccttggatggcaaatgctaggtgagaggcatgagccattgcaaggtgcattagtgagagggaattagtgtttgaacccattaaagggaagcatctgtaccacaccggttagagaattagctatatgttaattctctaatgcaaggaaaagaaacaagtgaccggaactccctttttctataaggaacctgagcctagtgatctgaaactccaagaaacacttttctttgtaattaaaattagttactatttttggttagcttaaaaccaatcctttttcaaccaaagattatgttttcttttaaaactaaccttgaaatgaaaaagcaccaattcagctttgaattaatatcaattgtgaagtgaaaacccatcccagtgaacgaccctagagccactatgctatgctaactaaggctatcctagtacatggtgtaataggttataagttttgttgattactctcgtttgaggactgaaatcaagacaccagctggacacgaatcaaatggcaccactgtcagggaccattgagaggacatgaatcagctgagacaccaattgggaacgtctcattccacctttgcattcgggtccttcacctagcttccttcactccaagaaacgtaaaacctagccactcatcccttgagaaatcatcctcagaggttgtttggctagaaagaagagtgaaaacaaaatgagaaggaaaagcatagcaaaaggtctgtatatttcttactacggggaatttttcagtgtttaatgaaaaacaacatatatctcttcctctatctctctccttatatatgatgttatctctcaaaatatacaaaaaaatataaaagaaaatatctaggttggttacaaggagaaactaggaaattacacaaaatatctgaagataaaaatctaacagagtcggtgcataagaagatttcgcatggtgtgcgaaatccttttgttgcctcaagtggtttcgcatggtgtgtgaaatttcgcacaaccatgcgaaaatgctggttgttagatttcttcctctggttttcttccttgcatatctttgattggcttggcaaaaggctatgaagtgctacaaagcttggattcttcatatatttgagcttcaacttacattgccatggatttcacaaaattctccctcattcttggcttgtttcaatgatcaaatagctaccaaaaacaccaaaacttgccaaaaattgattagtaacccttgctaggttccttaacgtgccaattgagttaaaaggtattaactactactcaaaagtatttaaaacagttagtttcaagccataaagagtactttttgagtagtaatcaatcacattaatgaaaaataatgtggttaggtccataattgaacattgaaaataatttatatgctaatttggtcaccattgaaaatgtagagagatttagggagaattttggagtggtaatgatatttgtattttatttttcatttgattgattgtagtaagatatgaatataaaatttattgaaatgtgaaaaaaaaaacttattttgagataatgtgatggtggaagtatatttgatttattatgtctgaaatcatactataaaaattgacttaaatgatttgatttaatttttaggagcaagtgcaatggtgttgaagttgttagaaatccaaagagacctatcggagcttggatacatcactagtaaggtaaaatagaaatatgtaaaagaatatgtttttttttttttttgtgtggttgttatagttatatttgtttgaaattgttttatagtaatgatcaattggtcataatcaaagagaaggataaaggagtaaagataaatgatgatgtaaggaataatactattgtggctaatataattaaattttaaaatttgaatttgaagtaagtgacaaattgatgtagttgaggaaaaaattgagcaagaagtggaatgcattttcaaaagtagaaaaagaagatttcatggaaaagtcaaaagaaagttcaaaacaatattcgcttcaaaagggtgtgggtccaaaggtaaattttttgtaatgaataaaaaatttcattacttacgtatttgttgcaaattatattaatgtaaacatgtttgatgtttgtgtatcttttcggttatagcttcagacttgatgctcacccaaatgagtgattagagttattggagaattagaaccaaagcaaataacagccatagaagaaataggatttggtaacctcttgcaactttgatataggaaaattgatcatgggttatgtctttggttgataaatagtttcaatctgaacacttatatattatagttgtataatacttgtatcaaattatcctcgattgattttgaatttattatgggattgagggtaagagggttgacgattgacatgaacaaagatgttaacaataagaatgatttatgtgaaaaatattttgataaaaaggggcaatttccattagtgatgttagaaaatcaaattagagatgataaattttgttttatattatttgtgttgagtgcattattgtgcccaacaatgaagctttttgtgaaacgttctttcttaaatcttgtggaagacatcgattcaataaagaagatgaattgggctgaatttgtgttgtcttatcttgtgcacaagattgaagagtttaagagaaaacaacaaagtggggtttctggttgcttattgttttttatggtaatgtctttgtatatagtgaatttcgaatttgttataacaaattttgtgaactaactatatatctatgtaaaatataattgtagtgattactactcaaaaagtgttatttgatagcttgtaattaactcttttaaacacttttgagtagtagttatcaccttttagcccaattaacatattaaggacccttgcaatcaattctaatcaaattgtgttaagttttggtgttttgatagctttttgatcaccaaagaaatccgagattgaggagagttctttagaatccatggcaaagatgtccggacaaggcgtccggacacaccatcggaggacggcggaatgacgtagcaagacttgctcactttagtcaatgatccggacaacatatccggataggatatgttatcgtccgggtgtgatgttcacgagtgccgtgtgcttctccctgagggagtccggataggggagcgcgtcgggtgtcctcttggggaatccggatggagttgctccggatagcgacgcgtggcatagctcattccaccttcttcgaatatctcacagccggatgggagaggaggacgtttcaacttccccggtcagacatgtccggatcctctgatcggatatttcacatccggatatctcacagccggatgggagaggaagacgtttcaacttccccggtcagacatgtccggatcctctgatagtgcttacccgaagagttttctctcagtatacagtgccgcggtgttctcctgaagcttcctgatatttccgaccgactttttgagatattttgctttagatatttgatgtctaaatccccaaactctccttgcaaccctcctatcataggattccttagtctttaagtaagaacaaagggtgaataacctcatatatatatagtttgtaattttctttacaaaaatatagaatatagagtcgggagcttgttctcagatgcatcttttgtataattttgcaagaaatatattttacagagcacttgctctatttttcctttatatttttgttttctcattctttttcttactagccaaacaagctctgaggaagtttcctcagagaatgagtggccaaacttttagttccttagagctaaggttgccaggaaaggttccaagtgcaagaattagtagctttgtgatttcagccattaatgaagagaaagtgtgacccgctaatggtttttatctttttagttaacttaaaacgcctttaaatcacctgggccaacacttgataaggcaagtgatctccgttcattgagatgcactagtttatctcttgagagcctttaggaggtggtttgaaggtaggattttctagaatagccaacgcttggtaagcttttggactctaaggagacatccattagttatctcttgcgagcttttgatgggtaatccaaggttaaagatcaccttgaatggaaaatgctaggtgagaagcatgagccattgcaaggtgcatcagtgagagggatttagtgtttgaacccattaatgggaagcatctgtacagcaccggttagagaatcaactatatgttaattctctaatgcgaggaaatgaaccaaatgaccggagctctgtttttgcataagaaaccttccctgtgaacccaaacctccaaggaatgtttttcttcataagtaatttccattactttatttttagttagctttaaacaaaacctcatttaaacaaagtttgtgttttatttcttaagctaaccttgaaatgaaaaggcaccaatttaactttgaattggtatcagttgtgagttgaaaacccttcccagtgaatgatcctaaagccattatgctatattagctaaagctatcctaatgcatggtgatataggttataaattttgttgatcactccctcagtcaaggagcaccagctggacatgaatcagctgagacaccaattgggaacgaatcaaatggcgccgtttccggggaaggtgccaacttcatagtgatattatttcagggtacttgtggttttcatcacaagtttggtgagtcttctctcattttaccaactcttttagttgtttcttttactcgtttatattctagcatagcttttaatttagttttagttaatcgaactcttttttggtagttttgtctttgttttcctctatttttgttttttttttcttttattacagttgatactagttgtgtatgccaaagtggatacgagatagtggaggaatgcatgttaaacttgaaacacctcataacaaggagttggaattgagcttgaacatcatggaaactacccctgaggatcatcatagtcaccatggtcatcaggacaatcccaatgaattcagatcaatgagggaccgcatgcatccacctcatatgagtacaccatcatgtatagtgccccttacagagcagctagtgatcagaccccatattgtgccacttctgccaactttccatggaatggaaagtgataatccttatgcccatatcaaggaatttgaagacgtttgtaatacattccgagagggaggagcttctatcgacctgataaggcttaaattatttccttttactttaaaggatgagaccaagatttggcttaattctttaaggccaaggagtatccgtacttggactgatttacaagttgaattcctcaagaagttttttcctactcacagaacaaatagcttgaaaaggcaaatttcaaacttctcagctaaagagaatgagaaattctatgagtgttgggaaagatacatggaagccattaatgcttgccctcaccatgtctttgatacatggctgttggtgagttatttctatgatgggatgtcttcctcaatgaagcaactcctcgaaacattgtgtggaggggatttcatgagtaagaatcctgaggaagctatggatttcttgagttatgtagctgaagtctcaaggggatgggatgaaccgcacagaggagaagtgggaaagatgaagtctcaaccaaatgctcttcatgctaaggctgggatgtacaccttgaatgaagatgttgaaatgaaagcaaaatttgcagctatgacaagaagagtggaagagctagaactaaaaaaaatgcatgaagtgcaagctattgctgaaacaccagtgcaagtaaagtcatgttcgatttgtcaatcttatgaacacttggtggaggagtgccctacaattccagtagctagagaaatgtttggagaataagcaaatgtcattggacaatttaagcccaataacaatgcttcgtatggcaatacttacaactcaagttggaggaatcatccaaatttttcatggaagccaagagcacctcagtaccaacagccggctcaaccatctcaaccatcccaacaagcttcaagtcttgaacaagcaatagtgaatctcagcaaggttgtgggagactttgttggagaccaaaaatccatcaactctcaactcagtcaaagaattgacagtgtagagaatactttgaataaaaggatggatgggatgcaaaatgacttatctcataagatagataatctccaatactcaatctcaaggctcactaatttgaacacagtgcaagagaagggtagatttccttctcaacctcaccaaaaccctaagggtatccacgaagtggaaactcatgagggagaatcttcacaggtgagagatgttaaagccttgatcactctaaggagtgctaaaaaggttaagtcaccaacacccaagccatatgttgaagagaaggaagaagaagagacaaagaagatttgtttttgtttttagtgatttaaaataggatatgtgtgatatattgatgaacatattgtaggtgaaaatatgggtgatacaaaatgagataagggattgcgttgacgaaaaataagatgacaatagagggggagaatgaggaggatgagaaatttgaaatccatccaaacaaagatgttattaaaagagtaagttttacaatattcatcgtgagtataaatattagtagtgaacccttgtattatgattttattaatcaagttcctatatatcactaggttgatggtgggagctta

SEQ ID NO: 10682 - DNA, 5144 bp, Vitis vinifera
  Intron number 10 from transcript GSVIVT01009244001 (locus GSVIVG01009244001) derived from phytozome v7.0 (chr-ID chr 18; pos 6605455 to 6610598)
ttaataggcaagcttgcttgaatattgctttgaaggtaatttggtattttcttacaagattaaaatccacttacagatcccttgtattatgttttcattcatgctccttatttaacacatggaacactatttggaggctgataatttctggaagaagtatgatgcaatcacttgtcagaagaagcaatgttaggcttgatatgtaactaggtttcttgtgtcattgtgttaattaataacatgggttaaaaatggcatatgaaaattttacaaatcaaactgaaaagagaggaggtgttggagaagtagtggggaacttgtttctgactgtccatgccattaaggattttatgttgggctgtgagagggccaatgacaaaggagaaacaaaggatgtttttttctatattttatattttatatttttttcattttattggggctcttattagatatcatagggccaatcttatgtgtctgtaagaaacaaagcttcaacaattgaattctaaaattggtgagaagtttgggtatggttggatttctagattagggagctgtggagccagaggattagcaggatgtatttttgttttctgagacaatagggtgctcaacctggtttacatggaagttggtgttttctctatttcttgtcagtttaggaattgtgaagacggtttcacttggatttttcaggtgtgtacggtcctattcaagtggtggacagggaaatttttttggataagttgggagctataagagggctttgggatgatccctagtgtttaggaggtgactttaactctgtcaggttttgggggaaagaataaactgcctgagataatcttcagatatgagacgcttctcagagatcattgaagaggtgaatgtgcaggatctccccctggttggtgagtctttcaccttgtgtggtggttagatttagggaaggatttctcatccttctcaattttaccatcctagtgaaacatttttgtttttgatatatatatataatctaaccagtctttgtcgagacttgactgctttttggtcttagaggattaggaatggtttgaggagtggtaagacccctttcagatttgagaatatttgattgaaaattaaaggtttaaaggatctcatggggagttgtggttgggttataattttacaggctcttacagtcatatttgagctggtcttttatgtggtttgaggcaatgtctaatttgaaaattacgtatcaaaaaaaaaatgtctaatttgaaaatcaatttggagaaaagtgcgttaattccagttggaggtgttgatgatgtagaggccttggttgttactatgggatgtaaggtggagcatcttccctctacatatctaggttttcctttaggagtccctttcaaagcaatgtgggatggtttggaagaaaaatttcagtaaaggcttgccatgtgaaaaagatagtatctttccaaatgaaagaaacttaccctaattaaaagcatggtttaaaatatcgctaaatatggatatatcggtacttgaattttacagatatattggaaatatcggagaaatatcgatggatattttgataaaaatatcgataagacaaaaattattcaaaattcatgaaaatacttggagaaactaaaaaaattgataaaataaataaatttaaagttattttttaaatgtaattgacataggtatgattaaagagaaaaatattggtaagcaaagatatatcggtattaataatttattatttatctaatgaaattaattttaatttataaaatattagatcttcattattattttttaatattttatattaatgaataaatttatatttttaatattttaaaataaaaacattcaaaattaaataaaattaaaaggataaatataaaaaatttaaaagttaagtgatagtaattttttaaaataggattaatgagataaatgatgatacagttaatattaaagctataatttattaaattcaaatgcattcaataatgtaaaataaatgatgatacatatatgactttttaatatttaattatcatataaatgatattaaaaaatatttgttaagaaaattataatgatggtttttatacatttattaattaattaaataaaatttaaaataaaataattaaaatttatttatttattttttaataatgaactttaacaaattttttatcaccatatataaacaaatggaaacctggtccagtggcaactaggcttgaacccaagccttttggcttgggttcgaatctccctgctgtagccaacaaaacaaatttgaaatttcatggagagagggtaggacgcgtgtggagcgtgcgggagggttgtgtcagtcaactgttgactgatcgaaaaaattgggaaacttcccaaaaaataggcaaaatgccgatatattggcaatttcactgatgttttatcaattttctggtgaaaaatcgctagaccgattatcgatggtcgattttgtattggctatcggcgataagcgatttttcaccgatatttcggcgaaaaatgccaattttttaatcactgattaaaagtacattgtcgaggcttcctatctatttcatgtccttgttcataatccctaaaaagttgagcatgagattggagtagatccatgggaatttcctttgggatgtgattgggccactgaaaaagcctcatttggttaattggtccatagtttgcttggataaaaaaatggaggtcttggtattaggaatctctcctcttaacaaggcgctattttgcatgtgatgttggagattcacatatgaaagcaagtccctttggaaagttgttattgcacaaaaattcgaggaagaagaaaaggaatggtcatggggtgggtgtgtggaagggtattagaaatgggtgggagccctttgttagtgctctttattcttggcaatggaagaagggtcaagttatagagacgtagattgtatgatgactcatctttggaaggatcctttctatctctattctctctagccgattataaagattcttgggcagtagaggtgtgggagcaaggaggagaggggacttggtggagcccccgcttgttgaggcatcttcatgattatgaaattgaaggagtaataacctttctaaaaaccctgtaaaattgcttaattgggagtgaggaagaggacaaattggtttggaatgagtccaagagtggtgtgtttttggtgaaatctttctaccattcctagttcaagagagaaaagggcctttcctcactagtatggtttggaatctgtgggtacttgtgaaactgtgtgtctttgtgtgagtgtctttgcatggcatgtaacttcagggagaattttaatgattgaccagcttaaaaggaggggatggaaaatgcctgatcgtcattcatgtgaaaaaatatgaggaagaatcagttgatcatctgttcctccattgctttaaagctaatatcctatgacatttggttttctctctttttggtgttgcttgggtgatgcgttctacagtaagagatcatcttttaattttgcatggattttttgtgagaagaaaaaggggaaaaaagcttggagggctgctcttagatgcttgttttggacatggtggaaggaaagaagaggtctttcaaagatttggaatagtctgataaaagaatcaaaatgaatacttttttaaaatttacctatcaaaaaaaaaaaaaagagtactttttcaactactcacacttcctgattgaatgtcagagtgaaaagagttggtttgcatttttaggctagcctcccaacatcagacatcagaccaaagtttagtcctaccgaccattgttcatacgagagcaagtccagcttggaaacttcccaactctccaaataggtctccataggctttgccatacggaaccctagtaatcaaagtgctaacctctcttgtccctataacacaaaggagacaagaatataaactagaaaacatggaaggattctatgaattagagtaaatctaccattcttagacaaatcttgtctcatccatgaactaattcgcaatcttctcaacctttggactctgtattgctctagattcaaaaggaacatcgtacagtaagtccaaaaagaagatgggaggtagcccaccttgctcccaagcaaagaccctcttgcttgcacctacaaggctaaactacatgagggtccaattccttctgaattcttccagttttgacattgaacattttgacctaacaattggcctcttcattttcaaaaaacagaaccgaacccactacaaaggatgttcatccttggaggaagtcttttatctctcttgccacatagacttgacttccaaaacttcaagttttagctgaaattgcagaagagttctcttccactttcctgaccttctcaaactacctacctctttaaggcctcaaaaaagggcaagagcctccaccctaataagattcctgtaacctttagactttgagaaagccaattttacttctccttaaaggtcctgaaatgcacccccgctcaaagtcaacaaatggtatgtatctttgcttgtatttcagttgtcaatgaattggccgaaaatgaagtttattacttagatgaatactttctttaaattaaaaactatttaatcatctcattcatttagaaggtccccaatccgctgtaatagtctagattatgcaaaaggtcttcaagtcttagctgatatgtggacatattggccccatgtgagcaaacaatagtctgtaagtgaaaaatgatttcttatgtgagttttatatctgttgagaccaacctcatagttttaccaattattatgggttgcattgctaggatcactgcaactgacacctaaaaaatcttgattatatatttgcctttgattttatacataatgttgggaggtccttgaacaaatgatggtaatgttgggtgtgtgtgtgtgaggtgggggaagagcttgcatgtggctacccacacttatttattctgcttcttgctttcttgtgtttctaaatcatgcatgcatttcctgatggcagtgtgctgttcattcacaag

SEQ ID NO: 10683 - DNA, 1376 bp, Vitis vinifera
  Intron number 5 from transcript GSVIVT01010282001 (locus G SVIVG01010282001) derived from phytozome v7.0 (chr-ID chr1 ; pos 18970430 to 18971805)
atttgcatgtatacctattgatagccttcctttcaattaatggcatgttggttatagctactagcgtttgatgaaataatgattgctttgcagaccccctttactgagcgcccccctctagcctttgaaaatattttgtaataaaaaagagctatagtgagtaggtggaatgtgatattctggtggctttaatacagtgatgcaaattttcttttctttttgaagtttcttatcatcatgtactgctgtgctttaggcatatgcctcatgttgctgtgaatcatgctctatcaaatttgtaccatattccattgttaaagatcattctttatttccgaaaggaaggatactcattcatgtatgctgtgaaaaaaacgtgctttcccatcattcatatgtgtgagagcaatattggcttactgatgttccatgacttcattatacctatggcttttccattgctaaaattctattagtcattctcaggacataataaacttctataacgactttgaatgctctattcatgcttcatttcattttgagcttgtggttaggctgcagtccacaagaaattgttagatctggaaggtaaattattggaaatgaaccagacggcttagttgggtgattaggatagttgtgatgttgtagcttataattttggagatttggatttgtgatttgttaatagcttctgataagaatttatcaccaggacttttgattgacttgtgagaagaattttatggttattaaagctactgctcttttctccactactgctgtcctaaatgctatatgacaggcaatgcctctattttttgcccattgaaaaggttctattatccattgtcaggagaaggcactgaactaataccaaacaatggtttatttatgttctgtttgtacttttagtgtgtgcttgagtagcaactagtcatttgtaaggtatctagattaaaaaggtaaaacattattgaaaaatgtgcttaaactgattatttatctgattatgttagttattgttttgtagatgatgaatttgaagattttgactctttactgttacacctactgataagagatttttgttaagaatttcaattgacttgtggctaaaattcattgtatagtgaatggtacatttgtttctcttcttgtggctggaaatagggctgatttgttttctgaagttagcttggttcactaatggggtggcatttagatcatttgactattatatatgaggcatctacatttgaagttagtatactggacatattttacattgttcagaatttgcagtgtctttgtttttagctaaatgggtcttcataatgtcttttcaggagctttggtcattattggagttt

SEQ ID NO: 10684 - DNA, 5816 bp, Vitis vinifera
  Intron number 1 from transcript GSVIVT01015565001 (locus G SVIVG01015565001) derived from phytozome v7.0 (chr-ID chr1 1; pos 4978306 to 4984121 reverse strand)
gaagaaaaaggtttctctcgtcttcccccgtgtgctttttagggtttctttgtttcgtttgtgcttttatttttttgaaaattactttgtgggtgtggtttaattttgtatctgtgtgaaaatttgatgtgagtttgttttttgtaattttatgcgattttacgttaaagtttgcttcgatagtggtgggttttcagctagggtttgtcggtgtctcttgtaattgtgttgaattaggagtaactgtgattcgtgattttgaatttatgttaattctgtggattttctcggaatttgttttgggtttgttttttagggtttcgtggaaagtcctgttaatggtcgttcgcttaaaacacctatctcccccctttcctgcttgtgttctattttgaatttgcgtgattaagttctttaattggtcagtcagactgctcctgcccctatacccaccccgatgaactaaacacatttggtttatctaggttttttctgcttgattgatttgatttaagcgagggtgtctatgtgtgtatagtttgggttttaaatggaaaatggcggaatttgtgtaattcttcatgttgtaatatttttattttccacttgtttttgctggtattgcttgattggtgcccattggctgcaacttcttttgcaaatggttatctcattggttaaaaaaatgtattccaaacatgaacatgaagatcaatgtagaaagttttgtttgagaatgatgaggttgtagctagcaccttttgttaggacactgacacaaagacaaacattgatgcatcatgtactggttaagagttactttccatgggtcaccaaatgaggagggaatttacattttcttggaagattaggagcaaaattttcaactatttagcttttaaattcgacttgatgcatggaagtggaagagcctttggctttaattaggtttgagaattatcttaaaagtacaagattctcaatagaattcatagtgttccatttaagagtaaaatatccttcagaggtgcaaaaacactatggcagcatttctaagtgaaaagttggagtttgagtatttaggcccttactaagtgcactacatctcatacacatgcctccagctttcaaatgggatattagcatccaaaaaaatgattttcatctgaccttagatatttattatatccatggcaaacgcattaagtttaaattctgaagtgggtctgccccctcttaaaacctatcactgtggaataaatttaataaagataacagaaagagcaagaaaagtagagagaaataatggaaaagacaagaagtttggcaggattttcacatggcagcaaggtcaagttgcctgaaggctgcgctgtcaatttgcagcttctggaagataatctgataaaatgacctaaagatatataaagttcttatttgacttaaaaggagcctttggtttcgcaatatctaatccaaacgacaccctgaagttcatagactcaagtttggttggcccaccattacttaaacaatctaagcatttgggccaaattggtgggttaacatgatgtcagagctttgattgtcagaaggttatgagttgtggtagtatcaccatgtgtttattcccccttatttaccaagcctataagcaagctcaaaaagatggttgcttgtgaggtggggtgttagggctgtagcacaaattggcatggtatacatcgttggcccactattacccaacaacataagcttttgtatcaaattggtagtttaacacatataagctaagctcattcttcttcttcttacaattttttttatagttcaaagcatatttcaattcttttagagtttattacaaattatagatgaaagtatgttttggttgtccattgttgttgctaagtatgcttgggttgctgatgttttgaggaggttggaggctgtgggcagttcttcttatttatagttcaaagcatggttgataagaagggtgaaagcatgcttgggttgtccattgttgttcctaagtatgcttgggttgctgatgttttgaggaggttggaggctgtgggcagtggggttgtccattgttgctaagtatgcttggattgcttcttcttcttctaacagttgataagatgggtgaaagtatgctgggaggctgtgggcagtagcagtggaattcttgctttcttctcaagcactggcagtgtggaactcttcttcttcttcttcaaattcttcaaattctctttagagttcaaagcatagttgttgttgctaagtcttcaatatctttttttttttctttttatttattttttatcttcaaattccttttattgttcaaagcatagttgataagacaggtgacaggtgacaagtgaaagtctcccttttttgttgtccattgttgttgctaagcatgcttgggttgctgatgttttgaggaggttggaggctatgggcaatggaatttttgcttttcaggttcaaagcatagcttgataaaacagggtgaagtctctccttattgctctcttcctttctgttgtccattgttgttgctaagtgtgcttgggttgctgatgttttgaggaggtcggatgctgtgggtagtggaattcttgctttgtcctttgttgttgctaagtattattgggttgctaatgttttgaggttggaggctgtggattgtggaattcttgcttgcctagacaatcttctccttctttgtagtccattgttgttgctaagtatgcgttggttgcttattttccaaggaggttggaggctatgggcagtggagttcttgtagttccatgattgggaattgggaagtcttcttcttcctttaagtgtgtttgggttgctgatgttttgtcgagattgtgggcagtggaattcttgttttcaaagcaatttcatgattgggaattggaaagttcttcttcatctctgggttgctgatgttttgaggatgttagaggctgtgtggacagtgtaactcttgctttccaagacagtttcatgattgggaatttgaaagtcatcttttttttaaagtcttttaatagttcaaagcatagttgattagacagatgaaagtctcttctgattgccctttcccttccttctgatttccccttccttctttgttgtccattcttgttgctaagtatgcttgggttactgatgtttcaaggaggttgcaggccatgggtagtggagttcttggtttctgagatagtttcattatagggatttgggaagtcttcttttttttttctttcttttttttctaattctttttatatttcaaaacatagtggataagactggtgaaagcctttctgatttttttttaaaaatacaggtgaaagtgtttttgttcccttcccttctttgttgtccattgttgttgctaaatatgcttggattgtttacgtttcgggcctggaggctgtgggtagtggaaatctctctttccaagacagtttcatgattgggaattggaaagtgtggaagtgttccttaagtaaattcagtgtagtggtgcttggagagggaagataggcaggtggaggtgccctaacgatgtcaagttctttatcaaatctatttattctctagacccctacaaaagtgggtttgtttgcttggggaactctgtgggaaagattttgcctgtgggtcaactgctaaaagtttggtatttaacttattggtgttgcctgtgtaaatgtgacaaggagccaactaatgatttggtaatccatcgtgtttaagctagggatttatgatatatatatattgataggtcaatgcggattgtattaaaaattaaaagtatacacgacatatacaatgcaaacaaaaagaaagaaggctggagcacacaaaagccaacaactgccccctacgaagagcctaaccagtccacaaaatctaacaatgatgaaccatccccaatgtataacctaacccaatcccaacgatttatggtatttgctttttcttttctttgttttttttttcatcctttcttgggtgattcccaggaggatggaagtggttttattgggttggcatggaatttctgttagcaaaaagtgaaagaaggtttggacaacatccccattttgattgttctagatcatatggtaaaaccagaagagtagaattttgtatggcttgttggattttgttaatcatataggatttggatggagggtcttgttttgtattttttcctattgcctattggcaccttctatatatttcctattgagctgggttgccccccttttatgtgcttttgataaaatttctttgcttatacttatatatatatataacataagtggagagatcaagaaaattatatttgatgggtgtggtaattataattgagtttgtattttatacctattccgtgtgtcaagtgtgcagtgaaattaagttgtatttttttcacctgcacagttatgttcctggtagtaaattatcaaagtcagatgctttttggcttcttacaggaggaaattatttgaattgtcacctggagacaccaggtggaagaagtatttcatttaaggtgcccttgaggcttgactcaagtggtaaagggatgggggagggtttgtgggaggttctaggttcaagttccaatggggacaaaaaatttacctatatataaaaaaaaaaaggtatttcatttaaggtccatgcttttatacttacagcagcatcaaaatctatttgcttctttggcattttatcatggagaaaattatggatggtaaaagagattctgataaaaagagatagcctctagacatttgtatttcatgagcctgtcaaaagaggggtgaaaaactgtattcatgttcctttttattttgttatgttgctatcgtgactgtgaattcagtttcagaattactgacagagggatagaaagtagcaaacatgctgttaaattgacctgtgtaaggcatagattaaattgtctttgttgatcaagttcatcacaatctaaacaaaagggcaaattagacctgccacttatgttataaggccatatttctcactattgtctctaggatacccattatactttatatgaaaacagtaatttcaatatctgggaattcaaattttgaaattgtatgaattggctttagtgtgcttcactcaatattattggtaaggctaatcgacagagaaaaggatgctcgacttgatgctgctgtgaatcttttacttgtatttccttgctttttcctactgcaaagagaggtatattgctggctttagggtgcttcactcaatataataggtaaggctaaccaacagagaaaaggatgctcaacttgatactgttgtgaatcttttacttgtatttccctgcttttttgtactgcaaagagaggcatatgggtgtcaccaagtgggccctctgggcacctgtgaccttgactttttagagaatcccgctcctacgtcataggacttgtagctcagcaatccaccaggtgggtttgtttatccttccagttttgagtgtcaaacttggatagttatagcaaggatgtttaaataagcataattgcctatttgtcacttttatataatctttgaaattgatctggttaattaatctctgatattttagatcctctcttggcactctagcatttttccaatttacattttgtaggttgcatgtttttctaatgcccttcagttctgttagccatttgattgtgttgcctgacttgatccccctgttccatatgcagttc

SEQ ID NO: 10685 - DNA, 18818 bp, Vitis vinifera
  Intron number 3 from transcript GSVIVT01025508001 (locus G SVIVG01025508001) derived from phytozome v7.0 (chr-ID chr6 ; pos 184090 to 202907)
ctggtacgtttttgtcctttgagtgcattttagtgcggccgaatgatatgtgggcacatctactttatcaccgattagggtgttggacacttgtggtgggctgacagtgtgtatacatgtttaataccattcatccactttcaagttcttcaaccttccttcatatttaaaatattcatttcatcttgtctgtaatacaattattgttgaagagactatctaggtactgtatttttcattgttttattatttatgatacacaataagatacacatggtatgatacattttttatgaatattgatatatatcgtaatttgtatcttttcttaaacatgtcttatgatgcatatacagtacatgatacaacacgtgatacaatgataaaatgatacttacacttcaactattttcatatattttaagaaaaataaaattcaaatttttttgaaagaattgatatattaattgtttaaaatataggaaggttagaaattgatcataaaaaggagaaggtgtaaaataatcctatagttagagctacattcttgttgttaaagaccatattgaaagttaagcaatttattcttacaaaaaatattgaaaacttttcatttaaatataatgattggttactaaaaattttaccttacatatattagttttttatgtatatatatatgacttttttcggtaggaaaggaatgatgaagaatatggaaagctagaactttggagatgacatatgaacacatatgtattaaccatatatataggtatatatgtatagttagaatttgaactaacaatcaaatctaaaaatttaaatggtgtggctatgaacctttgagtgtttctttttccctttctttttaccttagctacttcaaagaaggcttgggtgatagactcgtggtctcactcttatggaagaggagtttggattcctagtttctctagacatctaaacaattgggagattgagattatggagcgcttcttggcaagacttctagttaaggtggtagttgagggagaagaggacaaggtttgttggttggagacagagagaaactttctctggtaggtccctctactctagcttgaaggtggggacgttagagtcgttcctagtgggcattgtgtggaatgtgtgggtttcacctaaggtgtgcttttttgcttggaaggtgacttgggaaaaagctttgactcttattcagttacatcagagaggttggtctttggccgatagatacttcctgggcacactcacgaggagtcaattgaccacatatttttacattgtagcaagacaagggtgttgtgacaacttttgttatctcattttggtatttcataggtgatttactcatttttcagagagactctatcaggttggtatgcctcttttgtcaagagaaagcggaaaaaggtttagggagctgctcctttgtgcattttttggataaattggaaggagcaaaatggaagatcattcgagaatgtggagctctctgatcatagactaaaaatcctatttctaagtatcttgttttcttggtccaagttgtttataggagaaagattgttatccttatttgattttattgattggttgagtgtggtttgaggaatggagtatttttgtttttccatcccttttttggcacttttcagtggtcattgtatacgttttgtgtactttgttacaacccttttttggtgcttttcaatattatttttttgataggtaaagataattcattaaaaagaggcgccagaaaagcgactcaaggtatacagaactatgcaaggtatacaaacctaaacacccaccaccaaaaagatgagaaaactaaagcggcccaaaaagtcacctagctcaaaaacaaccttaataggatcccaaccaatcaataaaattaactatagttatagggcattcaactataaacaatttagcctcagaccaaagagagaaaagaaaggaatatttcaatctttggattgacatctcgtcatccttaaatgccaatccgtgagcttagagatgccatttctttgagtaatctaaaaatgataacctagtaattacctgtttgagttattggatatgaatgtgaaaatgattttcctttgtcaattatgcatataagggagttgagagagaatggttgagaggaagacgttgaaggtcttggttgagaggaagactttcttgattaggttggaaggcgagcaaggaggtgaatggtgttcgatgacagagataagtagaggctctgtttttacattaggttttgaaaaggaagcagttgggtggttggttgaatacttgatgaaagccttagcattgaaaagtcatatgggtttcaacaaaaaattcaggggaaaatgcagggttcatttgatggaaggtggcttcaacaaccatggaaggttcataaggatctcggagtttgctaccaatagaaaaccttccgttctgatcattcttgagggtgacaagggcagaggttgggagaatattaaaaaagcgttatcttcaatgttggtggtcccctatccgaatgcagaagtaaaaggaaggaatataagaggggaaagctggcctcacaataaagtgggctcgatgcacagatcctatgtgaaggcagttagtgacgaaggaccaagaggaggtggtctagttccagttgggaggtgggccgagctgtggtatgtgaaagcaagtttgatagggagaattgggttgaggttggaagatcggtggcaagaagcttaaggaagaatggcgttgtaacgattgtacccatttcaactggaaaaggtgtatttttcgttgaaacaaccgaggaagccatatttctccatgatttgaggaagttaagggttggggaaaggaacatcatttagctgcgaagatggtcgccgaaggaaaatgcggaaatagatgggaagtttagagaaggttggatcaaattatgggggctgccatttcacctatggtcggaggtacacctgaagaagattgtggagcaatgggggtctgtaaatgaaatcgattggcgtatgttgaagctgttcgatctcagcagggcgagattaaagatcgcaatgaaggatagggcaattcttccagctatgttagaggtgactgatgggggttgggtgtttacagtcgtcgtcgtagtggtcggagacgaagaaagacggagaggtagcgaaaagggtgagctgactcgggtggctgttgctactcactcggggacaggtggaggaagacgagaggagagtggcagatcaacgatggggggaagataccgtgtcggggaagatagtagacaaaggaaggagggagagaggggtaagggctgccagctcccgtcacagtctcgtttgaattcaaaaaagtcaacagatgggctggacgggattgaagaagtaggaggagattgggccggagaagaagaggctattgccgatgtgggctgtcgggcctgtgagaggaaggccctgtcgctggcaaagcctggtccaagcatagttataatgggctgcaagcttaaaggcccgctgggcttgggcctaagtccagaagaggttaccccagttgagactgtggcgtcgttacgtaaggaagaagaagactcatattctgcaaacgaaaagggaaaatcagatcctggactcctcgagtttcagtcgagcaggttagtgaagaagaaggtgttgtacggttcaaggaagctgtggtcaaccttctttcccccaagctcagagcatcgacagggaatccggtgtagcagcgagcccattttgcacggaaaaatcaaggtggacagcgaagaggacccaaagacagaggattcaggtgccgaatcttaggcgaatagaggattaaatgcaagccctctcttttatcggcgttgtccaaggcttcgcaagaagaatttaggggaaaaggcttcgccgctgagaaaggaagcagatctaaaaaattcttcatccgacgaagatatggaaggatttttgggccgagtggggtctgatcctcgtggctcagcagtcatggttaagccttcttcgccagaaaccagaggtaaagggcctaacttgttggggaactgtggttcgatggttgcggaaattctggaggtaacgccttcactttttcaatctacccagccatatatacccctttctagtggcttcactaaacccctcatgaatccttccgtccccattctgagtccctctacccccatgcttctcatttcagtttctcaatctctggttcctatggaaaaccgagtaaactctaatttttttttcaaaaaaggcaatgatgctttcgaaggtcaaattcctgttgatatccctaatttagaaatggaggtgatccagcctgcttgtccttaccagatgttcgagagtgtcaattccctattagctaatctaagatcacctatcaaggagtccagtaaggctacagttaacctgggaggtattgcggggtctcctttgggcgagttccaaatagaaggactgtcccctaggaaaatggcaaaagtacgtgaggttttaaagaatctggatatcaaggtatattccaggtggaagagcagatgctccataggattgcgagactaattggatttggttcagagatcagggtcagagagtttcacatgaagataatcagttggaataccaggggtttgggttcaaagaaaaagagaagggtggttaagggttttttgagatcagaaaagccggatgtagtgatgattcaggaaacaaaaaaggagtgtgatagaaggttcgtgggtagtgtttggacagccagaaataaggattgggcagcccttccggcgagtggggcttcgggtgggattttgatcatatgggaggctaaaaaattgtgtagggaggaggtagtgttaggttctttttcggtctcaatcaagttcgcattggacggttgcgaatcattgtggctatctgcagtttatggcccaaacaactcaactctcaggaaggatttttgggtggagctttcagacattgttgggcttgcttatccgcgttggtgtgtgggcggcgactttaatgtcataaggagaagttcaaaaaaattgggtggttctagattaaccccaagcatgaaggattttgatgatttcataagagattgcgaattgatagatttacctttaaggagtgcatcatttacttggtcaaacatgcaagagaatccagtatgcaagagattagactgtttcctgtactcaaatgagtgggaacaagtatttcctcaaagtcttcaaggagtactgccaagatggacatcggatcattggccgattgtcttggaaaccaatccgttcaagtggggaccaatgccgtttaggtttgagaatatgtggttgcaacatcctaattttaaggagagttttggaagatggtggagagagtttcaaggaaatgggtgggaagggcacaagttcatgaggaaattacagttcgttaaagacaaattgaaagagtggaataaggcttcatttggagagctaagtaaaaggaaaaaagatatcttatctaatttagctaactttgattccttggagcaagaagggggcctatcccatgaatttttagtccaaagagctttaagaaaaagggagctagaggagttgattttgagggaagaaatacattggagacaaaaagctagggtgaaatgggtaaaagaagggaattgtaactcaagattttttcataaggtggccaatggcagacgaaataggaaatttatcaacgagttggagaatgaaaatgacctaatgttgaataattcagagagcataaaataggagattttaaggtatttcgaaaagctctacgcgagtccttctggagaaccttggagagtggaaggcttagattgatcccctatttctggtgagagtgcgtctaggttggaatccccctttactgaagaagagatttttaaggctatttttcagatggacagggataaggcttcggggcctgatggctttaccattgcagtgtttcaagattgttgggaagtgataaaggaggatctagtgaaagtgtttgcagaatttcataggagcggaattatcaatcaaagcaccaacgcttcctttatagttctgttacccaaaaaaagcatgtcaaggagaagctcagactttagacctattagcttgatcactagtctttacaagataatagccaaagtgttagtagggcgtctaagaggggtactccacgagaccatccattctactcaaggagccttcgttcaagggagacaaattttggatgcagttctcatagccaatgagatagtggatgagaaaagaagatcaggggaggaaggaattgtattcaaaattgactttgaaaaggcctatgatcacgtgagttgggattttttggatcatgtgttggagatgaaagggtttagtcctagatggaggaaatggatgaaaggttgcttgtcctcggtttcttttgcagtccttgtgaacggtaatgcgaaagggtgggttaaggcatctagaggtttaagacaagacaaccctttatcaccttttttgttcactatagtggcagatgtattgagtaggatgttattgaaagctgaggagagaaacgtcttggagggtttcagggtgggtaggaacagaataagggtatcccatttacaatttgcagatgataccattttcttttccagtactcgagaggaggatatgatgacccttaagaatgtcctgctagtgtttgagcatatttctggtttgaaagttaatcttgacaaaagcaatatctatggcattaatcttgagcagaatcacctttctaggttggctgagatgcttgactgcaaggcttttgggtggcctatgctttacctaggtcttcctctaggagggaatcctaaggcgtgtggcttttggaatcctgtgattaagaggatatcaaggagattagatgggtggcagaaggcgtatttatcttttggaggcagaataaccctcattcaatcttgtctcacccatatgccatgttactttctttccttgtttaagattccttcctcagtggcaacaaaaattgagagaatgcaaagagattttttatggtcaggcataggggaaggcaaaagagaccatttggttaattgggacatagtgtgtaagccgaaatcgagagggggattgggttttggaaagatttctataaggaatgtcgctcttttagggaagtggttgtggagatatcctagggagggttcaactttgtggcatcaggttattttaagcatttatggatcacactccaatggctgggatgtcaacaacatagttagatggtctcatcgttgtccttggaaggccattgcactagtcttccaagagttttccaagtttacttggtttgtggtaggtaacggggatagaattcggttctgggatgacttgtggtggggggatcaacctttgggagtccaatatccaagattacttagcgtagtcacggataaaaatgctcctatttcatcaattcttggttattcccgccctttctcttggaatttcaattttcgccaaaatctttctgattctgagatagaagatttagagggccttatgcggtctcttgatcgtctacacatatcacctttggttccagataagagatcctggtccttatctccttcaggtcttttcacagtcaaatctttctttttggccttatcccaatattctgagtcgcctccagttttccctaccaagtttgtctggaattctcaagtccctttcaaagtcaagtcctttgtctggttggtggctcacaagaaggttaatactaatgacttgctataattgagaagaccccacaaagcacttagtcccgacatatgtaagttgtgcatgaagcatggtgaaacagtagatcaccttttcctcccttgctctttgacgatggggttgtggcacagattatttcaattagcaaagacgaattgggtttctccaaggagcatctctgacatgttatctagtaattttaatggttttggatcttctaagagagggattgttttatggcaaaacgcgtgcatcgcgttaatgtgggtggtgtggcgggaaagaaatgcaaggatttttgaggataaagtaagaaattctgagtatctttgggattctattcattttcttgcttttttttgggctttttattctaaggtttttaaggggatacctcttaacgtgttacaacttgattggttagcggtgtgtaactagagtgtttgcttttctctctttgtattttcttatatttgtttacttgtagtcttgtttctctttgatgggaggattcctcatccttctaattgtactttctttttatcaatatattcctttgtcgtttcctataaaaaaaatccttaaatgccaatctatttctcgtctttcacaccatccaaaatatatgcagaggagcagctctccacaccttcttgcgcttttttcccacaaaagaaccatgtcaactaagaagagtctctctaactgaggagggcaacacccaagacaccccaaacaaggtaaagagtagctcccataaagcccttgtttttgaacaatgaagaagcaaatgatctattgtctcctctttctcaagacacataaaacatctatttcccaaggaccttcctcttttctgaacaaggtctagggttaaagctttaccccatgctgcctcccacgcaaagaaactgattttgggttgtacccacccattccaaatacagctaaacggaaacataacagggcagtccgcttctagagcaaggtagagagactttgttgaaaattttccgctctttgtttcggtccaaaccaccatatcctctacatctccaagcactctctttccatgaagatgctccaaaaatctttccacctcctccacctcccaatcatttagaactcttgaaaaacaagggctccaacccccctcggccaagggatcccaaacatccgccacccaagcttccttttcagcagacaaggcaaagagggaaggaaaagactcacacaagggggtatccccacaccatctatccctccaaaagctcaccctcctcccacttccaactctaaaaaagattcgagtgcccaccaactcccaatccatccttattcctttccaaagccccacatcgtgtgcctctctcacttcctgtgaactcctaccccctctatcttccccatactttcttctaatcacttgattccacaaagcatctctctcatttgcgaatcgccaattccatttggaaaggagagccttattgagaatggaaagacatttgacccccaatccccctttctttttacttaagcacaccaccttccatcttactaagtgtggtttttgctccaagttgccaccaccccaaagaaagtccctttggatttactctagtcttcgtctaactgaacttggtaacttcagcaaggacataaagtaaatagggagattcgacaaagtgctttgaattagagttgctccccccccctttgataagtattgtctcttccacatggccaatcttttaaggaactgctcttccactccatcctacactgatactgtcttaaacggagcacccaaggggagacccagataagtggacgggagactacccactcgacaaccaaagtccaaggcaagatcatcaatattctctaccctccctactggaatgagttcactcttctccaagttaattctcaaacctgatacaacctcaaaccacataagtagccagcttaggtaagtcaactgatcttgagaagcttggcaaaacaccaatattattgctttttatttataaaaaaagatgatttaatcttttatttatactttttctttgagattaattctcttagaacaattatgttgattaaatattaaaaaatttactttaattttatagatattttgtatgtttggaatttttatctaatcatgtgtttaatttggtaagttagattttcttaattcttgtttataacatttagtcatgttacatgattttaactaacatttaaataataaaatattcaagcctttttaaatatgaaaatatattaatatttatttaattaaaaaattttcaatttaaatattgcccccttaatataaatttcttgctccaacattgcatggtgcattggttgtactttaatgaagtcaaattccttgtggaaagaagaaattgtgttagaatctcctcaaccattagaggtttttcgaacttcatagaggggctttccttgataaatctccttctagtgggaggttctttcattgggtgtggatgattgaataaatcttcgatgtcaagaattgatctttttcttaccatgggagattaggaggatcaagttactaatatggtgcaaggcttgttgttaaggctagtgtctaatcattcccctcttttactaaatggaggcgagggaaaagagggatgacctctttaagatttgaaaacatgtggcttaaaatgaaacaattcaagagttgtggcacaaactttttcagctagccaagatggattgggtacctccgaaaagcatttcagacatgatgttcatcaattataaaggttttggcaagtccaagagaggggtagttctgtggcaaaatgtgtgtatagctttaatttgggttgtgtggtgggaaagaaatgctaggatatttgaggacaaagttaggaattcagagaatctttgggactccattcatttccttgcgtccttttgggttttttgttcagcgggttttaagggcatcccccttaatgtattataacttgattgactagcagtgtgtagttctaatagttccaatgggacgacctagtatattgttattttttcgtgttgtttagttttacttttggcaggaggattcctcatcctccttttgtacttatttttctatatatatattcacgcgtggtttcctatcaaaaaataaaaaataaaaatgaaacaattcaaagacttagctaaagagtgggtgggaaagttactagttagtggtttttttggttttgtgttagcttctaaattgaaagtattaaaggggatctcggaggtaggaacaaagagctctttgagaatgtaatagcttgaaaggcttgtgccttggatcaaataagctattgggataggaaggaaagtgaagggttatcgtccttggggcatagggatgctaaaagtttaacatcagaagcttttaatcactaagctatttagaaaaaaacctcttaagaggcaacgaccaaagaaattgtggctaaaggtaggtgataaaatatgaagtttttccaaaatgtcatacaagaaatttcaaaggaaggattagggtgtttggcgagtgggtgacggaggaatctaagattttagaaaggggtgtaaaatttttagaaaaaaacaaaatctcttaaaggcaaaaactaaagaaattgtggctaaaggaaggtattaataatttgcttttccggtgttggaacatgacttttgatgaggattattcaagggaggaggagatgatggcgatgaagagcaatagatgattgtagtgcaatatatgttggcattgtgaaagaagatgattgtcaggacttatttggtggaaaggaaatcctttcaagtacgtttcatcaagaataaaggatcttggttgtctttgtttgaacatagtcgaggagcttcatttttagtgagattttgagaaagaagagattgaatggttgttaggctatttaaagaaggctttgaagatggattaagtcattgggttttaaccataaatacataggacgaaccataactcatattttggaggtgttcgtaaaccttaacggtagatgttttcgaattaccgatttcatgacaatccaaaaaataacttttgtggtcattccaaaaggatataagagttggggttggattgtagtgggagaagctttaacaactatgatgttatatccttcccactttgtaggcaacaagagatttcacaaagtagcaatggaggaggttaagctagtttcaaaccccataaaacttagtttcgctagcgtggttgttggggaagggtcaagaaaacaaggttatgaacctatgggaaggtgggccagggcggtggtctataaaccctctcccgcggtagcaagtgtgagcagaattgcaataggcagggcttttgccaaagttgtgggaatgaaaggggtgattggcatcactagtacttctgagaaccaagggattttctttgtagagtctactgacctaacaatttatttacatgagaagaggtttattttggtgagcgaaaagataaaagttaaggtatatagatggaattcaaacatgaatgctactatctcagggtggtttcgaaaggggtggattgaggtgaggggattgccttttcgtttgtggtatgagatatatctatttcacttagcagaatgatggggaaaggttatcaagatcgacaatcaaactttcaagctagtagatttgacgaagattcaacttaaggttgaggttaaggaaaatgcagtgatcccccgcaattttttttttttttttttttacttataaaaaaaaaaaaaaaactttgataatggtcgttggagaaggcgttgatgattaatcgggtaatgttgagttgaataaggggtgggtgttctatttttggtggtcatgttagctaggaggggttgcaagaagaccgaagggctgaaaggttgccatgcttcaaaccatgtgggggttgttgggagaaggtggaggacaattgcattccatgccatgctagctagttttcgaatttcaaatttgctagcaattgtgaaaaggatagggactgttccttgcattttagtggcccttctaatcaattgggtcagtttggtaagcaagcaagttgtattaaaagggaagcaaacccaattgtttgaaagaagcccaagccatgggctggatcaaaataacttgggggaccaagttgacccttccttagtaaaaggaagaccaattcaatcagaagaaataagcccaaattttcttgtgggccaaatgaccatctcgagctagttggtgttgcttttaaagtttgacccttctacttacatccaaggatccggagctcaattttcatttctttggagaaccaagcctcacatctcttgaggctttgtgggagaggcttgcctccttcttttaaaggtctgttcaagggaaaaattaatgattcgaagttacaaagggatgcaagggaagaagaatcttttgcgataggtagagatgcgagcgaggaccctattttgaagaggctttcaacaatataggttgtgaggtccaaaggaaagggtttgattggcctttcaattgaagcacaccttgtcttctcctccctcatctacccccttaccaagcagtcttgcgaagaagcgctccacatcctgaatctcccaatcatttagatgcctggagaatcttggagaccatgcacctctatcattagagtgagaccacaagtctgctacccaagcttcctttgaagtagctaaggcaaataaagaaggaacaaaaacactcaaaggttcattgccacaccatttgtcattctaaaactttatccttttctcattgcacattgagaaggaaattctacaattaactgtctcccacacatttcttatggccttccatagcctaacaccataactcttacccacttccttagattaccaacccttcaacttccccatgcttaccacttataatttgtctccaaaacacctccctttttgttgcaaagcgccaattctatttacaccatagggccttattgagaaaagagagacgctgaataccttggccccctttcccctcttatctgaacaaacagtgacccatttcactagatgagactttctctttattgtccttcgtccccaaagaaagtctcattgaatttgctccaaccttaaccttactatccttgacagccggaacaaagacacatagtagattgatgagctagaaaaagtgttcctaattagagtaagcctctctcctttggaaatatatcgtcgtttccacattgccaatcttttactgaacctttcttccactccatcctaagcagccaaagaattatgtgggacacctaaaggaaggtctaaataggtggtcggaagcacgcccactctgcaacctaacacaatggctaattgctccaagttctccaccctcccaactagaataagctcatttgtgattaggttaatcttcaaatctagagtaagctctctcgcaagtgggtttttgggatgcaaaagagaggttggaggagttatctattgaggaggtggctgcgagggaggattcaagggttgaattttgttaatgggctattatggaagaaacatgttggaggtagaagtctagagaggtgtgtttgagggagggcaatagaaatacctctttctttcacaaaatggcaaatgcacatagaagaaggaatactttggctaaatggtatatggtttcaaaagcatgtggtgttggactctcataatactttatggaagagagaaatcttggattcaacttttattgtcaatgagactattatttttaaactaaggaatggtaaagggggagttatgtgtaagttagacattggaaaaacatatgatcacataatttggagctttctttagaggtgttgcttaaaatggggtttaagtagaggtgaattgattgaatttagttttgcatctcaacaatgaggtttttgattttgtcctatgtactatggtgcgtcatctctttggctcttgttcataaaatcttattatttgcctatataaaaaaacgaagtttttggttttggtgaatgattcaccttctaacttctttttctagggttttgcaatataagggggttctctatccccttctttttggtgatggtaacccttattattctattgagaagggtaggggagggagatttcattttcgcttcaaggtgggagaagtggagatttttttaactcttatttgcttatgacaccttatttttttcaaaccaagattttccacctcttatttacttatgacacctgacttttttttttttttcaatagataaagaaaataatattaaacggaaagaggaaacaccaaaatagtgccctctaagtatacgagacaaaagcagcccaaaagctcgaaaccaagggaggaggaaataaacaacaacccctacccttacttagagcctagccactcaaaaaagctaacaagagaagaagggctcaaaacaacaacacctgacttttttcaaaccttgtttagaccaattgacctacatgaggtaggttctccaatggtttgagggctttttaagaatgaaagttaatttgaacaaaagagaattaattccaataggggaggtctctagttcgagggagtttgatccaatgttaggttgtggggtggtaaagtttcctaccactattttaggtctactcgtgggaactcctttcaagtcctcaactattttgccatagtaaaaaagagtttttttttttttttttgaaaaaaagctctatagaaaaggcaacacctcttatagggttaaagaatcacttcgctagaagatacactttgctgttagcacttaatcatgtctttttttgttgtccctaaggaaaaaattcaaaagaatttcctatggggggtggggctcttgagaagaaacctcatctagtgtaatggttagtgatttgcaaagataaaaagctgggggtctaggtattgaagtgctcattcttaataaaaccttacgtgaaaaatggtaatggagattgtctttagagagggaaatcctttggagatgggtcaaagtaggaaagtgtgggggaagagttgggaggatggtgctctcaagttagagggataggtatggtgttgggttgtggaaggcaattagaagaggatgcatagcttttttggaagaaggtatttggtaggtagtgggagagttatcaagtattagttagatgtttggtgtggtgattctcccttaaaggactcctttctatttctctgttcttttttgcaacttttaagaaggcttggtggctcctatttgggtggtagagggtatctccttgggaatccgtgtttcttaaaacatttccaagattggatgttggatggcattgaggagttattttggaagcttcaagtgttaggaggtgtagtggaaaaaaggatagttggtttggaaggctagtaaagagtggggagtttttagtgaaatctatctattgtgttttaaagatgcatggaggagtgccatattcctcaaaggaaatggggggcctcctagtctccttcaaaattgtattttttttttctcatgagaggctgcataggaaaggatcctaaccttcaattggctctaaataagagggtggttttttggaagggaggaagaaacggacagtttagggttaaggaagcgtacaacttgttggccaaccccaatgacaccgcattcccgacaagttgtatttgggtggatagagttccaaccaaagtggcgttctttgcttgggaggctacgtgggggaaggtgcttactcttgacagactccaaaaaaaaggatagcaactccctaattgttgttttttgtgcgggtgtgaagaagaaactgtaaatcacattcttatacattgtatagtggttagagttctatgggatattgtccttgggttattaggtgttcagtgggtcttacagaaattgtaaaggaggtcttaacttgctagaggggctcttttgtggggaagaaaaggaaaaagatatggaaatccatctcgttgtgtattttttggacggtttggaaggagaggaatagattagcctttaggggggggtgtgttagatgctcagaaacttaagaattcttttgtttgtaatctacggaggtgggctagattgtctattggagaggagtctctctcccttataggctttttggagtggttagcaaccacttgaggggcggtgaggctcttttggccttcttttttggcttgtgaggccctagctatcttgtataccccctgtatgcagtgtggctttttgcctctggtttaattcaactctggcttacttataaaataaaaaataaaaaataagagggtgattttatcaggttattgttgtatttgtaaaaatgcagaataatcaactactaccttctcatccattgtgggaaagctaaggggctttggcacttcttgttttctttggcatcttttgagtcctcccttctttggtgaaacgattattgtgctttggtggaagtccattaggttttaagaagagaaggaagcttttgagaatagcttctgtatgcttgttctggacaatttggcaatagcataattgaagatcctttgaaatggtgtagtaattatatccatctcttaagttgtctccatgaagtttcctccaaaatagttaaatgatacgtttcatcccttaaagcttttgtagtcttattttttttcgtctaatagaaccctttgcctatccttattacttcaaaagcttatcctctctaaagccttctctttctaaagtcatattaccacaagccttttccttttcatcccatagatgagctttaagtaattttttttttctttttgtttcgataggcaaatagaactttccttcaatatctggttagaaacctctaccttgttgaacacccgactattacattctttctgtacttatcgaaaaagatgaaggaaaggagtgataccccaactatccttaacttcttagtcatgccttgagccttctaacccattgattttggaggaaccatttttttttatataggtaattttggaggaaccattgaattctaaaatagcaaataacatatctcacatctactggaccttatcatagccattcagaatatgatttgctgattcaacattagctttgcaaagattacatctattcactaaagattgtcttttcctcattatttgctccatagttaaaatcttcgcttaaacgggttctcaaaaaggggaaaagataaaaaaacctccctcaaaagtggcataggaaaccccatacctcttttgcaggggaaaatagttatatcttcttagcacattgaattgtaaaaagacttccattggaatcctcccttctccatcctctccacaagaggctatcctccctttcctctattaaattcatagaatgaacaccctccataacacagtcctacaactccagctccccctcctgaaaagctcccagaagagctttaattaatgtttggtgtgggtgtaataagtctgctttgttctattacctaagcattgcttgatataattatttactttcattttcatattgcaaatttagtcagctttatctgaaagctagcctgtacaaaattgctgttttgatgttgttgatcttaataagctatgattactctatatcttttggtttgaaagtagaattattgttgtatctttacttatcaaaaaaatgaaagtagaattattgttgtatcttcttctaattgtttatgtttaacttcatctgtctcatagttga

SEQ ID NO: 10686 - DNA, 1983 bp, Vitis vinifera
  Intron number 1 from transcript GSVIVT01027130001 (locus G SVIVG01027130001) derived from phytozome v7.0 (chr-ID chr1 5; pos 17583778 to 17585760)
tttaccctgtgtccttataatttattttaaatattttaaaattttagatgataatttttttaaaaaaaaaatttagtttttaaaagtcattgttttttggtgtaattctctaagattttttatatttaaaagaaataataaatgataaaaattgtggtatatatatatagagagagagaaaaaatatatattatgctcaacaacccatttaaaataatgatttatatactcaaaaacagtttaatatgatgatttatttagctaaatatatttaagaatataaaaaaatcatgatacagatatgactactttttaattatttaaaaatatttaaaattttatttacaagtttatacttttcttatatttaatattaaaatgttaatttaattacaaaaatgattatgtagtttgataaatttaaaaaaattattagttttaatattttagattataataaatcgattttatgtgcttttataaatatcaatgaagtttagcttggtggtgaagtggcatgataaaagttgttttcctttatttttcaaattataaagaataaaataatatatatatatataagataaatttcaccatacattaaaatttgaaatttcattaaatctaaactttttctttaataattttttaaaactttcatatttacccttcattttctttctcttgtatttattgcggaccaaacttgtcataaaataagtcaaattcgtttttgatctctctattctctagcaatctcaaatggacccaagattgaggccactctatcaagacttaaaaatcaacacaaggatcaacaaaatgtgtggacattaacatcggaatcataaataatcaactacgtaccttttttatattaaatattaaatgtcatattagaacattcttcaaaattgaaaataataaaagtagaaattcaacatcatacctctgactatggccatcaaattcacaatttttgggagtaaataaaaaacataataaaattagggatttgtttggctagtttttctaagaccttatatcttatgaaaactcacaaacttcctataaactagagactcttatctatataaagttttaatataaaatatgatattttcttatattttctttccatcaaaggagacaaaataaataccaagtagtagttaccactaaaagtgtgtcatgactataaaagatggttacaacactaagagatgtgtttgtattcaatgtgtcacatgttttagggaaaataatgtatttaaatttaaatttaaatagaacacaaaacttaaaacatttatcttattttatttaaaataaaaaatatttccaacatgtcacacacatgagatccatgctgccataaattcatttccaaactagttatgaaccataaatgacaagccctaacttcacctccacttgctataacaagccctaacatgacttctactgctaaacattgaaaaaggatgttgatgttgcgtctaaaggcatcttgctttattaaatatttaatttatgtactatcattctcattgacattaaaattaattatttctaaaaaaaaaaaatcaaaagaaaatttcccaaaccatagaaaagtatttagcattaaactcgatagagttacaccacatatttgtagcttaggatcacagggttctcagaaaaacacttcaaagtacattcttagagtgtatttgataatatttttattcaaaatatttttaatgaaagtatattctttaaaaatgttttaagataattgtctatcaaatatttcttcaaaaaacaatacaagtgattttttaacactataaataatttttcacatttgtaaaagcgtttctcaaattttatcaaatacttaatataaaattaaatgcttcttaaaatcattttctcactcttattcatgacacaaactaaaaatatcattgtggttttgtgcattgcagactatcaacg

SEQ ID NO: 10687 - DNA, 4914 bp, Vitis vinifera
  Intron number 1 from transcript GSVIVT01038689001 (locus G SVIVG01038689001) derived from phytozome v7.0 (chr-ID chr1 6; pos 20988283 to 20993196 reverse strand)
gatcctctagggtttcctctccattcattaaccaggtttttctctctatctctaaaacccctaactctgaattcgaatttttgttttcaatttctctatatctttgctacaatttgattgctgcaagaaccctaatcttgaatgtgttgtcttcatcttaacttatttgtattgtttctaccatctgtttcagacatggcttttgatttaaaatgctgttgtgtctgaaattgcatttgttttgtttgaaaatttgttttgtgcatatctctgcatagagcggtttgttgcgagcgcttctattatttgaactcatcaatgtaagtgtttggatagaatttaagttaagaagtcgtaatttttgagttgtggatttttcaaattgaggttgttttaattaaacccaatttttgacctgttttcttttggtgttcattaattggctgcattgtatcagaattgattccaaaacattatgtgggtagttttctctatggagttgtggagaggaactagattttgagttgacattgttaacaatctagaatcagggccagttgtctagacattgtgttttggagtatattccctatagagttcatttgcaatgtgcttgccttgggcgtaaagtcgatgatttccttttcacttaggctatgttttgtttcggaaacatttgatggaaaatgcgagagaaaggaaatagagaggaaaagcataaggaaaaaaaaataaaaaaatgaaggaaaataaaaaaaatcgatttaaagtgaataaattattttatatactagtttaaattcatctcacttatttagtgtctgtttagatatgcttcttgtttttattttgaaaattagaaacctatatataaaagtagaacatcttatacaaaaagtatatatttaattgatgtctttaaaaatcatttttagaaaattttaaaatttaaggtagaaaaaagtttttgatatcttaatttttttgaacagtttttaaaattgttactctttcgatgtaagtttctaagagttcttgtatcttatttaaagttactactgttttctaattttaaaaatagaagataggaagcatatccaaacagacatttaactcttctatataaaaattaaataatttgaaaatacataagtttccaactaattttaagtatatatatatatatgtatgtatatatatatttttttttccaaagtaaaaccaaacataagaaggccattttccttaccatttttttttattcccttagtactttcctaaaaccaatcatagcattaatatttattctaagtcttgtcttactctttttcttttttcttttgctttcctctattttgataggtagcatttttccccttgttggaattgaacctagggcatccatgttcccagcctgaccccttgtcacttgtagaagccctcaaaattcgactctcttgtcaaattcctacctaaaattatgtaatcctctcaaaaggatttactaactttccatctcacatagtgaagaaatggcccaaccttcaatgtaggaagtttattttcatttgaaatatgttcgacataatcatgaagtagcccatacttaggttcaatagctctcctcattgcattgctggactaagtggtcttaggatagcccttgtttactagataatgctttaaataacaaaaagttaataaatgaacacaaactttcaaaacaggtttctagctgtatataacaacatataggaagtaaaggtcaagtgagcatgccactgttacatttgggggttagacgatactcttaactctctacatcacatgttttaagtatagctgtttcacatggttttcttgtcatctcttgtcccaatgctaatgtctccttcagatgactgaattttggttgaaacttgaggtttctgatgggttggtgggcaatgaaaattggatatagtaatacaaattataaagattcttataatgcatcaaaccatctgctcaaaaccacagtcaacttcctgtgagtttcgattactggcctcagtatcaattatattctagaatttgctaaacaattcttgtacaccttttcattataagatgtgttgtattttattttattttattttttgaaaacaggtagattttctgaccaattcccccttcaacaaaacagattgagattgtcttcttcttttttgttgctttatgagttgcataattgaatactgattaatagatcaacctcattatgtgaagctggtagcattcttttgagatgtagccatctttattttgggcaacaaatggggctcaatgcttagtagttaaatattcttggacccaagaatcttggccattaaaatatgtgaaaaaaacacataattagaaacaacactttaattatcttgaatggttgaaacttaacaaagttatctaggatactatagtaaaaattgcagatgaattttattgatcaccgaggatgatatacaggcatctaggaaactagaaatcaataacaagtaagatttaggtggcgtttgtatttttggctttttgctgcaagcaatttgctttcaaaatttaggttgtttgtttttctagtttttgatgacttattactgaatttttaaaatttttgactaaatagaaaaagcattaaacccccccaaatcaacccgacgcccaacaaaccctagcccatcctctgcaatgttgaaagccaagcacgcacaaacaaacgaacccatctgcaataaccttgagattggagtccatgacgttggggtaaaaggatcgggaaacggactgcgacaggttcaactcaaccaattgcgagaacctcgcagccatcttgcgaagcatgagaggccccgccctgacacacaacttcttccgcttggtgctctgcaaatgaagccatctcttgcaaaccaacccgacgacctccttttccttgtcgctctgcagtttcgccagaaccgcccgtcgttgatgcaaaccccagatgcctcctccatcctcgccattgatgacaaagaaatcttagaccctaacctcagggagaagagagaaaacaaaaccctaatttcgaaatggtggattatgactaatcgaaaccctaatctgcccttcgacggaaggccaaaaggaagataaagaggaggaaagtgggagtgaaattactagaataatgcttaatataaaaagacatttgaaaattgaaaagtatttaaaaataatttgatttaggttttatcaagttattattttttagattattaagattaaatcttttattttaattatataaagaataaatatattaattattttttataaggatgataatgataatgttaaattatttattataacaattttattattttgaattttttaaaaatatgctaaatttttttttaatacattaaaatattaagatattgatatttagtatttaaaaaaacaaacaatttaatgcttaatagaaataaaatattaaaaaaacaaacaacttaatacttaataatattaagcattatttagtattaagttaaatataagttctatttagagttaagccaaaaaaacaaacgccaccttagtgcctgttttgatggttatacacacacacacacatatatatatatatatgtatatatgtatgtatgtatgtatgtatgtatgtatacatacttacacacacataaattacttgtccgtcactaacacattttaagcgggacttgtattgctattgcacacacttggatagttatagtggagggaagcataggactcgtccatgccaattggaaaattatttatttattttttataagattttgaagaattattgatgttgaaataagggcctaaaaggatttaaaatcatttatcagtatagaccaattagaacagtgaaacaagaaaattaaatctgagcccaattcctgaagcaagaggcaaaagtttggtgattctctgtgggatatgattcatacataaaggtgaaacttgtagtgtaatgtgtttacattaaagtttgagatccccacctgttctgatgtaacctctactaggattcttcatcatgctatgtgtttgggggagaaacaaattcactgttcaaaaggaaaatctttcgaaacgatttaatgcattttcttttgctttgggaaaagattattttgaaacccttgaagatgatagcaaaaagaaaattaaggaaaaatgccttacctctgcagagcaagggttttcattgatcttcttgtctgcccatctttagatattgttgccacccctccttaccatagctaatccttctccagttattctttaactttcaatataaaagaaacaaaaataactttctacaaatgccttctctgcatccagagtgctttatgcatataattcaaaccattttttcttactttcttgttctgtttcttcttcagtccgtggcttgtcaaaaccaggtgaagttggctggccatactgggtcattcaatttttttgtcaattgtagagtactggtcccagtttcatactggtcatgcgtgccagagattagtgtgttgatcatatattttgaatccttgaacactaatgttgactttgttataattttgtaatcacttgaaaactgataagatatgaatatggctatgaatttcacacccaataacattttgccttctttgtcatttttcgaagagtaaatgtagtatttttagaactcagtcatgaatggtcttgataaagtcgagttcttgcctatcattactaaagtgataggatttctttttcctctcctttattttttctttgtgggttggtaactttcttctgtagttatatattgcttacatatgaatatgtgtattcaagtag

SEQ ID NO: 10688 - DNA, 2259 bp, Vitis vinifera
  Intron number 6 from transcript GSVIVT01005930001 (locus G SVIVG01005930001) derived from phytozome v7.0 (chr-ID chrU n; pos 22812176 to 22814434 reverse strand)
tcttgcctgtgctagagaggtcagtagttacattggccttctgctttagatttagagttgagttgttttttgacatttgggataaaaaaaacttttattctgaattaagtttaagcatgatcatttttcaagatcgatggaagaattaagtggatgtgctgttcttttgaagtaaatatagactctaattactttggcctttatataaatcttaaattgagtggtgcagcaacaatcagttatttttgttgggccatagtcaatagttatcttaggatatttgatttaacaggtggtgaaattttttgagaaaaaatcttggtgagagcttacaaaccttatggtccaaaaccttttggggtcacatttattctaggtgggtcatatgattgtgcaggatcttatgtcagtggaaacattccagctgtttaataggacctcatatcaatgtcctgaatgtgatcctgagacataagatgttctcttgatagatgaattatttatagtggtaattattgcctttaggatctttggtggggacatatttttactagatttgtatttctgaatctcccatccagaatgccattcagtggcaagcaagatgcatcttttgtgaaaatgtcaggctttctctgttgatcttgattccaaatgctatgttgttactgtggaatggtaaaaaaattaaccacttattacttgccagaaatttgtgtgtgcagtcaattctcacttaatgaggatagaatcattatctaaagaatcctctttgttttttattgttacttctaactcaactttcttgtattgtatactcctgcagtaggaaaacaactggatttgcttgtaaaaatgtcaaacttatgccagtaagagtgaagaattggaagttttcacaaactaatccccactaggacttgatggaaccacaaagggttcgattccatgtactatccagaaaaaaaggaaaaaaaaattattacatattaaaagaaaaaaatggagaacataatgtagaaaacgaggaggatggcatgctttagaccagcagacatattccttaatgtgaagatgctcgagtcttccttgtggaaatctcaccatgcaccgagggttctactcacatgtccaatctttttttggacaactcacattgtttctagttcaactagaacattgcaaatgtttatgtttggattaaggtcctatagtgtttggatgaactttaatagcctcaacagtgcatattgattttatttgtcaaaagcttttccatctgaaatggtatgctgagataaagaagtcttctgccataaagcatttcttgatggatgacaaggagtaacaggattaaaagtctaatgaagagtctatatataattataggtggccattaattttttgtagataatcttcccctttttcctgggacatggaatcaaacatggaacctctccatcttttacttcaattccttgccatctgagctggacctcacatgcatatatgtgtgcatgtagtccccaacataagagtaaggatggagtgcagcatggccaacatgcaccagatcatggttcttaggccttagctagcataagcaattatgggttttagagactgttgattattctgaaggaaggggaaatgacagaattatcatatccaaccccaacagtcccaacaatatgacaccttttgactgctccaactctagagtaagttcaaaggttatttcccatagaataatttcttgaagaggtatctaaaattagggccattcaaccaagagttttacaattcactcttcaagccgtcaagtagtgagagagtttgtgttcttgtgtataccttgttattttaagtgaatttatgtcttgcaacaaaaccactttattagagtgactatatatgaagtcttatgtcctttgagacgtcatgttttcctagtaaaatgtggattattcaagatacagatgtccattagacattagtaatcccccatgtttttaagtggacaagagcagttataacttttaatgctttacccaagattgtgaaagttgtgaatcttgtgatatttatattcaattgaattcatctccgagccccttgataataccataattttaatttcagcataggtttgttgttattttcaagcgtaagtagacctgttgtattctttttgatctttttaccttcatttcacttagtaaattttctggaagtgtaacatgttttaaatggtcagtt

SEQ ID NO: 10689 - DNA, 4167 bp, Vitis vinifera
  Intron number 2 from transcript GSVIVT01023623001 (locus G SVIVG01023623001) derived from phytozome v7.0 (chr-ID chr1 1; pos 8136014 to 8140180 reverse strand)
cacgttcgaaggtgaatgaaacaaacttatgttctgttcaagaatatgttttatatgcaggactggttcttgtttatctaggcaatgtgtgcatctatctttgatattaagtaataataaaacttctcaatgtgtatgctaattatcatattctcttatgtcacatttttcatatagatacttgggtgtcattttagtgcacttttgatatatgttttgtttaaagaggcaaattttttttttttccaagtgtttggttgctaaatatttaacttttgtttttaaatttttcaatagtatttcagacatatatggaagcagaagaggtgatttctcatattccaaaacagttctaaaaaacgtgaacattgaactttaaaaaagaggaagaaaatgtttatttgtgctatgaacttcctattatttacatttttatttgtaggagaggttgatgtttttttgataggtaaaagcagttgctttttgtgtatccctcttcttttttggccttaggtgccttgtatacattgtgtatacttttgcgcgcccttgtataaaaaacatttgttaatgtttgaaaatagatgactttccataattactttttacttcctgcattcacaagatatactcttttatttactctcttttatctataacacattttctttcatctatctattaaacaaaaaagaaaaaaaaaaagaaagatatactcttttatttgtttcttagaaacaagtaaaatcttaccttgccaagcatgccttctttttcgaaagaattataaacggagtagaaagtgtttgtatttcttgtttttgaaaaattgtaaacagtatatctaagtggcatcttagtttctttgttttggctggagatagtcttttcctatacatctccatcatgtgaagataaaacttagatcctgcttaagcatgatagtttacagtagatttatagttggagcattttaaggaatttcatgtgttgcatggagaatttcttgaagaactctaaactaaatatgagtggtagattctggtgcaatagaaaatagttctagaacatccaaatacaaaattcttacataatggcttgtcaagaaatcaaataatatgtattgactaaaccccaattatagtttccactgttaaaatgtccattttctaaccagcacatagtgtaacatgtggaaccaagcaagggagagtagagatttgtaagtaaagcactagtaaggagtgaggtcattttgtatgcataacttgggagataatgattgtgaatatcatgtggagaatacatgattgaatgaccaaaaagtttaatgatcgtgaatgaaaaaatgagatttgtttttaatatcaattctttacactctaagatgcatctttgctatgcgattttatcatgtcatgttagtaaaatgaacatttacaagtttcatcattctaatatatgtcttcaaatatttctgcttattttgtgattttctggatgcacacatatttatttgtgaaatatcatggcatgatagccatctattttaccaataaaggaaaatgaaagaaaagaattgtggtgtaatagctgatgtgagccatgacctaatgtgtcactttcactttggaatgttctttagtgtgttgaagatacttattctagtaattataatactgtcaaggattaaatgtgggctacttgttacctatcaaaaatgaaaaataaaaaaatgtaggctacttgttaattcatgccaatggttaaatagagggtaatgatgccaaagaatctataatgaaattgtgcatcttctggatattcagttgccaaagaggtgtgtgttttagctcaacttcctatcctatttatatatgagtgatttaagacttgtgtgaagatcttgcttaccaaaaaaaaaaaaaaaaaacttgtttaatgatcctgtaggaaagaataggcattgttatgcagcagacatgctatcacatatataagaaatttgtatgttatgacagatgatatattatgaaaaactgttgtgaagaacatcatctgcctgctttacatgatgtcatatgagaaccatttgaaaattttaaagtttttatgcacagaatcatatcttgcatcatgagagttcagaataagggggaggactttggtgattctagtaaactttaggcttaaagaactctggtaggaaattagtcaaatggcagaaataatttcctttcctaattgatcatgaattctgttgttagttttgtctgcttactggcagaactgaactatgcatcttcctgaagcagctgtatcaaaattgtactggattttgatgcaacagcagaatttccaaagttttctgtctgtttatgattaatatatttgttaattttttggttaggaatataaatatcccatagatcaataggtgaagcaggatgtagattttacagcagagtactagctcatttaagaatttttataaatcagaatgccgtttatttttcagtgttataatttcctggagtatgtaaatcaaggataaattttgagaattttggcaaaacttgtttagttactaatcctgtgacttctctaggtttttattctcctttgctccaaaattacatgtatatcgaaggcacaatcttgctgtaaacagcagcagtgcaggcaaggagagctgaagactgtttctcatgccataactatcccacattctactaaatctagtatgtttctatactaagcatgtgggatacttccaaacatccagcatcaccacgtaacataacttttcaacaaaataagtgatatgccactctgtaaataaagatagccaaaaggttaatcaatacaacttgaaattcaactataaaattctaaccatacacaaaccaaaacatctaaaagccacaatacttacagatagacaagtgttcttcaagagatttaaacaaatacgtctaaacataaaataaactctctctagcaaacatctttctctaatatggatttacaatcataaaaagttatgcctgagtcttcatcacaaggaatagaggaagaatttgcataagtgagtcattgaagagctgctacaagcgcttgtctttgtcaatgatcttcatgtgtaactgtatacatatcatcagcagcaaatatacacataagttgacaatcaaaacaaactaagaagtctgatgttgtcctctacctcaagttctggtgaggttctagcagccttaaggttctcaggcagccttcccttgcaattccttcttgtcctctctagctctcaaactttgttaaaaggtgggcttatcatggagaaatgagtttatagaatgtaatgtctgtgaatcgaaatgagttatggggtataagggctgtcctttagtatgtagaaccgataagagaggaggaagttgcatggctgaattaaaagaatctgaaagtcacaggtgtagatgagttgtgatcctacttatcaaaaaaaaaaaaagatgagttgtggtcctggtctgtttttaacaacatttctggtgtattatagattatttacattaaactcatttaagtaaatggataataaattttaaattgattatgtaataatgtaaatctaggaacaacccccatttgagatcaacataaatagttgggcaaattaattcctcctagctaacaattttaaatattcacttttagttgaagaacaattttcaggtgcttgttagtaaaatggggaggggggaccaattcaaggtatttgtgactaaaaaggtcagttagatattattaaacttgaactttaaatcccaacaaaaatgatttcaagattacaaaattttgaaaatcacatatgaaaatgcctgtgttagatattacagtttagtaccctgcacttgcaaactaacgctattatgtaaaataattgaatagacaactggggctttattcatttataatatccattatatcatgattcatattgtactgcaatataagtttcatttcatcaacatgtacttgaaaggaagctctttatgttggatttgtatttatttgcgtggatgaagtgggtttgtgattcatattttgcactttgggactaaccttattttctactgattctaggcaggatttcttggcaac

SEQ ID NO: 10690 - DNA, 7913 bp, Vitis vinifera
  Intron number 5 from transcript GSVIVT01023441001 (locus G SVIVG01023441001) derived from phytozome v7.0 (chr-ID chr1 4; pos 11874557 to 11882469 reverse strand)
tgtgtcgagctacaggacaagagctggtatatattttccatgagttttcctttttttagataggattagttttttgttggttaaataatttcaaggatttgtttcagtttatttatgtatttttctcacttatcaaaaaaaaaaaaaaagtatttttctggactacttagttgcatacttgctacatatagataagctattactaaaattttctatatcggtgttgtctattatattataccactttattttgaaatactagaagttgattaatttgaagtcgaatacctttgtggttaagtgtcttggtaccgatcaaatctcttgtagcatttctaaaaagttatcatgtacacgcaaatatttaattatttatgctcttgagtgttagattgttactaaaatagaaatgaagacaaataagtaaatgcaaatgaaagaaaagggaaaaaaacaagaagggaaagaaatctgcattattgtagatgggagatcctttgcttctcatttactatgattagttgcagcactcattttctcccatatatatatatatatatatatatatatatatatatatatgtatttaaggaaaaacacattcctttgcatctaacctaataataagataaggtggatttataaataatgatttgggtttttgtgtatacaattacattcattttttaatttagaagttaaagggacttgtgaaaaagagatcctttgtgtctgttacttctcattattgttatggaagctttgagtggactcatcaatagtgctattggtggaggtcccttctagatttttgaggtgaatggaggagtcaaggtagtaatcagtgcacttataaatatggcaatgaaaatgtttttttttttggcagcatggtgaatggctacttttgtttttgacactcctctcacattgttttgatttggttatgttttggctgttaacttcaactaagaggagctgattctcatggatgagaagggtatgtgtattggtttataacaaatctttggtgttgtatctatagcatttcttcaagctatctttaacctatgtaaatccaccttttagccttattgcatctcatgatatcagagtaggactatgatgaatgctatgacaatagtcagaattctgcaccacctgcatgattcatttatccttctccttgtaaattgaaactcttagcttagacaaagtgttaaggagctttgctttcaaacttgtgacacataagatggcatctagtctcaggattttggatatttcaaatgctaccaagtaccatcttaaaagtaacagcttcatcaggtaaatcctctcaataaaaaaccatgccgtttctttgcctttgctttcttttggactttttatcaggacagtaactagcagtatgacaataactttgatgcttatagaactaagcaccattagcttttgtttcctcccttttcacttttctcctttttattgctcctagattgtggtttggctctctttttagaagactcctttaagtttttacctcttttgtcatatcaaattttctgactcctagaaaagagatccaaaattgtcatgaccaggagtgatcatcttcacactcatcgttgccctctcgggaagtttttatgtctaatgccctaactatttcttagtttgtttggacaaaaattcaaatgtctaaattttttttttttgattggatgtgtctaaattcaatcttgagaatatcaacgttatgtttattctgtaccatagcagtggctttagattggaatcttttgggttgagattttaaatccttttcctgatattttagcttcaggaaatttgtcattaagggttggacaagaattcatggtcactaagtttgttataaaatgcactaaatgctatctttcattttagtggtcagcttttgatggttgggagatcttcacattgttggtttgctcatggttgatttcaagaatatcccacggtttcgttagttatctcacatgtagaaattcaataatgtttattagctgtgacaacaccaaagatggtattttgggcattagggttccagtgacagtgacagtgacattcactttctcttcattgtgattaggcctttttcagcagctgtaccaatcatgcccacgatcaaatgaagtgaaatttcaccttggttcatgataaatggttttttcccaaattgggtaatggtatgcggtatctcacagacagatttaagggaagcccttgtcttacctctgtaagaggtatagttattttcatctgataatcaaggataagaaaaatggaattgcccacttgttgagcattcataactatttagttgaatagaatcactctcacattattgtatcatatgagtgaaccttgctcagatagcaattaaaaatctggtagcatagtccagataaaattacctgatcaggaaaattacctgtcttcaatctggaacaaatctattatatcgataatgaatcacctagtccaatgaaaattgatgaaatatattgaataaactacattgagctagaagaaccaaattagataaaacatattgaaggccagtcttcaatctaatcctaattcctaagaatcttcattcacacaatcaatagacctgagggattttttgacatgaaatttctagaggaaaaaccacagtgaacctaattcagagacaatgcacattgtctaaaataaggtaaaaaagagatccaacttactcaaagctttaatgttgattaatctgatcccacttttgtagaagacgctgtaaccagttcataatggatcatttctatgatctaataatgaaccaaacccttgatccattacatggaactattcaaagagtttctacccaccaaatttgttacaccaaatccatccttatgcatgagcacaataagcataaacaatgatgataatggttgtttttctcagaacacaaaatttctttgagatattcctttttctttcaaaatttgatattgagaggttaaaactctgattccacactcaaattgaatatgatgttttgttgaaggagtgcatctcaaatatgatgagcaataaacttgatcacatttcactttaaggaattaatcctttgagtgaatgaataaaactggcttcaatcaatggacgacaaagctcaatcaattggtcaaataatactctattccttcttgctttttttttttttgtgtgtgtgtgtgggtgggtgggggggtgggggttgggtttgggggtcttaagctatgtcacatgggtttgggttcaggtacatgtttggtgttggatcctttgcatcccaaaatatgatgacattggatttggatgagaaggttttcaactatagatgtaggtaattggatacaacattaattaaaaataaagtgacactaaatataagtatagtaagataagtcattgactcatttacaatgctatatggttaattataattcaagaatatgtttgttttatatatatatatatatatatatatatatatatatatatatattattttggtaagatgctaagcttattttactttgatgttactactaattatacatgaagaacatgtttattacatgtttttattttattttaataggatgttgggaaaaatatttaagatgattatactagtaaactttgattagtttaaattttaaaaaaaatcatattgattttgtgataaaatttttctaataggttagatattgataaaatataactcatttaatttcttatcatatgaaagttttgaatttgttttttgttattatattttatataatttaaaaaaattaagaaatatttaagtttttattacaagagttaaaaattaatttaattttttttatatttttcatgatagtttattttatattatcgagtataatttttaaaaattaagaaagggataaagatagaaataaatatatctaaagcaacataagcattattttagaaaaaataaaagaaatagataatgcaaataagtaggatgctggtaagagcaagggagagaggcttagtagagggtttccttgtgagcaggagtaaggctagagtgtcacctttgcaatttacaagtgataccaatttttctttggagcttctatggtagatttgcaaaacctcaaactaatcttgttggtttttgggcgcatcccacaaccaaaaatcacttagaaaatagcactttttgtggcattaacatgagttaggatcaaagctttagtttggcttcgatgttagattgtaaaatctcaaactagcctttaaattatttgggtcttccattaggaggaaacttgaaggcaaacacattttatgatccagttatttatagaattttgaggagattggatgagtagaaaaaagcgtacttgtctttaagtagtagaataacaccaatccaatcctgtttgtcccacattccttgctatttcctatcccttttcaagattccaacattagtggcatcaaggctttgagaaattgcaaagagacttcttgtggttaggggttggataagagatcacctcattagttgggacctagcatgtaagcctaaggagtatagaggtttagggttagggaaggtttcttcgaggaatcatgatctcttagggaaaaggcttgggaggtttccaggggaaaggtttgacttttggcctcaagtcattttgagcatctataagacatatcctaatgaatggaatacgaacattctagttagatggtcacatcggtgccccttgaagacccttgcataggttttttaatatatatttttttttttccaaaactcactttgttgtgagtgagaatttatttttgggaagatttatggtgaggggatcaacctttgtgttgtcaatttccaagatttttcagagtaatcataaagaaaaacctttccatctcagttatccttgacaacttctccttttcttcttggaaccttaatttttattgtaaccttgctaatttggagattaaggaccttgaaagacttgtgtcttccctcaatcatgtgcatttgtcttcatcctttgcagatgcgagaggttggtctttaccctccttgggtttgttcttagtaattttttttttattgtttgtttgtggccttgtccaatctatcaaatttatgccccttttctctagccaaacttgtatggaaatccaaagccctaactaaggtcaaggcctgtgtttggcttgtggtacataaaaggtaaatatcaatgacatactacatttgacaagaccttacaatgcccttagccctaactggtgcataatatgttcaaggagttgagaatagttgatcatatttttttacattgtttggttactatgaaactatgacaactatctatttagacaatctaggctggaattggttcagcttaggagcatatatgacatgatgaccatctcatttaagggtttcagaagttccctaagaggcaagatcttatggcgaatcacttgtctcacgctgatgtggtttgtgtggcggagagaaatgctaagtggagagctacagagacactttgggggggatataatccactttgattcattcatcttttttggcctcttgtacatttacttttaaagacattcctctcaatattgttcagcttgattggttctcaacgtgtagaacaaaagagtctgaatagcaacgagaggagttttgtgtgggctagtggagaggcttttgtatttctttttagtctaaactggttggctaggtctcctcgtattgtggtagagtttggccattttaatcagctttttgtaactatggggaggactccttatccttctcatgtacttctatgcataataatattaataataccgcacttgtgtggtatcatgttgagatgggtattttagttgaaattaaattgtctatgtatcataggtctgaagtaagacatgtcaaccaggagctaataggctcaataggggaagattaatggctagaactaaatcacctaacgttatggtctgtaagtgtgcatgttggtaatgccagaaatcttgaatggctcacttgcaaggctttgtcctcagaacttgatgtgaactagcttgggctaaaattgacttaagcctgcatactttctatgtccagaagttcccccaaaaaagaaacgctgaaatgggtcatccctaattggtgggtcatggcatctagtgtaaggagaacatgacattggtttatcatctcttcttttgctgttgggtggcatctgatctttgagcttctattttgtccttttgatattatttggctaatgctgttggtgttattatattttctcttgggttagagtattattagtgacaacaagagcaatgagggtagcactccatatgtatgttttgttccatttggaaggaaatattatgttgggccaaaaagggaggctgtgtatgaattaaagaaaatgtcaggtacctaaaatttcatcttcaaagcacacaaaaatgcatcaagaagttaagaggttgtgtatgaaatattcttaaggccaatcaaacacaggacactgatgaagagggaaaaaccacactacaaatctaattgctcatctgctaaatcagaaataaagaattactaagttctctcaagtttcttctacctagaacttgaggtattacaatttcttggaaaaaaaaaaatacaactggtacctcatgagattcctactagtaactttttggagaaaccatattctgcagataaatctgaaatgacggtgataataccacaaacaactctccaaatcccatagatcttgagaaccaaatcagaccttagagaagaccatattttgatattgtatcttcactggttggtttcttttctttgtctctgatggtcacagcacagacaactgccacgcagaaaaagaaaaaaaggggaaaactaccttttttcctgttctttgtttagttttaaataaaagccttgtgcagctggacccataaattaatatacatatcatgttatatgaatttttgaaggtaaaaagcttccttaggcaaagttgatagttttttctgagtgcttttacctttgggttagggtgaatgattattggtttggatttccatcttttaacttgtttgattctgttatttgagaacaattttcttatattagaaaacagaaaaacagtatataagtttaatatgctatttggttaagcattatcaatgaagaggaaaatatgaaccattttcaacgaattttcgtttaagcatgtttgaataactgttcttttgaaacagggtgtgctcagagagcacaaaaagatgccctcgaaaactgtttgaatactgttcttggagatgagatgtgttgcattctttgaatttataatttttcttttcctgctttttcagttccagtatcacctaatgggttcatgggctttgggccttcttctaagcaatacaagtttattttaaaaagatgatgcgttatttgtgtcatttgtttaggaattggaaaatttagtgttgtgtgcttaaatgggattgcatagatctgttgcattgcgtgaagcaactacaaagattatacattgatatataaaacagagtaattgcatcttaagtgatatattcttttcccaatacaaacaatattgaagtttcttctattctcatactgaagtttcttctattctcataattgtaagttccctaggttcacttccatatgttgttacagtatgctagatagacaatgaaattttccttttcatttgatttttgtttctcatagttttgaactttaccattttttgatgtcaaggtag

SEQ ID NO: 10691 - DNA, 1081 bp, Vitis vinifera
  Intron number 1 from transcript GSVIVT01029269001 (locus G SVIVG01029269001) derived from phytozome v7.0 (chr-ID chr1 1; pos 17770180 to 17771260 reverse strand)
gcataactcctggccaggtgagctcgtcagggtgtaaatctgtttttagatttttctttgggatttggtctcacatggttgactaattatttcagatcaaggttagacaaaaatagtctatgattttattctttgaacatttcatactattttagtataaaggcaaagaagacaaacttttatttttctatgatgtagaagagtttggatatcactttataggtaaaatcatcttaatttttttaaaaaataaactacaaaaatgaatttttgatgaactttcacttgcgtctcaatttaactttcaaataatatttcaaacaatattaatcctcaattatgcttaagtatcaaataagtcattggaataagaattttcgtaaaaaaaaaatggatgaaaaattctgtgttaaacactgaaataaattgaatatattcaaatatatagtataaaacttcttgtgatcatatacgtgttctttacattagggtttgtttgacaattattttaaaaaatagtctttaaaaactattttatagacaaaaaattcttcttaaagaccttaactgtttttaatattttaaaatatattttggaaataaattttatgaatggtgttttatttttaatcattttatgtgtttgtataattactttttaaaacacttttcacaaaacaaattaaatgaaaagatattctctataaatatcctatttttattcttaaaaatagaaaatagaaaaccaaaaacaatttttggttgttaaatatattttccttattttttgttttgaaaaatagaatattgttttcgaaaatagttatcaaacgaatgtttaatttttatttttttttgcaaaaataatttttgtttaaaaaggttttaggaactaaattgaaacaccctccatcttgaaaaaatgggtagagctttacataaaatttataaatataaaagatatgtattttcttgaagtctccaaaaatcccaacaattgtggagttcctgcttgatgttcttcagttggccagcatagtctaagaagtaactaataaaaatgtacaggccattagtgctc

SEQ ID NO: 10692 - DNA, 782 bp, Vitis vinifera
  Intron number 7 from transcript GSVIVT01019542001 (locus G SVIVG01019542001) derived from phytozome v7.0 (chr-ID chr2 ; pos 1465188 to 1465969 reverse strand)
gcatcaaggacctcaaaggagctgctgaaaaagaggtatgctcacgtcaaagttgctctagtgtgatcaactactttccaatttaactttttgggttgattcacttgatatgtggaggatggcttgaaaagttatcaacttggaccctcttctgcaagttcagaaaagatatgaagcatttgtgcacatgggcaggcctgctaagggaatctcctcaaatttaattttaatttaaattctcggtggtaaatagtagttcattaaaggacataaacaaggaacttaacaaggggatatgctttttcatttgttaagcaagctgagtaaaactcttttgactatgaataataaccaaaacacacatgcgcacacacaggtttagatttattttacagagtctaccctgatgcttcgttcacaagtattgactgagagaaaattatttggattctttttacaatgtctcctatgatgctttcttcatgtattgtatgagatagttttctattggcaaattggctttactgatcttatttcttgcatatatgctggaaactttaacaatgccgcaggtgatttagtttatatcatctggtgatctcctaaaaaggatcaatcagaatatatttaggatttaatcaacataccttgcttatatataaagattattaatattaattttgtagtccaaagaatgtgtgtttttcttcttcctcttaatcaaggaacagagaggcttaaagatttatgctagaagttgcttgtttcttctgtaggtgtgg

SEQ ID NO: 10693 - DNA, 20100 bp, Vitis vinifera
  Intron number 4 from transcript GSVIVT01021424001 (locus G SVIVG01021424001) derived from phytozome v7.0 (chr-ID chr1 0; pos 5179417 to 5199516 reverse strand)
aggtttgtacactaatcaagcttagcatgaattatttatattatttcaggtttgttaatcaaatcttagtgtcatcatttagagtgaaatcaagattcattttaggtggttttgctccacttgttggttattaattgccttggttgaatttcattagtttggattgcattggttgaatttcgttatttatattagttttttttttccaaaaaagcgaaaatgacaaaaaattcatttggtgaaattatcatatataaaaagggcaccagacctacttagccatgtcctgtaaaaatgacactaggcataaacaaggaaagaaactgtcaagaagaaaatcaccagcagagcacccagccatgtcccacaatttctcagtgagctggaagaaggatttctgctatttgagccagattcttctatcaagcaataaagaccgagtttgttctcttttaattttcaaactggctcttaaacctcctttaatgttctcctattacttcaaatgcatcatgctaagcacagagcagctgtcctacacattttccttctattgcaaacttcccatgcaaatcaactagggcttgcctaatagagaacatggaagaaaacaactatatcaaatagaatgcagatcaaagcccagaggtccctagtcattgaacaaagcgcaggaaggttattgcacttttccattccccttacacgtcatcaatttggaatgttcctgccttccccataaatcggtctatggttagaatccttctctgagcttccattcacatgaagaatgttgccattgtgggagccaaaccccagattttctttgaaagttactctcatccctgacctatctatggctccgtgaaaggattttggagaaattattatccaaggacaatttttcattgaaaatcatctctatattgattgttcccattcttatacagttgttccatgaaagaggaagcattttctttgtttcctaggcttgaatttcatctttttaatgaagcttggattctaaatcaccccctcctccctccatacacaataatatgcgtccatttcctagtgctcttctaatccaaaaatggttttgtaactgattgtttgtttcaaactccaaccaatttaagatagacctctatgagtctttcctgaaactactctaatattgtataattacctatatatatataaaaaaaaaaactctaatattgtataattccttccatttattttgtttgtcctccttgatacaaaccctcatatcttttatttccctatttgatttgcccttttatgcttcatcatcatcatccaataccataatttgatttttttttttataggtaaagataggtatatataaattaagagtaggaaaagtacaccaaagtacatcgatgtatacaaggagcacataaaggaaggcctcgaaagagaggacacaaagaaccaccttgactcacaacaagacctcctgcaatctacaaaaagcaaccaaaggcattgagccttcacttgcacatgctaacctaagttgaaagattacaaaaagaccctatatttttgtgttgaattgattttgtaaattcaggtaaaccacttgatttcccttttaatcttcaatgtcctcgatcttccttggttaaaagaccttatttttcttgttttgcattgacctcttttttttttttttgatgaataaagagaaatatattaaaagaaaagaggcacatcaaagaagcaccccagagtatacaggtagtatacaaaagtagtatacaaaggagagagaaaagaacccttaaccagggcctaaccaatctacaaaatttacaacggaagagggacaagagtcaaataaccccctagtcccaggcccacatattacaaaggaaaaacgatttacacccatgaatcgtatgctcctcgttttcaaacgccctattgtttttttccttccaaacaatccaaaaaaggtacaagggagctgaaaaccacactttcttcctttcctttcccacacaaggcccaaaccatcccaataatgcctctctaattgaagaggggagcacccatgaaacttcaaagagggaaaaaagtaagctccataaacttctggccagcccacaatgcaagaggatgtgatcaatagactcttcctctgctagacacaagtaacatctgttagccaaggagaacccttttttctgaatacgatccaaggttaaggcctttttccacgtagcctcccaagcaaaaaaacttacccttggaggcaccaaagaattccaaataactcttgtaggaaaatcccctagtctagattggactccccttttactgaagaagagattcataaggccatttttcagttggatagggataaagcgccgggtcctgatggctttaccattgcaatgtttcaagattgttgggatgtgatcaaggaggatttagtgagagtgtttgcagagtttcacagtagcgggatcatcaatcaaagcactaatgcctccttcatagttctgttgcccaaaaaatgcatgacaaagaaaatctcagactttagacctattagtttgatcactagtctttacaagataatagccaaagtgttatcaggatgtctaagaggggtattacacgaaactattcattctatttaaggcgcttttgttcaagggagacaaatattggatgcagttctcatagccaatgagatagtggatgagaaaagacgttcaggggagaaatgagtcgttctcaaaatcgactttgaaaaggcttacgatcatgtgagttgggattttttggatcatgtgttggagaagaaggggtttagtcctagatggaggaaatggatgagaggctgtttgtctacggtatcttttgcagtcttagtgaatggaaacgctaaagggtgggtcaaggcatctagaggcttaagacaaggcgatcctttatccccctttttgtttactttagtagcagatgtattgagcaggatgttgttgagagcagaggaaagaaattcattagagggtttcagggtgggtcagaatagtacaagggtgtcccatttgcaatttgcagatgataccatattcttttctaacactaatgaggaagatttgcagactctcaagagtttattgctagtgtttgggcaaatttttgggcttaaggttaaccttgacaagagtaacatttatgacatcaatcttgatcggaatcatctttctaggttggctgaattgctagattgcaaggcttctggatggcctattccctactcgggtcttcctctgggagggaatcccaaggcttgtggcttttgggatcctgtgattgagaggatctcgaaaagattagatgggtggcaaaaggcttttctatcttttggaggtaggataactcttatccaatcttgcctcacccacatgccttgctacttcctttccttgtttaagatactcgcttcagtggctgcaaagattgagagattgcaaagggattttttatggtcaggggttggggaaggaaaaagagatcatcttgttagctgggatgtagtttgtaagccgaaggcaatagggggtttgggatttgggaaaatagctctaagaaatgtcgcactcttagggaaatgtttgtggaggtaccctagggagggttcaactctatggtataaagttattttaagcatttacggatcacactctaatgaatgggatgccaacacaatagtcagatggtcacatcgttgtccttggaaggctattgcacaagtctttcaggagttttccaagtttactcggtttgtggtaagaaatggggatagaattcggttctgggaagacttgtggtggggggatcaatctttgggttcctaatatccaagactatttagagtagtcacagataaaaatattcccatttcttcaattcttagatctacttgtcccttctcttggaactttaactttcgccgcaacctatctaatcctgagatagaagatttagaaggtctcatgcgatcacttgattgtttgcatttgacattttcgattccagatgcgagatcttggtctttatcttcttcagggctttttacagtcaaatctttctttcgtaccttatctcattgctctgattctcctccagttttccctactaagttcgtttggaattctcaagtccctttcaaggttaagtcatttgtctagttggtggcacacaagaaggtaaatactaatgacttgctacaattgagaagacctcacaaagctcttagtcctgatatttgtaagttgtgcatgaggcatggagaatcagcaaatcatcttttcctacattgttctttgacattggggttatgacacagattatttcagttagctaagatggattgggttcctccgaggagcatttccgacatgctatccatcacttacagtggctttggtttattgaggagagggatagttttatggcaagcaacgtgcataactttaatttgggttgtgtggcgggagagaaatgcgaggatttttgaggataaagcaaggaatttagagaatctttgggattctatttttttccttgcttctctttgggctttttgttccaaggtttttaagggaaccccccttattgtgttacaacttgattggtcaacgacgtgtaattccgatgggttggtttggcctagagaagttgttcgttattacagtgtattttcttgttttcggtttcttgtagactagttttctttggtgggaggatcctcatccttctcttgtacttcttttttctattaatatattcctttgttgtttcctatcaaaaaaaaaaaaaaaaaaaaaaatcccctagtctttctggttccaactccttgtaaagagacttaacaaaaaatcttccgtcctttgccttagtccaaattacttgatcttccacatcactacaaaccctcctcccttgcaaccttaatagaaaacgctccacattgaacacttcccaatcgttaagccgccttgagaacctaggagcccacactccccttccaaaatggctccacacatctgccaccgaagcctccttagccgatgatatagcaaataaagagggaaaagaagtacacaaaggatcatctttacaccacttgtccttccaaaatctaaccctcctaccatttcccacagaataaaccaaattgtcgcttaacacatccccacctctcctaatagctttccacaaaccaaccccaaaagtacctctcacaacacgggacctccaacaaccctcttcttccccacactttgcacatataacttgcctccacaaagcttccttttccaccgcaaaacgtcaactccacttacataggagtgccttatttagcaacgccaagttcctcacacccaaaccaccctttcgtttatctgagcaaacaatagaccattccactaaatggggcttcctctctagggccccaccaccccaaagaaagtccatttggatccgctccaatctcaaactcacactccttggcatatgaaacagggacatacagtagataggcatactggacagagtgctccggattaaggtcattctgccccccttggagatatattgccttttccaaaaagaaagcctcttcctcggcctttcctcaaccccatcccaaattgcctcctccttataacgagcacccaaaggaagtcccaaataagaagatgggaacttgctaaccttgcaaccaaactcaagggccaattcctctacattctccactcttcctaccgcgatgatctcacttttgtccaaattcaccttcaaccctgacatggcttcaaaccacatgaggagccaactcaagtaggacacctgatcaatggaaggctcacaaaatactaaagtgtcatccgcgaatagcaaatgagtgatctccactctcgcacctcctctatcactaagttgccaccccgacaaaacccccccttccttcgctctcttgaacaaacaactgagagcctccatgacaatcatgaacaggtagggggataaaggatccccctgtctcaatccccgagaactttggaagaatcctgagggagttccattaataaggacggagaaactgacagtaccaatataccactgaatcccgctaatccacttagctccaaaacccatcatttccatcgaccaaagaagaaaactctaatttacatggtcgtatgccttctcaatatccagcttacaaaggatgccacctcccccacttttctgcatcgaatgaatcgcctcattcgcaatcagtgaggcatctaggatttgccttccctccacaaatgcattttgggacttggacactatcttaacatccaagttgttggcttcccttttttgataagtaaaagtaattgtattaagaaagcctaaaaaagtacacctaaaagtatacatgacgtatacaaggcaacaaggccaaaaagaaaagagagagcaaaaaatcaccccctttcttacattcttagatttcccttaagaaaaatgtatatttttcttccttattccatttttagatttcccttaagcaaaaattatatttttcttctatttaatttatgattttgtatgacaacccttgatgctacaagatggcactttgctggaactttaaaggacaaggatggggccttcaagtaagggcttggaggtcaaggctgaagaggtggtttctcctaaggacttgggaggtggtggggggtggaatttgctagccttcttagtagttttttcaagctcactaattgtttggggatgccagttgcaggctatgagaaggagctttgttctcttcttaggaaattgtaatcaagaaaagggcatggagttaaggtgtcagggggaaagcgtaagcccctggcttcatcttggtttgagagggagatcctgaagttaagagtgctcaatcaactacagtgccctaccgtctactacaaggggaaaggggagagggatgctaggttggaatggttcaggatcgtagttagacaccttcattttttggcccttggaaagggtttctttgttggggttgagtgggctatttttatcttgtttgggccttcctgttaagggcttcctcatcttcttgggggttggttgttgttagggtggtgggtatttgtttttctcttttcttctcttgcttgccttttggccttatcaatatacaccgtgtgtactttgttgcgcctcaaaggaaagttgaacatagttgttttgggaagagggcttttgctatttgagtttgaattgttaagtgaagccgagcgtgttttgttaagagggaagagaagggtgaaagacaatgtcttatttttgggaaaatggcacccagaggtggggtgtttttgtaatggagccaatgctaacgaggcttgggtgagagtggtgggtcttcctcttcatctatggagccgcgaggtgtttaaattgataggtgatggttgtggtggtctcattgcagtggatgaaaatacggattttatggctgaattgcaatgggctagattgttggtgaaggtggtcggcagggatttacctaccttcgtccagttagtggtggggtcggggtgtttttcagtccagctgtggtgggaaaccccgccttggttttttcaggtggtgccgacgggaagtgtttatgagaagggtgatatagaggatgaagaagaagtagggagtggatcatgtgccgtgtgcagaggaagagtgttggaaaaggaggcacaacccatggtgcaggttggagtatagggtgagttgtcctgtggaagctcttcaaaaggagctacagttttctcctctgaccccactgtaagggggcctggtatggaggcgactgatggagaagataagctagggaataagggtcaaggtgcaggaaaagtggtcaaagggggtggatttggtttggggcccaaagttcttaaagttgggcctgttcttggggaggcccagtttagaagcgagattggggaaggaagttataagacagcctatgaggtagcccagttgtaagggccggtggaatcaaggcccattatgttaaaaggttggcagttgggttgtgaagagaggcccttttacattaagggctcatttgtgggctgtgagggtatgtccggaatgggatttcgacatgcgatagaggggataaaaggagttagggctcattccctttttgaggtagcggagatggaagctagggctacaaaggaggcttcgcgtgctcgtgttagagaggacgtgggtgtcgcctgctgtcacggaggggattggtgggttttagaggctcttctgatgaaagctagagcgctgataactgacgaagcgttgacatccgaggcatccaggtacgagccatatctcgctgacttttggggggggggggtccgggacatcttctcttctactccttcttctgggtgtgatcgggctttggtggtgaggggcccttcgggattggaagagactattaaaggtgttggttttcaagctccgttgtgcgtagtgttgaatgatggtagtccgtgggtgatggactcagaggaggaaaagtctaagggtaataagccggaagctattgaggaaatgcaagaaagggaggttcttggtagtaattgggatgaaagtagcttggtgaagtttagtaagtcattggggttctcaacagaaggcattgaaggggaaatcctaaaattgctgctaagatcgaaaaccagaagagatcaaggcaagaaaaagggaactctaggattgactaggtttgatcgggaagtaaaaaagttagaatgttcgattaattacgatggggagagcagaaagaaagggtcggacagaagaggaggggatagaactttatgttttaaatgaagattaagattttatcttggaatgttcgaggggtgaatgacagaaataagaggaaattaattaaagccttaattatatcccaaaaagtggatttagtttgccttcaggagactaaaatgactgagatgtctttaggggtggtgtgaagcctaggtgtggggagatttctggagtggggagctttgaatgctgggggtgcagctggagaggtggtagttttatgggataatagagtgttagagctaatggggatggaggtgggtcttttttccatttcttgtcatttcaagaattgtgaagatggattcagatggactttttcaggagtgtatggtcctactttgagaagatatagagaatttttttgggaagaattagaggccatccgtgggctttggaatgacccatggtgtattggaagagattttaatatgatcaggtttccgaatgagcatagaagaggagggagagtgtcttcttcaatgagaagattttcggaggtgatcgatgacctggacttgagggatctccctctttagggggatccgtttacctggagtggagggttgaacagtcaaaccaagtcaagacttgattgttttttggtgtcggaggattgggagggccattttaatggggtggtgcagagtactcttcctaggccggtgtcggtcactttcccatcctattggatgggggaggggtgaggagggggcctgtccccttccggtttgaaaacatgtggcttaaggaggagggatttaaggatctgttgaaggggtggtggcaaggcttaagtttcagtggattctttagtttcatccttgtagagaaattgaaggctttgaaggccatcttaaaaacttggaacaaggatgtttttgggaaggtgggaatgaataagagattgaccttggacaaagtggttttctgggattcttagtagaagatgcgtcttttatctatggaggagctggaagctagaaaggaagtaaagggggattttgagaaatgggctcttatgaaggagatttcttggaggcaaaaatcaagagaagtgtggctgagggagggtgatagaaatactggtttctttcataagatggccaactcccatagaaggagaaattgtttgtctaagataaagattaatagaacctggttaacagaagagtaggaaattaaggggggtgtggttggagccttcaagaaccagtatggaagggttttttcatctatggaagggttggattttaataggattgatggtgaggatgcagctagattggaggaggcttttacagaggaagaggtcttctccgccctctcagatctgaacggggacaaggcgcctggtccagatggtttctctctcagcttttggaagtttagctgggattttgcgaaagaagaggttatgggctttttgaaggagttccacgagcatgacagatttgtaaggagtctgaattcaactttcctggttcttatccttaaaaaggcgggtgcgaaagaccttagagatttcataccaattagtttggtaggggggttgtataaattgttggcaaaaatgttagctaataggtttaagaaggttgtgggaaaggtggtgtcttcaactcaaaatgctttcgttgaaggaagacaaattcttgatactgccctaattgccaatgaggcaatagactcgatgcttaagagaaatgagagtggggtgttgtgcaagctggatatagagaaggcttacgatcacttaaattggaatttcttgttgttggtattgcaaagaatgggtttcggggagaagtggactggttggatttcttggtgcatttccatagcaacattttctgttttaatcaatggccctccaacgggtttcttcaatagttcaaggggtttgcgttagggggatccactttctccctatctttttgtgattgggatggagacccttagtaggctcatccttagagcaatgagaggggggtttctttcaggctgcaggataaaaggaagaagtggagacggggctttggtatctcatttgctgttcgccgatgatactttagttttttgtgatgcatcccaagatcagatgacttattttagctggttgttgatgtggtttgaagccatatcaggtttgagaatcaatttggataagagcgaaattttgccggttgggagagtagagaatctagaggttttggctcttgaggttggttgtaaagtgggaaagctgccaacttcttacttggggattcctttgggggcaaatcacaagtccgtggccgtttgggatggggtggaagagagatttcggaaaaggcttaccatgtggaaaaggcaatttatctccaaaggcgggagaattactctaattcgtagcaccttgtcaagtatgcccatatacttgatatctttactacgaatacctagagtggttagtttaagattggaaaaaattcaaagggattttttgtggggaggaggagctttggagaggaagcctcatctagtaaaatgggataccatgtatttggacaaaaggaagggtggcttgggagttagacgtttgtctactcttaatagggcccttttatgtaagtggaactagtgctttgcgaatgaaagggagactctttggaggcgcgtcattcgtaggaagttcggggaggaagaagggggttggtatactagagatgttagggagggatttggagtaggcctttggaaggatataaggaaggaaggtgctcttttgcaaaacaaagtggtcttttctatgggaaatggtagaagggtgaaattttggaaagataattggtgtgggaacttcactctttgtaacttctttccctctttgtatgcctttgcatcatataaagaggcttggttagaggagttgtgggatcatttgggagaagaaggggtttggagtcctagcttctctaggccctttaatgactgggaggtggagaaggtggagagattacttttgacaattaggggtaggaggcttaatcctcttttggaagatagaatgctatagaaagagactaaggatgagtttttctcagttaaatctctttatagtactctagcttgaagaagagttgttcaattccctaatagcattatttggagttcttgtgtgcctactaaagtgtgtttctttgcttggaaagcttcttggggttaggtgctaactttggatcaactcaaaaagaggggccggtttttagctaacagatgcttcttttgctgtgaggaagaagattcaattgatcatattcttattcagtgctccagggcaagagtgttatgagagttattgtttgctctttttggtgttacttgggtccttccttttttcggttagagatacccttagtggttggtgtggctttaacttgggcaagaagcgcagaaaggtgtggaaggtagcctctttgtgtattttttgggcggtttggaaggaaagaaacaagattgcttttgataatgaggagctttcaattcataggttgaaaaattcttttgtatgtaacctttggttgtggactaagtcggttgtaaatgatggtcctcttcctttactcagtttttttgattgtctaggtgctagttgagggctggttttgtatttcctcttcttttttatgccctttggcgcttcttgtatactccctgtatgcttttgggtcagcctcaaggtgctctattctaatatatgctttttgtgtgttggcctataaaaaaaaaaaaaaaatcaattttttaaaaataaaaaatgcaaatttattggaaaatgaatacaattagatgaactcaacaaattaataaaaaaatctgttaaatttaatattgtttgaataatcaaaagcacacatatagattggtcgatgataatattcaaaattttaaacaactactatttcaagttcaatagtttttgtacaaaaaatgcatagtcgaattccaccttgaatgatgtggaggctcaaagtcatcgtcatcgtccaatgataaatcatggtatgatgacttgctgctcattttggtaataattcagagtcatttgagttggctgaatcatctttgatttagtgccaattgagtgctgaaacagaaataatggattgggacagtgaggaatgatccaaatatgacttttctgaaactttggaccatgttgttgaaaatctttaaatcatccaagaaagtactggctatttgattaatgctttgttgatactcttaagattgtgaattagttcaatagctagcttgatttatggttttaagtaggagaagaggttggccacatggccattgaggtgtttgagtctatggggagataatcagcttgagaagagatataagggttttggagaatttggcagtgatcccaaggagtgagtttgtttggttgtttatcaataaaaaaaaggagcttgagattccctctgatgattttgcattcatctcttataaacggaggaaagcccctttttatggctcaaagtggaatcgttgtcactaatgtgctgttgacagttgacacatgtcctttggacaatttgaggtcttgctccttttcaaaatgctaagatggttttgatgtgtaaagtgtattgtttgagtgggaacatctagctgctgtcaagacctgttaccagtttcaagtactaggcaatgggaagattgggtctgttgcttaggtgcaccatgtttatacaggatccccaagatttgcttccaaccaagtaggcatattggcttcagagtgctgctcctagacaaaacggtgtagggtgatccatggagatagaggtgacacttgtacagagctgtgtcatggagctggctccttcagcttggaggaatgaagttggcagattctttctttgtgtttgggcctagttaagcatttgtgtcttttgggcagtccagaagctcaatctttcacccacaggttgggattttggttcacaccatcctcccttggcctggaaaggggatagagccatgaagatataggattctaattcttgtggccttaagatcatgttactttgtggaaatgtatgtggtttcagtgattagcatatgtgttgtagggtttacttgttatggtagttatgtggtgattagatacaacccgtctggctgaaatgagacacctatctatagcagttggaaagcagaacttataataaatagtagatgagcatctggaatcttttaacttgtatatattaaaccatgtctgaccttaataattgctctattatttatctatgtaacaaagactatatgtataagcatttgtatttactcagcctattaaattggtccatatttttcaaatattattgtatttgaaaaattaatgtattgttcacttaggtaagcaccttggtttgaacctgttgcttcaggatcatccttcacctttggttacactctttggcctatgcctttattgcaacatgcaatatttgttgcatgatttctggtcaatttagttaattccttaattcaagcattataggaagatcaagttcatagttgttcctacatgttctgtgcttgtcaatattctcttagtgggaaacctcatacttggcttaatagttgatctcttgtaactaacctactagtaattgtttctcataactcataattgatataaatgcaccatttctctcccatttgcacccactttacacaaaggccaaaatgttccaatatttcttttaggcttccagcaccagtaaaacatcctgaacttgtcccacaccttctacccctgcataatccagcactccctaggttcccttaactcttctaaacttctagtagcaagcataccttaataaaagaaaatgatttttggactcttgcctagcctatttagattgaatggatgtattggatcaggttttgtgaagctataataaattatggatggtgaaaatagagaataatttctgaataacattagtatattcattgggtatattaacaacttattataatgtttacaatgggaaaacgaaaaggaaattattctattatagggttaaaattactccactaaattggccattaattaaaggtaaaaattagccccttgttataggaaatgccaagtcatttgtatagaaaaagaaaaaaaatccaaattaaattctagcctacatagttcaaataatttgaggattactaaacggattcactaacaccttctcatgctagtgaataaatgttcttcattcctagcttgcttgtgatggattggaatggtttagccacaagttccttggttagtacgttggctgactatctttttgaggatagataggggatgtataccaacccactatcctgtttctccttgatgaaaggacgattaacttcagtgtgctttgtccagttatgttgaactggattgtggactatattaatagccgacttcttgttgcaatagagctttataggtccttgctaattctaagatcactaagaataattttcatctaaataagctcatatattccatgcaccatggcttgaaattctgctttgacacttgacctagcaaccgggaactatttattattcctctaggttatcaaattctctccctagaatgtacaatagctagatgttgagctccttttactgattaatcctgcccattaacatttgtataaatcataagtgtcatcctcccagaattttgaaacaaaatatcaccattaggagttaaattcaacaaaccttgttcctttgaaattttcttctagatcaagtagtatctccatgtaaacctcctctaaattcccatggaggaatgcattatttgcatggaacttttgcaagggctaattaaagttagtagcaagggataacagtgtacgaatagtattcatctttgccatcagagcaaaggttttttggtaacctatcccataaattttaaatatatttcttagctaccaatcttgccttacaccttacacctctcaagtgtcccatttgacttatattttattgagaacacccacttacaccccacatgattcttcccaacgggaagatccacaatctcctaggttttattattattattattatttcaattcactgctttcctttagttctcatctcccaatacctcttgaacagttttgggtatgtcaatggagttaagtttggtaacaaatgctctttaagattcaaaaaagttatcaaatgaaacaaagatggttaaagagcgttgagtacaatgtctcttaccttttctaacgataatagtaaatgagatcatcaaacatattagaactagacgtaagttttagtacctttgtccaagttgataactggagtaacacttaaaggttcaagagtggacggtattctcctagagtgaaccttaagcggtgtaacatatctctccctctctctccattggatgatagaatcagggaccaacaaattaaggaaccatgagtttgaagttggtgggctcgagtgagtcttaaggatgactcagggaacaactaagagagcttaagataagaataggcgcctgtttagagtcacttaggagaatttttaatgtgtgagatatataaactcggaaaaaaactcatgatcttctgcaaatggctctccttgaagatgaggttgaaaaaaaatgaccaactttcatgaaagacaacatctatagacacgaaaaatattttagaagttggatgataacatttatattcctttttggacaaatacatgcttaagggctctaggatcaagactttttggcaaatagatgttttctttgcctttctaaagtagagacggttgatcaccttcttcttcactgtgcaaagacttgggttatttggaatcttcttttctctatctttggtgtgtcttggattctttcttgttcagtgaaggagactcttcttgggtggtatgggttgtgtgtgggtaaagctcgtaaaaaggcttagcaaatgacccctttatgtttattttggacagtgtgaaaggaaaggaatttgttagcgtttgacaatgaggagttatcgatccaaagattgaaaaattcttttgtatgtaatctgtggtcttggtctagggtgtctttagatatgagctctatttctcttgtaagcttcattgattggttaggctctaagtaagggtaggtgatttttttgcttctttccttccccctctagttcgagtctttaagtttttttttttgtatacttcctatatactttgagagcactattttttgtgtctcctctatacttaatatatgacttttctttacctataaaaaaaaagggctctaagatcaagttttatgagcatgaatgcgaacaaagaccatacaataaaaaattctgggagggctgtacaactttggtcaacaaattagggatataccgtacaaagttgactcatgagtgattgaaagttaagaactcgcgatagtaatttgttaataagatgggccattaccaagaccaaggatggaaaaattgtgattttttggcgatatttcatcaaaatattggatttcgattgtcatcaaagtgaaacatcgtggggaaatattgatatgatgattttttagttatattttggatttttttggtgatatttctataattatcggttattttcccgatttttcagcttatgtcagtttggtcaacattggactgactcggtcaaatagtcattgccattgatcaaatgtggtcaaaccttaaaaataagcttattgtacttgatacaaaaggttcaggtggcaccattagcaaccactggagcacgtttgctccttgttaatatatatgcaccaacatatatatatatatatattaaataaattaattctaattattttatttttaaaattgatttaatttattaacaaaaaaaaccataattttttaataggttttattatataatctatatatttattaaatataaaaatataaatattaaaaaaattatacatatattattatttatttcatatcattgaatatatttgaattaaaatggatcataattttaattataatatattttaaaattagacatgttatcacaatattattgtaaaataatatataatgcaacttaataatgaatgtacacttataaaaatttatattttttatcaacacaaagaatattattatcaaatatgacaaatgatatatatcgattttttttttaaaaaaaaaaaaaaacttcaaaatgtttatttttacttatataattttttttttttgagtttttcctaatattttcatgagttttcattaatttttatgttaccaatattttgtgtaaaaatattcaccaatattttgtgtaaaaatattcaccaatatttcacgatatatctcgatatatccgtaaaatcgagttattgatatatctgtcaaaatcaatattttcatccttggttaagacaacttcccccttggtaggcttaagaacattcatatggaaaaccaatatctattggaaatctgatggtttttagttgggttgaaaatggctggtcaaatttggaagcaagaaagggtttctcactcactcccttccttgcatacacatacacagcaggtttgggcttataatatactgagtttgttggttatttatgtcattggaatgtctattgacattattgtttcggaaagtgattcaacatttcagaaagcctgttcacacaaaaaaagtgaggtttttttttttttttttaattgaaccttggcttaaaagtacaagcatgattgcatgacttctagtgttggttccttcagttcgctcattagtttagcctcataaactcctgaatggctatcattttattttcttaaaaaaagaataaaaaaacccttttatgttgtataaatatttgaagtggataatgatagaagtgttaaattttggaagaatagatggtgtgcggatgagcacttgtgtaattcatttccttctttgtatgcatcggctttgtcaaaggaagcttgggtggcggatttgtgggaagacttaggaggagggggacattggaccccgtgtttcacaaggtattttaatgattgggagttgggagttggaacttgttgagaccttttgtttaatgttgtaaggaaagatggttagaagggaagataatgacaaggtgatttggaaagaagcaaaaaaagcactatattcggtcaaatctttctatgcagccttgaaggtggggagggcggcccctttttccaacaaacattatctggaacccattggaaagcaagttggagaaaagttgactttagacaatctccaaaagagagggagatcactagtgcatagatgctatctatgcaaattggagggcaaatctatttatcacattcttcttcattgctataaagcaaggattctttggcacattttgttctccttattcaatgtagattaaatgatctcttccttgataaaagatacctttttaagttgacatgactcctttgtagggaagaaaaggaaaaaggtgtaaagccgtctcctcttacattttttggacaatttagcgagagtgtaataaaaaagcttttgaagacgaggtacaaaatgatcaaaagttaaaactttcgttcccatgtaatctttctgcttgggttagcatgtatgtaagtgaaggctcaatgcctttacttttggagagtgggttgggtcttcttgagtgtcatgggtgttttttgtgtactttttacgaggcattcttttttatgctccttgcataataggtcctgtgtactatggtgtacccttttctattataatttatacatatttatctttacctataaaaaaaaaaatatataaatattctgtgaatcatctcatattagatttacaagatcaatagctttctttttctgaaccagctaaagttgtttcattggaaagtatcctatttgtgtatttatacaaaggcaaagaaatggagtttttatgtgtttttctgttctgtcctgtctaataggaaaaggttcaatactacgatatagctactgaaaa

SEQ ID NO: 10694 - DNA, 825 bp, Vitis vinifera
  Intron number 6 from transcript GSVIVT01037402001 (locus G SVIVG01037402001) derived from phytozome v7.0 (chr-ID chr6 ; pos 14337991 to 14338815)
aacaagaacgaatcgctcgggcctcaggaaagcaggtttgtgcaatttgtttgacaattttgttctgcacttctatttatttgttcttgttttccttgttctatattcttgaatgttaaaccttttctaacttgcttattagtgctcccagacacccccttccctcaaaagaagccgccacaacatcatatcaccctctttgcagcacagtattctactctttcatttttcttaactcgtatcactaaatgtgtcaaatctgtcttctttttataccatcttcttgataaagcaatggttatattttaatgattagtttatgacctgtatgaaatctggctactgtgaggaatatcagaaacacattgcaaggagaagaacatcaaggataacatttttttgtgatggtaactagtaagttctctatgatagagttatgcaagtaactaataagtggtgaaggggtgttgggcgctgtcaactactgtagtcctgatgcaccctagagcagatcttttatcctaaactgcagatagccaagccttcaagtacatttcctcacaaatatatgttatgtttctattattattagttttccttgcttgtgcagagcatcaatctgttaaaagtttagacattgactttttctttccttttgtgtgtgtagaattcattttttaaggttcaagtagttgtttgtttttttcttagtgtgcctcttgtatttgatttttgtcattgtagttgttgacatccttgtcatattgcaagcccaaattttattttctttttcaataaatatactccgaatgattattttaggac

SEQ ID NO: 10695 - DNA, 10558 bp, Vitis vinifera
  Intron number 14 from transcript GSVIVT01021873001 (locus GSVIVG01021873001) derived from phytozome v7.0 (chr-ID chr 14; pos 6188516 to 6199073 reverse strand)
cggacattgcgaattcttttccaaaactttgacatgtaagttcattagctttatgtctatagttttggttggcaccgtatgttaaatacattattagttctttctgttcttaagaaaaaacttgctttccatattcatctagtttttaattaatgtcaattgatcaattatggatttgtttgaattggcttttaagaagctaaaactcctttataaacttaataagagcttttctacctatttggatagtttttttgaaagagcttatgacttaaaaaacaatttaatatggaagttaggaaaatgttgcttctcataaaagttattttggcttgtgctggaagatatttcatgtttactgaaacttctataatacccgtattgcttttcaaaaattatggttttggctatagtttcagcttctagctaaagtcaaaagcagaaagctatcctgaatagggcctattattggagcttatggtttgtcaccacaataacaacataatatcttctagacctgcaacttggatggcttgggttaattagcactaaagctatttgcccttttgcccttttgcccttttttttttccttttcttttctaggttaataagatatattaaaggtgcctagcaaaatgggggtgcaatcccatgtgaaaggatgactatagccatattgaaagcagagtttcatattaatagaatttgaatcgaaaagtttcaataagtttcttactcaggatgaagttaaattagattccaattctgacttaacccacttgctaaaagctctaacatgaacggatgaaaagtctcaaatatacagattcacttaataaccttgaggactccttaacaaaaagccttgcaagctgaacaactaaaacaggttacaaaaatttgagagcaaaatataaacaaacactaattgcaactcaaagaggcaaacacttgtccaatcgccataaatttctttccttcttaaccacctatgaaatgacaatggcaaaatctccctccactacagcattggacaagcctaaagctttagtcctacaaaaccagaaattcaacctcaatagtagaacctttacttgtaggtttagagtaagctttttatctctgtacctcgatgtctctaatcagttcacctgtcctaagtcacctaaggtactaaagagctccactagagtttcaacttgacaaaccctttggtcggcgatgaccatacttgataggtattctcagccaatctcttggagctgcatacatggctctcaagtctttaagggagtgcattttaaggcttcactaataatggcccaaagggaggatgaagagtaaaacaagtcctaaacttcatttgctatcctcccgacattctaaaaattccttgcatttcttttcttttttttccatattgtctaaatcaaattgaggctagcaatatttcatagaaccttgcctctagaatgacccctaaagcctttgaaggatatagtcatcatctccaacactatacaaggtgggacttagtcaatcctagtaaggttaaaacaatatatgccataaatccaaacttgttgggcaatgaaggaaaagattatcaatcaacagattcaacactctccttgtacatgatacaccactccagaataggagctttggaagacctctacttctaaattggatcattggtattaaccttcttactaaccataagccacatataagcctttacttcaagagggactttagatttccaataaagttagttagagcaaaagggatagagatggataaatgagtaaggctttgaagagagaactaatttagaacaaggttgaagaggttaatgaccaaaccctcacatcgtaatagaaaggtgataaatacatatgggctacaaaagacattaagaaagctagttcttcattttcttaatctaggagattccaatgaaattttagttcaaagagctttaagaaaaggggagttagaggaactaattttgaggaaagaaattcattggagacaaaaagatagggtgaaatgggttaaagaaggggactgcatgtcacgccccaagacccactctaagggcgtgacggtcaattcacactttaaacgcgaaggcttacagtataacctgacccaaacaatcatattgtaattggaagttaccaattacgaaatacccgttcagagtagcagaacaaaatctaaaatcctcaaaattcaatttcaaaactaaaacatccactatccaaaatccattgtccaaatatttgcaaacttaaacaattcaagtactagaacaaatttcaaaatctccaaaactcaactttgatctaacataaaatttgaaggatcaatatccaaataacttccaaatactaaaggatccaaatgaacataactaacagttaaacaaaatccaacataaaatcctaagtcaaatcctaatgatgaccattcctcagcctagccatcactccttaccagaactacgagtacctgaaaaattttcaacaattgggaatgagctcacaacccaataaggaatattaatgcagttcatggatcaaatattttcatttcaaataggagatatcgtttttttttttttttctcatcaaatatcagagtttcaaaaataccaatatatttaaatttcaaccaaccatttccatgtcaaattcaaacactttcacataagattcaatcaaatccattcaatttttcattactctggttatcaaatatcaaatgcccagttaggtgggacttttcaaatgggtggctagcctcaaattgttcttggtggaaggaaccaaacactactagtactagtaacctctaaccaaacccctagaggctggggtccaaatcaattacattcccaccatgaaatgtaaaggtcaactattatatcccgtcgacagggccgaatagtcaactattatatcccgttgacaagggccaaataaaccagagtgatgtttttgttcaagtattcaaatttacacaacataatatctccatattttgtgtcataaataaaacaaaatattccaacataatatttagtgcaaaacagtttgatccatgcatggtaacaaaatatcattttcttttccacaattcaaaataacatataaaataatttaattttataaatattgcattaacttcccttacctcaaaagaagtccttgaaagcttgggagaaaaataattctgaaaaaaaaaaatctactcttcacctaatataacataagagaaacaattattactatttatttataatttaactaatctattccttatttaaataaaactaataaattcccaatttgtttctaataacacattactaattgaattaaattacaattttatttcattataaaattctctctctctctctatatatatatatatatatatatatatatatattttgctaaatctctcattctatttattacaaaaaaaaagactattattactattatctgaattattaatctaaaactaaatattattattttaattaaccaattcaaaagccactcaaccattacctagttgtctcgggtacaccaaaccaaaaagcaagtttttttttttttttttttccattgccatcatcatgattcattttatatatatataaaaggcttccttccatttggcacacgcccttttttttttttttttttttttctccttccttccttccttccagtgctgtgcacacgcgttcttttttttttttttttacattttctaatcccttcaaccacaaataataatatatttatttactcttttttttttttttttaataaaattaaccctaacctaaaatcgaaactttctaaggaattttttttttttcatctaataaaactcaagatctcccaaattccaataataaaatcaaaatcttaaatttttttattattttgatattaaaacgaattaaaaataaaataaactaaccctaatatagatttgggttttccaaaagatatctaatgtgtttgaaattaatcaatgaatctaaagtattaaactaggggttagaatcttacctatagagatctgttcttcaaccctgaaatctgactccaacctacgttctctgaaattctgcgaacaggaactctattcagaaaagaataggaagaaatagaatttctaatttatacctagagtatttattcgtaaaattacacttttacccctcttccactttatttaattaattaattaactaatttaattattattagtaatttcctaaattacccttaaaaaatgcttgggcgttacactgcaattcaaagttttttcacaaagtggctaatggcaaacgaaataggaaattcattaaatttttggagaacaaaagaggttgagtgttgaataattctgagagcatcacagaggagattttactttattttgaaaagctctactagagtcctcctggagagtcttggagagtagaaggcttagattggtcccctatcttagaagagagtgcttctaggttggattccctttttactgaagaagagatttctagagccatttttcagttagatagggataaggcgctggggccttatggatttaccattgcagtgtttcaagattgttgtgatgtgatcaaggaggatttagtgagggtgtttgcagagtttcacagaagcaggattatcaattgaagcactaatacctccttcattgttcttttgcccaaaaaaaacccaacaaagaaaatcttagactttagacctattagcttgatcacttgtctctataagataataaccaaagttttatcagggcgattaagaggggtactacatgaaactatccattctactcaaggtgcttttgttcaagggagacaaattttggacgttgctcttatagtcaatgagatagtggataagaaaagacgatcaagggaggaaggtgttgttttcaaaattgactttgaaaaggcttacgaccatgtgagatgggattttttggatcatgtgttggagaagaaggggtttggtcctagatggaggacctggatgaaaggttgtttgtctacagtctcttatgcagttctagtgaatggtaatgctaaagggtgggtcaaggcaactagaggattaagacaaggtgaccctctatcctcttttttgtttactatcgtcgcagatgtgctgagtagaatgttgttgagagcagatgaaagaagtttgttggagggttttagggaaggtaggaatagaacaagggtgtcccatctgcaattcgcagatgataccattttcttttccaactcttatgtggaagatctgcaaactctcaagagtttattgttagtgtttgggcatatttctgggcttaaggttaatcttgacaagagtaatctttttggcatcaaccttgatcagaatcatctctctaagttggccgtgttacttgattgcaaggcttctgactgacctatactctacctgggtcttcctttgggagggaacctaaaagattgtggtttttgggatccagtgattgagagaatctcacagagattagatgggtggcaaaaggcttacttatctcttggaggtaggataactcttatccattcatgcctttcccacattcctagctactttatctccttgtttaagattctcgctttagtggctgcaaaaattgagagattgcaaaaggatttcctttggtcaagggttggggaaggtaaaagagatcatcttgttagttgggatgtagtgtgtagtctaaaggtaaaagggggtttgggatttaggaagatttctctaaggaatctcgctctcttagggaaatggttgtggaggtactttagggagagttcaactttgtggcatcaggtcattttaagcatttatgggacacattccaatgattgggatgctaataatatagtcagatggtcacatcgttgtccttggaaggctattgtacaagtcttttaggatttttcctagtatactcggtttgtggtaggagatggggatagaattcggttttgggaaaacttgtggtggggggatcaacctttgggtttccaatatccaagactttttagagtagtcaccgataaaaatattcctatatctttaattctcggttttgattgccccttctcttggaactttaatttccgtcgcaacctttccgattctgagatagaagatttagaaagtctcatgcggtcacttgattgtttgcatttatccccatcagttttagatgcgagatcctggtctttatatttttcaaggctttttacagtcaaatatttttttttagccttgtcccaccgttccaattcttctccagttttccctactaagtttgtttgcaattctcaagtcccttttaaagtcaagtcctttgtctggttagtgacacataagaaggtaaatactaatgatttgctacaattgaaaacaccctacaaagctcttagtcctgacatttgtaacttgtatatgaagcatggagaatcaacaaatcatctttttttacattgctctttgacgatggggttgtaacacagattattttagttagccaatatggattgggttccctcgagaagtataaaggttttggtttgtccaagagagggatagttttgtggcaaactgcgtgcattgctttaatttgggtagtgtggtggggaagaaatgcaaggatatttgaggataaagcaaggaattcagagaatctttgggattccattcacatccttgcttctctttgggctttttgttccatggcttttaagggcattctccttaatgtgttacaactagattggctagcagtgtgtagttccaacgggatggtctaatctagagagtttggctatttttactttgtagcttcttgtttttgtattcttgttgtttagtttttctttggtgggaggattcctcatccttctcttgtacttcttttttctatcaatatatctccttgtcgtttcctatcaaaaaaaaaaaaaaaaaaagggtgtcaaagacctagaataactttgtgggaggtatatccttgatgcaaccctaatttaaaatgaggtggttgattcgagaaaaagaagttctagtgttggtttggtttgtaaattagatatggaaaaggcatatgaccatgtggattggaaatttctcctttatttgatgagaaaaatttctcctttcaaacatagaaaatatgggttttggtcctaaatgaagaaggtggattcttttctacatttccattgaaaggatgtcaatcttagttaatggtatcactattgatttcttccaaacttcaagaggcttgaggtgaggtgatcctctttctcactatctttttttgatggtcactgaagcctttagttgtcaaatatcaaaggctgagcaaggagggtttattattggcttcaaagtcgagggtcgagagggaggaggaatgcacatctctcacttcctgtttgcaaatgatactcttctattttgtgaggcaaatttagatcaattaagatagtggaggtggattgtaattggctttgaggtggtgttaagtctaaaaataaacttgtaaaaaattgagcttattccaatgggaataggagagggagtgagtagattggcatctatgtttgagttaaggtagggaggcttccgcttcttttcttggtttacctttggcaatgtctcataagtcttatggtgcataagatgttgttgaggagagattaagaaggagatttgccccgtggaagaagcagtacttttcaaagggaggaagattactagtcttgtgctatcaatctattttatgtccttttttgcaattcccaagaaagtgtggattagaatagaaaaaatttagagagattttttgtggggaaatctattggaagttaacatgatacatttattaagttgttttaagatttgcaatgataaaaggtttggaggtttgggcatcagaagattagaggtttatccttgagtaggagagcctgtggaggaagatccttctaggaaagttcgaggaattagatggggggtggaatacatgagaggagagggagaccgttggaatgagtctatggaatgatattagaaaaggatgggaagatttcaacctaaggatagatgggaagatttcagccaaaggatacctatttgggtaaaaaatggtaggcaaagaaaattttgaagggacaagtgggcaggggagtattggttgaaagaagcatcttctccattgtataaactttcttcttcaaagtatgctataattgttgatttgtggaaaagaggaaaaagtggaggtcagtggttagtgcaattcataagatctttccaagattggaaatggatggcgtaacctaatttttggagcttatttatttagtaaggggcaagatggaggagaagacatcttagcatgtaaagtcttattacaattccttgcgtgttgatacttgaatggatttcccaactaaacaaatttggggctctacaactcccttgagaatgtgttttctcacttgggaagtagtatgagggaagatcttaactataaacatgttaatgtagagggggtggacaatggtagatagatgtagcttatgcaaagagattgaagattcaacccatcgcattttgattcattgtgatagaataagggagttatggatgcttttgttagcaatctttagcctaaaataggtatttccagttacagtgacataccttctctttaattggaagtttgtgggtttggataagaggagacaataaaaagggcaagaccaacatcgataaaaagcaccctatctagccttcctatctattttatgtcactttttgcaattcggagaaaaggttagcttaagactgaaaaagatctagagagatttcttataggggtggtgctttggtgaaaaagcctcatccagtaaagtggtcgtcaatttgttgtaggcgaaagctttaagcctttttaacctaactatagagggaaattctgctattgtaatatattgggtgattagtaaggaaagagtttcatggaagtttgacgattggatctgaaaaatcatagaggtttttggtgagttgggttgctccttctcttgggttccccattcagccaaccaagttgtaggctaattagccaatcaatgagttaagtttttggctttctttgagattttcttcccccttaagtgtgcaatatttctctttggtgtaccttggttttttctttgtgaggatgagctagtttttgtggggtttgacacttggttgctttctaaccatttttttttgtacgtctttgaaagattgtttgttcttcttgtatttatctttaaagatgaaggaaaattgttgtttttgttttagggggaaaaaaataagcttcatgtgtgacaagtcatttttgtgatatttcttaaatgctcattagttgtgcttcatgttttcatgctattagctaatttatttgtttatttatttattttttgtttgtttgtttggatcctaccatgatagagtgctagatatatatatagcactctatcatggtaggattatatatatatatattttatcaaaaacgaaaaatattaatattagtaaaggtacaagagaaagatgagaggtttgcccctcaaaacatagattctgatcaaagtaagaagacacctctctatacaaaactatgtacaaagataacctccgactatctcaaacctttgaatcacaaactgcaagtcagttgggttgtataatactaagagtaactcctctaaaagcaacaatacaagaggcccatagagaggaatagaagtgaagtaaatcccataacatccctttcaatctccccttatcttcaaaaatcctaacatttctctcttgtcacacaatcatactatgtgaatgaatacaatatataatcatactgtgatctttgggaagagtaattgttttatgttagaatgcattatatacattgtaaaccaaaattctacaagcttaaacttttaggaaaattggttattcaacttgttatcgaagtcttgtttgacaaaaagtcatgtgtttgaacctcattgcatatttatttcctcaacttgttaagcccaaaagaggctgctttgtttcccaatttattaagcccatgtgtaaggttaaaagaggctacacatgagggaaagtgttagagtgcatggtatgcattatggacccaaatcctacaagtttgagcttttacgaaaattggttgttcaacattctagaataacatttagactttagtcaaactatcttgttcattataatctatgaagatattttttttttgtggagaaattcctataattctagcctcctttgttttctgtccgtaaaaaaggaatctcagtcaattattatgtatgcaaactattgattctgattctcattgtaggcatccaaagaacacta

SEQ ID NO: 10696 - DNA, 8228 bp, Vitis vinifera
  Intron number 4 from transcript GSVIVT01037230001 (locus G SVIVG01037230001) derived from phytozome v7.0 (chr-ID chr6 ; pos 17186552 to 17194779 reverse strand)
aaaaagtagtggagaattgtcaaaataatttgcaggtgagcaattccctgtctggatggctataagggtgtctcgttaatgcttttacttttaagctcacaaaactgttgatatgttctgtacttttgttgaatagaaaattaagttgaactgcttccatgtactgatcatgctatgttattcattcaggaagttgacttaacaattttgagtctttgctttctaatactttattgcttttgcacttcaattatgtgttctcaactgtaatctattttataattgacgattcacacaattttttttttttttaaattgtaagttgtccttgtatatatttattctgaagatggacttgtgttgtgtggtatgcaagtgcatcacctgtctatcattgataattctggtggtgcttggatacccattggtctggctagtcttgtattcatgcactctgttctgttggattctgacttggataaagatttttgatatggttaagtgttaaaacttgaaatcatgatgatcttataggataaatatgacctattaagatccacttataatagcttggtgcctagaatgatgcctggtgagtggtggtcggattttagtgagaatttgaggctctttgctgtaaaaaggagtaggaatttagtcagaagtgagggttagatggtttgtactctttttatttttattttttggtaattaaagatattgtggaggcctttttttgagatgggttgtgatagggcttaggctcaaattgtttccctatgacaattttccagcattttaatatacctttgaagggcctactgattcttttgagaatataattttttttcataaataaagaagtacacttggaagacatttgagatgatgtgggacttacttcatttctttgtttttgtttgggcctcttgcattgatgtttttaaagcctttcccttgaatgtcattcagcttagttggctttttgtatgtacaccttagggttgggcatactttgcaaggagcctagatgagcttttggtgatgtttttttgatagacaaagggaaaaataaattaaaacatgccaaaacagggggcgctccctacgtacacagacagtatacaaagaaagccaaaacaaggcaacaaaagaaagaaaaaacccagagaggaaaaagctaaccaacaagccaatcacccaaaaaattcaaaaaagagagagagtccaagtccaaaaactgttgagatcacttttttctatcaataaatctttgtgtcgtttccaatcaaaaaaactgttgagatcactcaagaagagactgaaaaaagaagttcctcaagcaagtatttgacatctcttcctcttggaacgttcttcggtttcgctctccccaaatacaccaaaaaagacaaatatgcgtcaatcttcaaactgctctccttttcttcctccctagccccttaactttccattctagaagcagatttctcactgaagccgggaacacccacaccaccccaaaagaagaaagcaacaaaggccaaagctcccttgtcttaccacaatgaattaggatgtggtccgccgattcctcattctctttacaaagactgcacctattaaccatagaccaacctcttctcattaatatatctacagtagaaattttactccaaaatgcttcccatgcaaaaaaacgagttctaaaaggggcatacgaaccccaaacctctttggctggaaataaggggctattctcatcctttaaagacctataataagatttaacattaaactttcccctcctctctatcttccaaaataaagaatcctccccttcttgaacctttactgtagaaatatgataaaaaaaacgagtcacctcctccaatacccaatcttggaaggaacttctaaagtgcacctcccaacccctgcctccacctccttgtctcccccaaagatcagccattacagcagaattatgggttgcaattctgaacagcaaagggaaaagatccttcagcttagaatctcctacccaaatgtcccactaaaatcttgtgcgtctgccatttccaatacgaatactaattctaagaaggaactcctcccaaccctttctaatgtctttccaaaggcccatcccataagactcccttacctctttagtggtccaacccccttcctcctttccaaatttaccaacaatgacttttctccaaaaactctccctctctagaggaaatctccaaagccattttcctagtaaagcatgattgaaaaccttcaaatgccttaaccccaaccctccatgcctcttatctttgcaaataaccgcccatcttaccaagtggatcttccttctctcctccaaatctccccacaaaaactccttttgaattttctccaatctaagtttcactttccttgggattacaaaaaacgacataaaatagatggggagtgttagataatgtatagttatttaggttatttacttttccttttccttttctttccttactgtattgtgggtcccactagtatgtatatatatacccaagtccaatgtgtattctttacagtttttcaataataataattagggattctccctttttctttctctctcttcacagggagatttgagagagtgctcttaatgagggtaagttgacctcccttagaaagatattgttttttccacgtagccaatttcctcttgaatctttcctctacaacatcccaaactctacacaaattatgagagactccaagaggtaaacctagataagtagtagggagattccctagtttacacccaaaaaccgcaactgctttgtccacatcctccactctcccaattggaataatttcacttttttacatgtttatttttatgcctgataccacttcaaaacaaatagcaacccacttccaaaattccgactgacccctgttatcctcgcaaaaaagaagagtgtcatctgcaaacaatagatgggaaaccgaaaccccttctccacgtctccccattaccttgaaacccctaatgaaacctttctccccagctcttgatattaaactgctaaaagcttccataattagcacaaacagataaggtgagagtgggtctccctgccttaggtctctaaatgttgagaagaactctgtgggagtgccgttcactaaaactgccattctcacaattgaaatgcagaataaaatccagtttcgccacttgggtccgaaacccattttctccaaaattgaaagaaggaacctccagtttacgtgatcgtaagtcttttcaatgtccaatttacacactaaacctacaccgatgcttcgtttccttgagtcaatcgcctcattagctaccaaaactgcatccaaaatctgcctacctcccataaacgcattctgactgttcgaaaccacttttcccatcactcttttcagcctatttgctaggactttgacaataattttataaagactccccacaagattgatgggcataaaatcctgcacgtcactagccccctctttcttcgggataagcactaagaaggttgcattaaggctttgaaaaacaacgttctgcgaatggagctcctcaaacacttgcatcacttccccctcaactataagccaacaaaaattccagaacgccagcgtaaaaccatccgaccttggcgccttatctccccccaaatctgagagagctttggaaacctcctcctccgaaaatgacccctccaaagtctcattatccaatgagtcaagagttctaaaaagacctgactccacagcaggtcttctcactagagattcttcaaacaaggatttaaagtaggatccaatcccttatttaagctccttctctttatccagccgagcacccctaactgttaggctattgataaaatttccccttctccttgcattatccatacggtgaaagaacttggtattgctatctccctcttttaaccaaagagcccttgacttctaccttcaagagaattcttcaaggatggcacaatgactaaattcatctctggctatctgctgattactcctatcttcctcagatagagatccaagcctttctaagctatctcaatagtttaacttctccaaggctacatccttcctagctgacacattgccaagggtccctttattccatatcttcaagtcgtatttcaaagtctgtagcttctttgcaagcacaaaactgggtttgcccctaaaattgtaagactgccaccattctttaatcttatccttaaaaatcttatccataaaactgtccacccttaaccacatgttttcaaatctaaacgggcttttacttgttcttatctcaccgcagtctaacaaaatcgggcaatggtcagaaacaggtcttggaagaagaatttgcattgcccccgacacaaggtcctcctagtctcttgaaaacaaaaagcggtctaaccgagcctttagggaacctccttcccctccacgccaagtaaatgctccacctcccaatggtgggcttactaatttaaactcgtcaataaagtctggaaactctctcatcgtggttgacatttgcttgccattgctcgcttcaattggaaaccgcaccatgttaaagtcccctgctatacaccaaggttcattccaaagccccttaacagcggctagctcctcccacaactcccttctctcccttcctttgagcgggccatataacctagagaaaacccaaacaaaaccctcctcgcaatttctacagcggcatgaaatagaaaaagaacccacttcgacctccaatccttccaaaactctcttatcccacagtactagcaccccacccgccgtaccccttgcatctaaagacacccaacccaagttcctaccaatccccaaacttctaacaattctatcagacatttccttcatttttgtctcctgaaaacaaaccatatctggcatattggtgatgtaatacttggatagtctttcatgttccttttgtacaaatttccttgtaaagtggaggttctttttgggtcttttgatcaggctttgtattttatgaggatgatttctcatccttctcataagttctttacagtaattaatacaacttctgtttctgattaaaaaataagtatatatattaaaaagaggtgccaaaagagtgacccaaattatatagaacttcttttgagattttcatgctgataggatcattaataccatctcaaactccacatttattgccattatatctaagcaagagaagataattttgatcaaggatttcagacccactagtttaatgagtgatttatttgtttttcccctactaagaaacaaagaaaccattttaaatagggaaaagtttaaaatgtaagattagaaatccttacaagtagaagtagttataagaggaaagaaaaaagcaagaatgacaacataaaaataagcactgacatgtagcctcttctcacaactgtgatgctgcagagttgattctcaaaaggatgtagttaaaggcaagggccacatgcatatggtctcaatggatagaggatctctcgtaaggcttgtggtggaagggtttcctctcttaatcaggttatctgcttttgattagctgctctagactccaagagaaagagcatcctacatatctaaatgactctaccatccttgacaaccaatggcagtggtcttatggttctcttttattatggcttatccacgaaagaatcgtaactgaatcttcatctgcatgatcacagaaacaccaagcaattttgcttctttttttgagaagcttggagagatactcagaaggctgaatatcatgagcagtgaaatagtcttctataaatcttccatagatcccctattgtcttcaaagattctaacttttctctttgtggcagacaactcatacggtagccaagaacccatagaggagatagccatcatatcaacaatactattagggatcgtttatacagtcccaacaaaaggtggttgatactcaagtgtccttgagcacaaagcacataagtccaggcttatggatttatattgactcctagtccaaagcaaattattggtattaacttttgtccccaaccaagccaaggctctgagtttgaggtgagttttagatttccaaactaatgtggtttgaaggaacactggggaaaaaccatttcatgagggagcacaagaaaaagatgtgtgaaaaaagagagtattaaaattcagtgtccaacatctctcattcttagataggtgaaaaaacaaacttggtctgagctgaacccaagtcttgtacatttcttttttcatttttttttttgttttgttttgttttgttctttttgcacataaagggactcaaaccttagatgccacaccagtgcacccccataccttacctccttaaataagtcaaagtgcttttctggattcaaccctttttcctttcttttctatttcacttgacatccaggcttgtgcctactgtagtttcattgttttctattagcttgtattgctccttttcattcttcttatttactatgcttgagctgttttcctttttgttagatgctttcatcaatatgtgcttcttatttgcctattaaagatgaaagaaatagctcatcagcatttccaatgcttggctccagcttggtctcaacacaaatggcttaaactgtgtcagagccagtttgattgccacccctgggtagaagacacggtttttccttgtcgttatgagaggtagcataagatcaatgctaaagcttttacatcctaacctagttttcctgaagcagggccttccaataaggcaagaatttttgcctctatggccatccccattgaagcaggtttgaagaaggctctagcactgtgcctgatgattatctatgtgtgtgtgtgtgtgtttgtattgtacaacatgtactttattgcatgcaattggtatatatcatgtacagattttcaattctttaaagacgccctgtggagtgctcagaatagatgctaatcatgaatttatgatgcccatgggatgttgataaacctctctccactcctcctctttcccattacatatgatgctttcctaagaatcaaccatctgtgaacccctcctttttgggcactctcttacattcaaaaaggcgcatcttgatgttttttttgtgtggctttggaatctttttattatctctacatctgcagtctctgcaagtatagattcacaatgatagcatttcaattattggggactaattgaaactttcctatgtactaggatttagtggcagacaaattgagactacctgaagtgaaaagtttgtgaagacaataacaattataatttcttttcccccaaaaaaattgaagttcagaaagtaggtgtggattttgaatgaaccaatgcaaagcaataaaatgtcacttttcttaaatttggtttatggaaactctagttctcaatgcttatgtatgtatgatattgatggatttatttctttgtcccttgatctttagtattatctttcatgaaattgattatatattactggatgctttattcttgtcatatatatctatacataagtccatttaaaggtgtatgcccgttctttcttatctatttaccaaaattttaaagtatcttatgacgtgggatattatataattcacaatatggaaaagtaggaaaactgttgtggactagatatatgagttggctacaataagtggagattcttttattggtgggattagagatatggaatgagaaattaataacttttcctcctaagcaaaaaagaaaaaaaaaaaaaaaccattaatgataatagtagtttgcctttgtcagcttgggaaattgtgtgatgtttctaatgttgacgtctggtccgctagggagaaatatatgcaaactaccctcgatgaacttgggaacccgtgatttagtttcccacggagaaaagggccttactgtttcatatgattgttcattgaggctaccttggaaacaaataagttaggggagggaaattttttttaaccttgtttggacttattcataccatttgaggagtaacctctctctctgtctctctatgttcaattttccagggtgcgctggattcaggaaattgcaacaggattcg

SEQ ID NO: 10697 - DNA, 2498 bp, Vitis vinifera
  Intron number 1 from transcript GSVIVT01037272001 (locus G SVIVG01037272001) derived from phytozome v7.0 (chr-ID chr6 ; pos 16642250 to 16644747 reverse strand)
tagaagggagttttcagaacctagttgcagcaaacaatgacgaatcctagatccaacaatcaaaatgaacatccaaaaccctataaattagaaattaatttttttttttaaatatcgtggaaggtttaattgattcaatttggaagaatcacttgttgcagagaattggatgatgagtgggtctctagctttgcaaagaagataagaagtggatgatgaatggatctctacctttacaaagaagataaacatcgagtttgaagagcaagataagagggtaaaatagtaatttaggttattttatattatcaaataggtttaatgaatcagaataccacctacttttatagttttcaaaagggttattcgattgaaagcctcattaaaaaccctaattttgaaaatctaacatttcatcgtttttttttattcttgataaaaatatctttttttttcttttttttttttgtgtaaaaacaactatttcttttaaaatatatatttaaatatttgaaataatgaaagatatttatataaaaaaataagttactcttcaaataataacataagagattcatattaaattcataaatatgaggattattttattaattcatttcaaaattcaaattccaaaaaaaaaaaaaaaaattcatagaaaccaacattacctagccgacatttgtccatagccacaagccattcatgtggatcacacgcagagatgcccaaaaacccaatagaggccaggggaaaagaagaatttttatttttcttttaaaaaaaaacatataaatgacccacaaaaaatctgacggttagatggtagggataacgcaaaaataatgaattacgtacttttcttaaagatatctctgtgggaaaacgacgaaacaatatgataggccactgccacatcctctaagattgtgccacgtagaggcggatttttgttacatgaaatgggccaaaaaaaaatcagtgtctgccttgtgtccgtacatgtctcccacgaggacgtcgttttagctatgctccaaacttgttgggaccttcccttggccctccatatccatatcagtcggctcacattgaacactctctctctcttttttttttttttttcttaaattttttaatcaaaattattcaacctgcaatcaaatgactttgtacaacttttcaacaataattttgttctagtgggctacaaggaaccctgcttaaagtacacatcgaacatgtgagagaatggccgaatggtcaaattttacagcgggtgggtgaacaaaaaggggcgtggagtgttagccagggttggaaagagcccacaaccatttctaacccttctgtttggttaggtaaccaaagcctgcagagacaaacaagtggtccacagccctccacctgggcatcctcctgtcctttgtccccatcccctccagtctccattcgaaacaatctcagccaccttgcatattcatcatgaaggcgcgtggggtcacgtttcattttcatcggttggggggcgcggggcggtgggcagtttctccgtgttcagccaatgatgcgtgctaagaagaggaatgacgggtaggattggaggaaagaccacatgcttttcaacttaagacaaagggattgttgtggtcaagttgggagcatttttttttctcttaattccaaatggacttatcagttatcactgtttcacatcacattcaaattaaggcctcaagcctgttcctttcaatgtgctaataattcatttgtatagtttgatagtgattttaaaaattattttaaatttttttaatgcttaaaattttttattattcaagtattaaaatgattaaaaatattttttaatatcaatcccaaacgtactttacatatattgataatcattcaattcaatttatgcaaaaaatagaaaaacaatatcattttttaaaaataaaaattattgggtttttgtagttaaaatggaatttgttttctatttaaaaaaaccataaatgaaaatgaaacaagaaaaaaatgttagtagaatatatttttgaaaagcaccttataatatatatatatatatatatatatatatatatatatatatattttaaagggatcattttagaaaaggttaagtattgtttttaaaattctataagcgtcgagttctaagcaaaaataatatattaaaaaaattcacaaaataaatctttgaacaaaataatttccaaactaaggcatcacttctaattttttatttttttttatttttttgtaaggtacaaaacctagttagtaactttgattttgaatttcatttaaatgtaaaaccttagttggtatataaggttttaatcttaaatttaaaattgtagctgataactaaggttttgatcattaaaaatagggagaattatgttttgggggtagatgggggcccaaattaacaaaaggtccatataactcttcaaattgagttgaaggat

SEQ ID NO: 10698 - DNA, 6076 bp, Vitis vinifera
  Intron number 1 from transcript GSVIVT01018335001 (locus G SVIVG01018335001) derived from phytozome v7.0 (chr-ID chr1 5; pos 10881045 to 10887120 reverse strand)
gggcttctttcaggtacatgtctttaattcttttccctccctctttagtatttgtttatttatattttttgtgaaatttagtatttaaatttctttagtaatattatcaaatttgttactgatcatgggcacaatttgacattcctgatattttttggaccttttttttttttttttcaaagcatcatatacaaaagatttaattcaataatcgtatctcctttgttaatccctatctttttgtaccttagtcttcatgtaatcaaactggggatttcctggaatgaaaaagacaaagcaatctgtgggtcttcaattgatggggggtcagggatactgtgatgaacaggttggtgaaaaaactgagaagggcagatgctatcaggtaataaaaacaatggaaaacaccaatgaagaggttggtgaaaaatttgagatgggtggatgctatcgggcaataaacaatggacaacaaggggctattaagttaattaatgccatttataggtggatgatccttacgttggatgttaaaaatgttgacctcaattgatttggtcatgcactcgaagcagccgtcatgattaactgtgttttctttctggtcttttcttttggttagagctaatatggacttcttgatcccagcttgagagcagcctccttttttcttgcttgggttgcctgcttttgctactatgtgtcacacccattttgatccatattctttccccatattttcccatttttgggatgtagaaaaacatttaagggagccttaggatgtcactaacacctttattgtaacatttaaaaaaaaaaaatcccatatggggatctctccctataaattccatcctgactccatgagggttctcatggggttagttttgttaaacatgatcgaaacatcccaatatcggatgagggagcttgggttccttttcctaagtcaagatgaattttcgtagtactctaaagagtctcatttatgagatcttggactccatcaagaactaggagcaatgtagccacctcttagtctcttgccacctagaagggttggcaaatgatgatgcattcctttgtgaatcataggtgaaaggtgatagaagtggtcatcacctcattacctccttttgctttgtaaattttcaatgtgatttgttctctcttcattggattctaactatgcctttgtgttttagatatttagggtaactagtttgttcatctttctcatcatatatagctataaaagggttgttaccatcattcaaattggtgcacattggatttccttcctttttatcatcctttttgctacactaggcttcctcaagttcttatcattgggagaattccaattaggtaggtaaaagattcttaaccaacaaaacaataaattctttcttgggtctaatgccttagaaggttgcgatgtggatcctaactaagaagaagcttgctataggaagttttcttctaatttctttaaggtcgagaaaaagaactttcacaaaggtagagaaatactgctaagaagtttcctacacctttcaaggaagtaaggaaggaaccttttaaagttttcaatgaatgaaccaatttattataggttttgtttaatgtgtaaccatatacactagtgcattcatcataagagacccatttcgatgaccaagacaagtcatttctccaattaggaggtaatgcactataatttcaaatggattggctaagtccatgaaccaattataaataaattgtttactttcatggaacatatgacttggatctctatgcaactcataatgcaccaaagtcatgtacaatgtaagagatttcatgcttgaatacacaaagagcataatgcatgaataggatagagaaattgaggaacttgaatcatattataaaataataaatctattgttacatcatctttttttactcaaagacctttagcatagtaccttggaattaaagctattttgacatcatttggcctttttctcccttagacatttacatacgtgacttgagaaaaataatatgcttggtgcaaatgaggttttaactttgctctcttctactgcattctttacatcgcatgatggagcattgctgattgatccccccaaataccattaggtcattggatccatacaattcctctcaatcacttgaccaaatatttcttttcccataaacaagctctcttagttcatacattgcccatccactgatcattggttagtagttaaaagggttcttcagtataaaggaaaaaaattcttgacttccttctttgcaagcactcaccactcactttccatgcctttgcaaatgcaattaggcgggaaattttgatgatcacaattccacattagcctatgttatatctcttgtttccaatctgatcagtttgagttctaagaaacaaaaaaatatggctcaattcttgaccaaagtagaatatcgagttgtcgtctccattgcagctgaagtcgattaggtgtagaacctactcagtgaacttaatgctcattctctatcaaatgatttattttgacaatgtaggggtcgcatatgtttgtgctaatctagtgttttattcttgcatgaagcatattgccatatatttctactttgttcatgatcaagtgtccaagaagttgctatgggtttctcatgtccacaccttcaattagctcccaaattccctcataaaaccactattgtgctttcaatttctagatcatcattccatgattgacatggggatagaagctccatcttgtaggcatgaaaggaaaaactcattgacattgtccatgcatatttttggtgggtgttgatttgtaaccgctatccatattcacttccttaatctcatttgtaatagtaggaactacaactcacacacacatcatttaataagatgtgtagagacacactcatctttctcatcctcgctaagtttacactacaaaacctaccatttcagtcaagggcctaaaaccccttaggagaaaagcaattctaaagtacacaaaacacacataaattttgttacacgagtagaaaattaagaaaaagacaagatttttaacattagatgatcaatgcgatctctacgtccatggagtgcactaagagttacaatgatgcaaggattgagatgtccaaaaatttcagctatcggtcgacggaaatttcggtaatttttcgaaaaatatcgccgatatttcggtatttatcggtaattttgccgatttttcgggaaatttcccgatatttcctaccagtccagcccgcgcacaggatacaaaatctgtccatttttttttttttaaacaaacataagatgttatttggtaatctgatcatgatttgcaggcaaaggttgtgtttttcagcctggctcaaaaatcgtggatttagggttcgtgaaatttaaatccaacggcacaaaaggaaagagacccctagaacagatccagaaaacacaaggagcaaaaaaaaagcaatttttttggttttccttgggagttttgcatggattttctcggaaatcaaacgaggatgaattttctcggaaatcgaatgggggatggattttcttgggaatcaaacgggggttgcaaaaaaaaaaaaaaaataataacatgattagattagtacctgcgaggattgagaggggcagaggaaaataggacctttttagggattctcttggagggcaacttcagaaaagggcttcttgatgcccgaggccccagtgagagaagtgggtcgcccttttgatttttagattaagtagagattaaaaaaaaaaggaaacaaatcatgagaacaattttcctctctccgtataaataattattaattatccatttttaaatcaaaattttgatttttatcggtgatattttataaattaaaaataatttgataaaataaatttctaataattttaattatttaaataaattaatgttaatgaaaaaagttgttaccacatatttttaataaaattttagaaattaaatcttaaataaaatattttatataaattaatttaattttttatttaaaatgtaataaaacatgttttaataaaagtattttaaaaattttaaaataaatattgtcttaaataagatggatttcctttgtctaaaaccatattgatcttcattttgatataaaagattattacaatgtcatatgtattatatttatgttaaattatttttatttaataaaatcaaatattttttaatttaattataattttatacacttcctaaattcatatttattattcttaaaattcaaatatcgaatctaccatatatctctatgtcaattacacttataaaataactttaaaatgtgtatttttacttattttattattatttttagatcaaacattcctatgaattttaaataatttttgttccaccaacatttgtgaaaaaatatccattgatatttttttaatattttcgatatatcagtaaaatcgaaatactgatatatccgtaattactaatattttcatctttacaatggtgaaactttaaaaaaaaacctcttaattaccattgcactctctgaaaaaacaaaaccttaaacataaaaatttaaatatatagtaagggcaaactcacccatcatcacataaaaaaaaaaattctctaatgggcagtacccctttaacccccatgaactcatcaaataacttgatcccatgagctcatcagggatctcaacccccatgagctgattggccagttcaacacccccccggtctgcatcctgagtgaagcgcagcaaccttcacaatccaaaaaatttgacatagcaagaaaaggcaaagtatgacaaactatctccttgtttatgatactagaagactttaggtggtaagggtacgttagccaccattattatatccaccaagattggtcggttggacacaaatcctaactcttgactcaaccttaatcctcgcttttccatgaaagaagacatagtatggaaaaaaaaaaacagatagataaagaaattaccatagtcactattgagggtcatcattgatccttacatttgaatggtgaggacttccaatgttgatgatttcaaacatggggtcaaagataatggttaggacttttgaatggatatataatgagatgaaaggttaagggtctagaagaagtagggaagaattgtccaaaaatagctaagtatcaggttttaaggctaggagaggcaagtagtcctttagttctttagcactttctccaaacttcaaatatacttcaattggagatcttcacctatattttatatgtcaagtttctatacaaaatgtacctatgttgcataggtagttaggaagaagaaaataagaaagtgaaaagaaaaatcagaaaacaagacattgccatccatgtggtttgacaaataccatgtgagccattggagaagatggcaagcaagtttcatctttgcataaagattcccaatttcatctgaggaccctgactctctaccaaaatctgtatctttattattgtttctaataatataagaatattcattgtaggaaccaattccttacagaagaaacatactttcatcaaaaggaagaaaaagaaaaatgtccccatgaaatttcctttacacagatagaaatttttttgataggaagatgttaaggaattagaaattgaatgtgaaaaacaaacttgagaaactttccacaagttttacctttacattaaaattaaaaggccaatttcttataaagatcagagaaacaaggctgtatggacgtactgtccttttttttttttttttggtttatttaccactaaatgatctaaattctaagaacacattatagtagataaaatttggtcaaagcacattgcaagtaatcaaagtaattttggatagaaatgaaatttgaaacaagaagtttttaatttccttaaacacattcatacaattttttgccaccaaagtaagtatatcaattgattacagttgataaatc

SEQ ID NO: 10699 - DNA, 4266 bp, Vitis vinifera
  Intron number 3 from transcript GSVIVT01014363001 (locus G SVIVG01014363001) derived from phytozome v7.0 (chr-ID chr1 9; pos 3027366 to 3031631)
tggtaagggttttggttttttattctcttgcttcagtattgctttttggtcgttaggtttatctattttgaatgttgtagtgttatatgtatggaatatgtctatctatgttattggtgactggtttctgaggatgtgtgagaaaagaaagagcaaatctgttcaatttggaagtcacttgttttacatgtttagccatcagctgcttggtcgccaagaaaatgtaggaaataggaaagaatttaattttgaatcctagtgtcatttataatgcggtatatcttagttatgctgtatatcatcagcaggaaaatggggaaaaataaaggaactgaaatattggttgtgttgtatttcttagttaatttccttgcagagaaaatgtaggaagatttactttgttgttatatgttgtatttttaatcatctttttttttggttattaactgtcttgtaaattttaattgtagtctgttttcgtttctctgaaaatgttgcaaaacaaggaaaatttattgaaccagtattcttatttgttcttttcttttcaatgtgcacttcttagtttctaggaaaatgtaggaaaggaatagaaatgtcttggatttgttcttgtttgttttctgtaaattatattctgtttgattgctgagaagaattaggataaggaattcaaatttcagggttttgcattctttgggacatgaggagttaaaaatccttagtcatgtgagcaaataaaatagaactggttggattaacagagctgaacttttaatttgctttttgagaataaatttgtcattatctttaatagaaaaaatgagttgagcttttcattatttaatcccaaaataatggacagctcaagttttagaaatttatagtccatagtttcctccaaaaccaaattagggaggtaggggtagtttcaaatttttgtccttccccatctgctgtagttttaaattgatagcttaggctgtcccataaatgtaagattgaactccaatcagcttagtcaatgagaattgattgtcattctttatccgtttccttctgaatttggggatgtgatctggggttccctttagctgattgaggcaatgccttaagttagagtctcttcaacatttctcatttgctggatggcattggtaggcaatgctttaaagaggaaggctttgttgataccaaattatgttttaattggatgtggaattattcatttttaattgttttctaacaatttttttcccttttaatatgattgcaaactccagtcttttaaagagccctttcaggttgaagtatgtttttacctgtaaagttagtgaaaatgctctgagtgtgttggtctgctctctctctctctctcacacatctgcttacattcctcttgttatcttggcactctgatgtgtgtggagaacatgttgaacaaaatatgtcatgggtttaggtgtgacatatgtgtcaggacgcatgtctgagaggagtttctgacaaagataagaagatgtttatagttcatgaagagttccagtggatgtcttcatcctctgtttctctgttacaagtatatttctaaatgagtgtagtgcatgtctagtaagctaatttacttgtaatatttgagcctgaggtagttgatatagagaaattaacatctttgtagtttagccatgacccaattgttgaagaagctgatgtgtaggctgtaaatatgcaggttgatagttctttcctaattgtattattgctataaatatgcaggctaatatgtaggccaataattttcctagaatggtggccagactaatttgatagtttcctagaataatttcatagagctgtatatatatccctattgtaatcttggtatttgtatgaataaaattgaaatttctccacatggtattagagctggttagagttatgctctaagggtgtttttttccttttttgttggctggggggagtggtgtgggctattctatggtagaatctggtggccttcgtcgccctcttactcttacttcatttgaagactttcttttcttatctttgatatgcattatctagattttccctttgaaaaatttggcctcaattgcctagtatctctctcagatttctagtttttgttacccagaaattttttactacaacctatggcattaatattttaacttccttttatgtagtccttgctgttgtttatcaccttgtccaaactcatgatcaatttatcttcttcccaaaccacagtcagtcagtgacccttacttttcctactgaaaatattcccaaatcacaacctgcaaactcaatggccacacttgtcttggatggtcacaatctgccaagttattcattaaaagcaaaaagaagatgggcgatttgttagagaaagttcccattcctaaggatgataatcctaagtttgagacttgggaagctgaaaattccatgatcatgccttggttgcttcattctatacaaccagaaatcagcaaaccacttcccttcctttcaacgactaaggagatttgggaagctatgactcattcatattcaaaggtggagataaaggctcaagtttatgacttaaagaattaaattcactgtatgaagcaatagttgttatctgtgacggagtattatgatacgctagaaggcttatgactagaactggaccactatcaatggttcataatggaatctgttgctgttcaactgcagaagttgattgaagaagacaggaattttgcgttcctggctggtttaaatcctgaactagatcaagggttcaagttcttggaaaagaaccttttccctcaatgaaagaagcatgtgcctatgtacatgcagaagagagtcgttggattgtgatgttggaaaaaccatacattgagaatttggctcttgcaattcccaaatccaataattattatacaaccgagaagtaaggaggaaggagatggaatgattgaatgaaaatagcactaggtggtgtgagttttgtaccaaacctcaacatacacaagagacctattggaagattcatggaaagccctcttccattgggaaaaatgatggaaaataagagcagtctgaccagagacaaaatcaggattttttagtggataagaaggaagaaacttctatgggtagtcaagggtttggaggatctaatgaggaggaactacccgaaaaattaaagtgcttactagaccaaatgaacacttccacatatgttcaacaaggtgatatctctaaaagtcagttggtcaagacgaacactaggaagtgtgttctcaataagtggcacatggtcttgggtttatatcctgtcactaatgataccctaaatttacccggtactggttgttgtggggtggtcaacactttgagttttgggtccctcatagagactcctaagggcatgaccatgaaaggttctttggttatcaaaaaaaaaaaagtctctaaaggcttaattactttttcagtttgttattctgacccttggattcccaagtggtggattgggtgcacaacacctgaatttctatatgaaggtattttttttcatgttacaagcacttagtttcctgaatccaacctattggcagctttggtaaagctctatcttccttggacactcttgtcaacttaccatactaactgaaaagggtcaagaaccatcaaaaacctttcagaaaatccttgattgcagcagcttcaaattggagaacctcatgctctccctgagataataagaattaaaaaagacatgcaatacttaaaaccgtctcttttggatggtttggaaggaaagaaacaggattgcgttcgaaaataaggagttttctgcttaaagaatgatttttttttttttgtttgtttgtagttattgatcttggactaagttgtttatagatgtaggtcctttatctttaatcgactttttttatcggttgggtactagatgagggtgggtaagtctgatggttatttttctttgataagctaaatttccgagcatgaataattttttccctcataagtgagatattcttagaatacagagctatcaaacctatcttttctgttcagtagtaagtctctcacatatccttggcttgaaaattgttgttatttatttatttgtttatttatttgtaaataacctccattttcagttctcattcatatctgatcatctaccttttgtaggaataaacgaccagaatttactgc

SEQ ID NO: 10700 - DNA, 1880 bp, Vitis vinifera
  Intron number 1 from transcript GSVIVT01013948001 (locus G SVIVG01013948001) derived from phytozome v7.0 (chr-ID chr1 6; pos 7444842 to 7446721)
gacgcaaatcccaggtgcgattcgccaccctagcttcgctcttgtctaatttatcatgaaatttctgtagggcttttagttttcaagcatgcttcttcttggttactgtgtttggttttgagaaaatctggattttttttcttggggtatataatatttagggattttttttctccataagggcagtgattcgcaagttcttggtagttctgggtctaaaaacaaagtaccagaaaaggagaaaaaaccagaaagagggaaaaagcttctgatgttcattcaagaaaatactgaaaggttgtgatgggttcttgtggttctcattacctctgttatgatattggatcacagatcagttttcgaccctaccctttaatttctgtatactcacattatatacaagaactggtaaatgcaattaatgattgaacttaaaattgcagtactggtaataatcacttctggatgcatttcaaaattaacaagtatgcagaatggagtttctacatttttagatccaatattatagctcaccttcctcctaacctaagctctcaaatccattctcttccagagatgtgagaccccaataattattaaaaaaacaaaagtcagcccatgttgcaggcgttttggacctttggttgctcagagtgcttaggaattgattgctaagtcaattgtttggaaggcctcattcttgggcaaacacaagatacttgatattaaatttatattttggctttatgtattatattagagaataaaaatctaccgaaaccattcttatatattttacagacattttagcaatagactatggattatttttgtttgttttcaaacaacttttttagcaaatgtgagaaagaaccttccatcatcaatgaacatttgtttcttctcacataagcatacctactaatattattgcaattattatatgaactagctagtaattgaagttttcaaattcttaattgttttcttcaaaatccatttggatttaatctttgcctattgcaagttgtgtgactctctaagtgaaaacagccaacagacataaaataagaagatgtgaaagtccatttagatgggctggaattttcatagctttcatcttgtatttaatttatattgttttgccttggtgtttttcttcctctttattgttgattttgatatgggtttcttgtattttttctgaattcgatataggttccaaatttggtcttgaagtgatttttcttgttcctttatcttgatgttcacttgcatttatcattattttgttcactattcaatatgagacttgttaattttctccattttttcccagtgattctcaactgtatatattttttttctccattttggttgataaaaaactaagactatgaaaaagggtaaacactttgaagcccttatcttgctttgtagtttccaaaagataaagaaattgtttgtctttttcatttgttggatgttggattcaatatttcaatttctcatagcagcaaccaaatggagaatcatatgttcttgcaattataaatcttttatattaacattaggctaagatagatcacttttatgatttctttgaatatttcctggttcattaacacatcttctagagttccgtaggttttgaatgacctctgctctatttaaaatgattgtgatttgtgtttcattaatttgatttctcatttcttgcaaatggaccattggttttggaccttcggttttgtattactgcgatattacaagtcctgctcttggtctagttcttgtagtgtaacaaaaaatggtttttgtctgttccctttctttgatttgcaggtgcttatagcattggagtgcttcactacaaattc

SEQ ID NO: 10701 - DNA, 1077 bp, Vitis vinifera
  Intron number 1 from transcript GSVIVT01035029001 (locus G SVIVG01035029001) derived from phytozome v7.0 (chr-ID chr5 ; pos 1016496 to 1017572)
agcttttctaggccacgtcggcagcaagaccacttgtaagcccattccttcctattattttttattttccttattttgatgtttggttgcagtgaaaatgcaggaaagaaaaaaagattgaatgggtttagaatggaattgaggattttattcgtatggggggttgggctgaactggattaggaggtgtttgaggagttaactaaagggtttgattcatgaatcggttgaaaatcaaccccgagaacttaacctcatcatcctataggcttgatttgtgttacgggaattgatttagtgggtgttgttattttaataatttaagttagaatttaaattaaatcggttttaagttgtatcattttttttattgatcgtttagtaaaattaattaaaaatttattttaagttattaaattgatatatttatttctttaattataattattgtttatcattattatttttaaactaatatttattttcattaattttaaagaataaatctttttattaaatatccaaatctaaagtattataaatgtataagataattttaaaatatttagtataaaaaataaatcatatatatttgaagttatggttgttaaatatgaaaaaaaaaggcaataaaaatttaaattaaaaataaataaataattttaatttaatatttaaaattatttttagttttaaattatgagattaaattattttaccaaacatatccgatctacttaaattaggtaattaagtcaagtggatttatcaaacgcccatttaatccatttagaatgaatttgtcgattttagtttcattacaacattctgcttggttgctgagaaaaggcaggaaaagtatatgagaaaaaaaaatctctgaatcaaataagcccagtcaataaggttaattcttcatttctattcagcatccaatatatatatatatgtcataaaacatatgaattaatctgcttcttggttatcttaatcattggtttctgtcattctttgatttgtttgctctttaaggtagaagaggtaacaatggcaatggtgatgatattttcaggtggct

SEQ ID NO: 10702 - DNA, 9723 bp, Vitis vinifera
  Intron number 8 from transcript GSVIVT01018995001 (locus G SVIVG01018995001) derived from phytozome v7.0 (chr-ID chr4 ; pos 17981198 to 17990920)
ataacagatcaaaaggtctttcaagaaggtattcttatcctgttgcttctggttgcatgaatctgtgataatttatgaaccttacatttatagtggggggttagcaatgccttgagctttgttaaaattatatttaaaaaaatttggttctaattctatgtgcactctgttgttcttcattcctgtttttattctctgtacttgcaaatatgcttgacattcttttttttttttatagataatcacaaatatattaaagggcaaaggccacaaagcatatagggagtatacaaatcagcctaaaacaagaacacaaaaaacaagcacccttacccacccttaagtggccgctagcaactctaaaaagcctaagagcgaagaggactcctcttcaatatacaccctagcccaactccacaaggtacatacaaaagaatttttgagtttctgtatatctaacacacctcccctaaaagctaatctattcctcttctttcataccgtccaaaaaatacacaacgggatggaattccaaatctttttcctctttttccccacaaaagagcccctccaactgaataacgcctctttaactaactctgggaacacccactgaaccccaacaagggcaaggacgatctcccatagggcccttaccactatacaatgtaaaagaatgtgatttacattttcctcttcacaaccacacaaaaaacagcggttagggagctgccatccccttttttgaagcctatccaagatgagaatcttcccccacgcggcttcccaagcaaaaaaggccgctttggttgggaccttgtccacccaaacacatttagtccgaaaggcgcatgcattggtaacagccagcacattgtaggcaaccttaaccccatatttgccatgacccccacctttccatagcacaacgtcctcctctgaagatatcctgaagtccttgagcatattaagcaatcctctaatcaagtccaactcccaatcattaaaatctctatgaaatctaagattccaacctccttgaccaatgcttgggtcccacatctcattaaccgttgcattcctgtgaaccgccaactcaaaaagctaagggaaagattgggatagcgccgcgttgccacaccactggtcagtccagaatttaactctagcccccttccccaccttaaactttatattatcccagcaccactttgcttccttcaaaatctccttccaaacccccactccataagttccacgggcttctttagttctccacccaaaatcttcctgaccatatttcaccccaatcaccatcttccagagattatcctttttaacggcaaatctccataaccatttacccaacaacgctttgttcaagggatcaatcttccgaatgccaaggccacccttctccttttgagtgcacaccacctcccaattaattaagtggactttcctctccaagcttccccctccccaaagaaagtctctttgtaatttttcgagtctatttgcaacactcttaggcattcgaaagagggacatattgtaaataggcaagctggccagagtgctcttgattaaggtgatacgcccacccttcgatatatattgtcttttccactaggctaatcttctcctcattctctcttccaccccatcccatatagagatagctttgtggtgggctccaaggggcagccccaagtaaacagtgggcagcaaccccactttgcacccaagctccatagccatttcctcaatttcttccacctcaccaaccggaattaagacgcttttatgtagattaattctgagaccggaagacgcctcaaaccaagccaaaatccagcttagagcggatagttgctctttcctagcttcacaaaagatgattgtatcatcagcaaaaagaagatgtgaaactatcatctcctcttcccctctcccccaaattctgcatcctgacaagaagcccccatcaaccgcccttcttatcagattgctaagcacttccatgcccaacacaaagagatacggggagagaggatctccttgccttagccccttggaattcgagaagaagccagccggcaccccattgatcatgactgaaaatttggcggttgagatgcaccaccaaatccactccatccaccgtgacccaaagcccatttgaaacagaactttcatgagaaatttccaattaatgctgtcataggctttttcaatgtccaatttacagatcaaccctttctcgttccttttgtgtcagaaatcaatcacctcattggcaataagtgacgcatccaaaatctgtttgcccctcacaaaggcattttgatccccagaaaccaccttgtctaacaccttcttcagcctattcgtcaacaccttagccaaaagcttgtacaaactccctaacaaattgattggccggaaatctcccaggtcttcaacccctcctttcttagggataaggactaagaaagtggaattgaggcttttggcaaaagatctctagtcatagaattctctaaataggtccataatctcctccttcacaagctcccagcttgattgccaaaaagcaactgtgaagccatctgggcctggagctttatcaccattcatatccattagggcagcgtaaatttcctcttcagtaaacggcatctccaagacttcagcttcacgggaattgaggcgattaaggtgcagcccctcaatatccgctctccagcctggttcttctgatagtaaatgctgaaaagcattcactatcccctccctcacctcctggtcctcagtcatccatactccattaattttaattctatccagagaattatttattcggtgagcatttgccatcctatggaaaaagccagtgttcctatccccttccttaagccacaattcccttgacaattgtctccagtgggtctcttccattaagacccattttttaaaggagtccttggcttcttttttcagctcagtttctccttcagacaggcagactcctctcactttccaccctgtcccaaaactccacttgttgaaggattgagttcttattggcttccagcctaccaaacacctccctgttccacactttaattttttgctttagctccttcattttagtggctaacctgacactggccctccctctcacctcaaccccctcccaccaaccccgaagaaggtccgtaaaaccatcagctttaagccacatattttcaaacctaaacggggaaggacccctccttaacccaccccccatcaacaagataggaaaatgatccgaggtaggtctgggcagcctactttgcacgacctcattgaaatgatcaagccaactctaggtcaccaggaacctatccaatctggcccaagcctgattattcctccccccactccatgtaagcacacccccttgcaatggaaagtcaatgagctctaactcatcaacaacctgagcaaaccttctcattgcactcgttagccttccctaattacttctttcccttagggaaaggatgacattgaagtcaccccctagacaccaaggatcatcccaaatgcctctaattgctcctatctcctcccacatccactccctttcctctctagagaaaggcccatacacaccactaaacatccaaactagcccatcttccacgttcctcagcctacaagagattgagaaatttcccacttccatttcaatcatttccaaggtcctcttatcccagcggatcaataaccctcccgcagaaccatgggcatccagggtaccccaatcaagaaatctaccaaaacctaagcttctcaccaacccctctgtcattgcttgaattttggtctcctggagacagaacaaatccaccctttgactcctgatcatggccttaatcacctttctttttgaactgtcgttagctccccgaacattccaactcaagagtcttagctttatttaaccaccatgatctgacaccctcttacttgcattccacacttctgtttcttccccccctcgtagttaattgagcattttagtcttttcaattccctttcgaacttagatttttctagaaggtttttgttgtggactctttcccttctctttcggattttaaccaaaaaatccaaaatttctctctagaccttctgtcgaaaaccccaaaaacttactaaatttggccaactcactctcctcccatccctttcctcctcgtggcatagattgaactaaacacaactcctttccacagttgtccttgcagccattaataacctccgtcaattcccagcgccttacattctcctcttctaggggtcccggggtgagaagcatgcataaggggctttccctcaggtgagtcaccctgtcatccctagaaaggtcgcaatactcccccaatggagtccaaccaaaaaaaaaagaaggagaaggtgaggacctagacgccaacaaaccactagggttaggagcacactcgtacctcaacgcttcctcaattagggcgtggtcggtccttgacctctccacggaatagagctcctcctcaatttgctttcgtcgaccatctttttcccagaaaggaaagctttcagcgtctggatccctcagatgatttggaccagcccacactataggcagggccaccctaaagcagcccaccaaagattggggtgggcctcggcagtcgtccctcccagccggcccaggcgccccaatggtctccaaggcctttagcctcctagagccctctaaagacgaaggcccaaaaggatacggcccagccttaggagatgagactggatcaagcccaacggcccagagcccaaatcggagctttgaaaagcccaagtagggccaagcataatgggctccccttgcaggccttcctggtcccccactaacgacccaactgggcctcgagaccaagcccaaaggagccccggcccacctgtctgccccctcgtcccatcagcagactgcaggtgggtctcgatctttgcgtcgtccacctcttccagcacgcgcttgcccgcgcgtgcaaagacgtcaccctcaacctttccttatactctgttgttcttccccctcctctctgccagcagcactctcgttgccagccttacctcccaccacagggttagcgaataacacaccccttcgaccccaatttctatcatgccagggatctcctcgccggttagcttcactaggatccttgcccactgcagctcctctagcctctccgtctgagaatcaatcgctaaaaatcccccacacttctcccctacctttctaagggtgtcccgatcccataaagagatgggtaaccccacgattctcacccaagcctcattcttcttctctccttccaacagacaccccgtcctagggctccatttctccagtcgcagaaatgtcttccctaccaaaattcctcccagatttagagcttatttggcttcagctactatctcaaactccagcagcacctttctcctttccaacttagccaaacctaagttgcccttcaacccccaagatcgtgccatttggtccccccaacttcacaggtcatcccccttcactggctttggatcccacgagccaacaaggcaatgatccaacctctttaagtttcggctaaggtccttgtggcttacttccaccctagccactgacctgccattgcgattttgcaacttcaccacttccgcaaaacttttccccaaactaggcaccaacggcatcgcctcgtccttctgactctccttcctctccatagcaacacccaaagccctaagtgtctccaccatagcaacccagccccctttccctcattttcctttggggataaagatgttgaaccttttcttctccagatcctcgacacccagacggatgaagcatccccccttattttcatcccgcaacagtgagtatctccctctttccctccaatttcttacccatttgcctgttcgtgtgtccttaatgcacagagccaaaccttccacaaaaagccctagactatccggacccatcttaatccacgaagacacccctcttttcctttccacaataatgacttgcattttccccttcttctcttctgcctcgatctcgaaggtcttcgactccaccttgaagttgctcttccaccggctgttccaaggctccaagccgccaatattttttgcaccatcgctcgcacacagaaccgctcgctctcctccctcgttctcactctctctctctcttgacattcttattgatgaatactgatcaaggtctagggatttttgggtttgaattgtatatcacttttttggtaggtataaatagaaattatataaaaggacataaaaaatagacaatccatgaacacacgtggtatacaaggtacatccaagcatagttcaaaaaacaataggaagaagaagaatatggatctgcaaaacctcctgctatatctctctcaaatcttgaatgagcccaaaggaggatcttctgctatttgatctacttcttctgaccaaacagataaacatataagcaaaatctcttttctttccaaactgaatctttaatccccttggatggccttctataaaagccctcccagttacaccatgctaagcatgaaggaactgtcattataaccctctttgaaggttatctcatccttctttgtactatacatttatgttctttaaaatgaactgtttgttcccaattaaaaaaagcataaaggtttgacttatagaacctaagcacctatctagggccaaataggatattccaaagcccatagtttccaggccattggacagcataaaaggatgtgatcagttttctcttattccttttacatatcaccaccatttggggtgatcacccccaccttgaccaacttgtctatggtcaaaatccatctctaaactgatgttgacatgaataacattgccactttttggtcagccaaagtgcctcaatttattattattattattattttttttttgaaaaatcattcttaccccagtattcatatctctataaaaaagatttaacagaaatcttgttatctgaggacaactttccattgactgatcatgcctgttttgactaatctccttcttatgcaactgttctatggaagaaagatcatcctcttcttctttgcttctccatgatgaagtttgtgttccaaaatgagtacttaaatcattgtttatttctgattaagaaaagtataaaggagctacatgacaaacttcccatgcctcctagaaggaggcctgattacaccaaatagaatgaagatcaaagcccataggtctctagccattgaaagacaacaaaggatgtgagctgctcctcttgtgcctcttacacatcaccatcagttaggagtcatctcccccatcttcaccagctggtctgtgattaaaatctttctttgaactgctgctgagatgaagaatgctgtcacttttttggaaggaaaagtgccccaaattcctcttctggaaaatccttctcaccccattagccatatcttgataaaaaggcatttaacagagaccgtagtgtccgaggacatctttcccttgaatttcatcatccctgttttgactaatttcctttcttagacaaggatttggaaacttcacttccaatgatctctttccctgcaccactcaccttgcaaatcgtatcaattgttaagcatgttcatttgtccctgcttcttgtctaattggattttgtacaagccttttcaaaagtactatgaatgcatgttttgtgttcataatttaattgatatcaactagggatgaacaaactggcaaaattgctgaaattatgactgatatttcagatatcggcatcactggaaaaaaaaattggaggaaagttgggccagtggtgtatcgccgatttttggccaaaaaattgctgaaatcattgacatattgagaataatctaaaaaggatgtattgaaaggaaattttaattaaaataaagaatgattgcaaatatgagcaaaaggagtttaaaaataatattatattagtcttgaaattttaaaattaatcatttttttgggaaaaaagtatcttgtggatgtgaatttaggtttcaatatttatcttaatctaaaatttgattttttaaagaatatttggaataatctaaaaaatggatctagaaaaattcatatatttttatttaaaaatcccactttatatttttatctaaatttaaatgatagtttttattcttttgaagcaatgtcaaaaggtatatatatgaaaatttaaaggtaaaaacttggtaacaagaatgatttttacaattttagtgttaaattttgattaaaaagaataaaagatctaattatatgaaaaataagaatttcacttgaataaaacacattcttttagaagaactgatcataaaaatgattatcttactttaggcgctttttaatgcatttcttgcttacctataaaagaaatgattatcttactttgatttaattgtttaatttgttcattttaaatattagtatcatattttatataatctaatttaattgtaatataagttgattattaggaattatgaatttatgagttgtacttgtgcatattttttatgtttaattagtttaatacttcaatttaattattagtttgttatataatttaattagtttattacctgtgtactatcagttttttaatcatttcttagtgttttttttttccagcatttccttgagtttcgattaatttccctctcactgaatttttcttccaaaacttctgtccaatatttttgatatttttgtaaaatcgaagcatctgtatgccgtggattttcgatattttcatccttgatatcaataagatgatttgtttaatagaatgagatttcaccctatacagaaaatcttgaatgaagtccaaactctggacctagaacaagaaaatgcttagttaatgccaaataaactttcatgaaaacctttttacctaccttttgatgtttaatttactgcactgacagtggaaaatatcaatttttttttttatattgtttcaaatttaaatgcatctactttttctcaaactacagtagacttaagtatatggagaaatctataactagcatgggaattggaattagtgctcttgatattagaatctttataacataaataatgtaattactgttgcaaaataagttggtttggattcttgtggtaattgttatgctaatacatgcttattttaagggagcaaagagaatgcagacaaattttattatttagcccaaatattctgcttttgaagttggccaccctattttcactcacatttattacttgtcagcactattatggtagcttatattattttgttcagttgtctagtaaatggcattattaaaattgtatcaattggtcttggttgtgaacaatttccatatctctggtacactaaatgatactcaattcaacattgatgcacatatttatgtatcttgtgtttgtttgtattgcttgatctgctcatttctttgtcaagagaatattaacattagtactccatgtacctgtttggtattggatttcaaagtaacaagtggatactgtttcaggttcttactttca

SEQ ID NO: 10703 - DNA, 15015 bp, Vitis vinifera
  Intron number 4 from transcript GSVIVT01023350001 (locus G SVIVG01023350001) derived from phytozome v7.0 (chr-ID chr1 2; pos 19430909 to 19445923 reverse strand)
attttcacaatcctacatttccagtaagtgattattatacatatacagagatcttttgcatgattgctctttatgatttaatcttggttgttgagtctgattgataccagcacttaaacactgtgtgatgtgtaaattataactgttccatggtttgtcccagcattaggaatttattgacacaagttaattgtaacagggcataaaattttcaaaattaaatgtttttctgcttttaagtaattaagctatcccaattggcttgttttaggcatatattccataatagtttcttcatctctatagatagtgataagttctctcactctctctttctgtgttctctcttgctctctctctttttgtgctgttacatgattttgaagctggagcttcctccacccccatccaactcttgccaagggctgttctttttgtgaatagaaggttggttggtccttttgtactgttgtacatctgtcctgttacccatccacgatagatggtgtgtttaccctttaaccaaagggccttgtcttcccaagtattagcttggttttctgttatgcatcgatggaggatgatgtgccttttttaatctaatgacagtgcccaccatatgctgaccacctaaatccccagcttaagatgtcaatgctactgcaaatattcttggaaatgcatgcctatctatatgggtgtatgttacttaacaaaatatccttgcacaacttctatatgtagcttagcacttatgcacatgcaactatgtccttgagagaaactatcaacatcatccactatgaacatcttagtttagcccttagaaatgacccagcatgtttcatcctataaacatcataaagctgatgatggtacccaccagtctgtttactaagaggcaaggttgttagctcccataaggagttcttactcggtgtacactatcttccatcaatcacactgctctgtcttatgacgtcctttgataaaattttgaaagggatatgaaagctaaaagctggaattaggattttaaataattcatccacattgatttcattgatttacaacctatgtattcaagctgtatagtgaaggaaacaggaaaatattccaaggaaatagcaacagataaaggaaataggctaagcaaataaaaacaaattcctacaattactctaactttcctatcttaatataaatatacaaatctgatttcattttctattcaattccatgattttagtccataatcaaatcagaagaaatattccctgctttcgaatactccccctcaagctggtgcataaatattatgcattcccagcttgtctattataggactaaacatggtgtttatgagtgcttttgtgaagacatttgctagtttctgtttagtagacacaaaaggagttttttttttttttttgataagtaaacaatatatgcattagaaaaggctaaacgccacaaagcatacagggagtatacaagacggctaaagcctcaaaaaaagaaaaaggaccaaaaagaactacctccccttaagtggaagctatccactccaaaaaacctataagggagaaagactcctcacctaaatacactttggcccaattccacaagttacagacaaaagaattctttaatttctgaatattcaattcaccccccctaaaggctaacctattcctctccttccaaaccgtgcaaaaaatacataacggaatggatttccaaatctttttccttttcttccctacaaatgagcccctccaggatattaaagtctcctttacagtttttggtaggacccacttaacatcaatcaacccaaaaataatatccaataatatcccatagggctctagtcactatacagtgtaaaagaatatgatttacattctcttcttcacaaccacacaaaaagcagcaatttgggagttgcaccccttttatctggagtctatccagagtgagcaccttcccccacgtagcctcccaagcaaaaaagcagactttagttggcaccctatccacccatattctccttgcgggaaatactgtggcattaggcttgtctagcagcctgtaaacttctttgactttgaaaagaccatttcttccctgcctccacataactgaatcatcctctaaggagggcctatgacccctcaaagtatgaagcagctccccaaccatatccaactcccaatcattgaagtccctcacaaaaacaagcttccaagctccttggcccgaatcctgatcccacatctcctcaatcgtagcatccctatgcatggcaaggacaaagaggtgattgaagcattgggacaacggagtgtcagtgcaccaactatctttccagaatttgattttggaacccttcccaactataaaggccaagttttcccagcatcaatcagattctttcataatctccttccagacccctactccagccgccccacgagccttctttgacctccaaccataatcctcttgcccatattttgaagtgatcacttgtttccaatattcttttcacaagcaaacctccaaatccacttgcccagcaaggctctattcagagtggctattctccttaatcctagccctcctttgtgtttttctgtacagaccgcatcccatttaactaaatgaacttttccctccaagtttcctcccccccataggaaatctctttgggttttctccactcttttagcaacagacttgggcattcggaaaatagacatttggtaagttggcgagctagccaaggtgctttttatgagagtgatcctcccccctttggaaatgtactgtcttttccaaagcgcaagtctcctcctgatcctttcttccactccatcccacatagaagtagccctattggggacccctaaggggaggcccaaataatgagagggcagagaccccaccctgcaccctaactcaactgccaactcaagaatttcctccatttctccaactggaatgatttcgcttttggctagattaattcgaagacccgaagccgcttcaaaccaaaagagaatccagcttaggtgagaaacttgctctttgctcgcctcacaaaacacaattgtgtcatcagcaaaaaataggtgggagatattcaaggaggttctactaccaccccgaatattacaccctgagagatatcccccctccaccgctctcctgataaggacgtccagaacctccattcccataacaaagaggtaaggggatagaggatccccttgacgaagccctctagtgctagggaagaacccagctggcactccattaacaagaatagaaaatttagcagaggatacgcaactccacatccatcccacccacttggtcccaaagcccatttttttaaggaccttcattaagaaattccaattgatgctgtcataagctttttctatatccaatttgcaaataagacccttttcttttctcttctgccacgaatctatcacctcattagcaattaaagacgcatccagaatttgtcttcccattacaaaggcattctgagcagtagagaccaccttaccaatcacttttttaagcctattagctaagactttagccaaaagtttatagagcccccccaacaggtttataggtctaaagtctccaagatcctcagccccgcttttcttaggtatcaacaccaagaaagtgttgtttaggctcttaacaaaggaattatgctcatgaaattctttaaacatctccataatctcctctttggcaaaatcccatgcgttttgccaaaaggcaacagtaaaaccatccaggtcaggggctttatccccattcatctccatcagcgccgagtgaatctcaatctctgcaaatgggatttccagactctctgcttcttgctggctgatgcaacccacctgaatgctaccaatatccgcctgccaacccatatgttcagaaagcaactgctgaaacgaattcacaacaccttctctcacctcctgctcctctactagccactccccattaaccttaattctgtccatagcgttgtttcttcgatgagcactagccattctatggaagaacctcgtatttctatccccgtcccttaaccaaatctcccttgagtgctgtctccaatgggcttcctctaacaggacccatttcttaaaggaatctttagcttccttttttaattcagcttcctccatagacaaaattctctcactttccacccatagacaaaagaagttacaatatgcccaatctcaattttctcctttatgaagtgtctatccacctccacatgcttagtcctatggtattggactgggttgtgagcagtattgataacagccttattgtcacaatggatagttgttggttctttaggctccaatcatagctccttgagaagatttttaatccataatgcttcacactgatctcattgatttacaacctatttatgcaagttgtacagtgaaggaaaaaaggaaatatgctaaggaaattgcaacaaataaaggaaacaggttaaggacataaaaacaaattcctataattactctaactttcctatcttattataaatatacaaatctgatttcattttctatacgatcccatgattttagtccataatcaaatcaaaagaaatattctctgctttccaacactcccctcaagctggtgcatgaatattgtgcattcccagcttgtctattataggattaaacatggtcgtttatgagtccttttgtaaagacatttactagtttttgtttagtagacacaaaaggagttacaatatgcccactctcaattttctcctttatgaagtgcctatccatctccataggtgtagtcctatcatgttagaccgggttgtgagcaatactgatagcatccttattgtcacaatggatggttgttgggtcctttaggctccaatcgtagctccttgagaagatttttaatccataatacttcacactgatttcattgatttacaacttattgattggtgttgataatattacattttttattgcaagtgttgcaatccttaatggtgaaactccattgattttcttctaggtgagactcctagaaggccttagtgagattttagggtttccatctcttcaacgttgtatattttttccctctatttttttaattttatttttctctaccataaactttattccttgttcctctcctcacacctaaaaataaaaatcctagcccatctatctgagtgtaggcagccattgtagggttgtcctacaaaacttcttagagccaggttcttggcttgaaggtgtaacttatgcaagcatgaattccaaaaaacacttctaataatcaagatgccgctacaatacacttagaggaaatttcaactacaacaatcctatctagatgctataatacaactaaatagcaaacttgatgagattatgaagttattagaaaagagtcaagagaaaggaccaattgaagatgagattacaaccatcaatttagacaatccccaagtagatcacacgaagaacaagacaattttatgatggggaatcaaagaagaggcaaactctttgagcaagatgatgatgtgacaaaaaaggtacgccttgaagttgctgaattttatgaaaaattaaatccaacaacttttcttgattagattatatcgatggaagattactttgattggcatgaaatgcccgaaaatagaaaagttcattttgtgaaggcaaagttgaaaagagcagtatgtctatggtagcataatattgagaatcaacttcatagaactagacaaccaccaatagacacatgagattagatgaagttgaagatgaaaaaacactttctcccaattgaagaattccgtgaattgagcattcaaaattaagtgtgggaaagtgatgctcaacttgcaacccattataaagctggatttctaatggagattcaatttgagatgatagctgcacacacttatattgtagacaatgtttatcaactagccctcaagttgaagaaatcctcaagtttcgggtttccatatgtccaagttcataaattgggagctctttctctagccggacaacaatcaaacctttaagcacatcaagcttcaaaacttctaatcatgtaaatggtgggggcaacaatcaatagactttgaatgtggctaataaagatggtaataggggtaaaacttcaatgagtattggggatagaaaagtagatgtgactcctttatgttttaagtgtggtggacatggtcatcatgttgttgtgtgcctaagcaaaagtttacattttcctgttgaagaacaaaatctaaattagagagttacccaaaggaagaagagacctgcaatgtagatgaacttagtgaacaatgtgattactatgatggtatgatagaaggccatagtcttgtaatgcaacctttattaattgtcccaatggtaaaaggaaaaggagaatggcagcgtactagcattttctagacacatatttcttgccaagggaggttatgtaccatgatcattaatagaggtaacagtttgaacatagcttcataaaagcccgttgagaacctaaccttaaaatagaaagacatccaaatccattccgaatagcatgggttaatgacacctctattctagtaagtttttgttgcttggtcatattccttttttataaggactttgaagagttcatatgttgtggggtcttaccaataaaagtaagtcatatttttcttggaagaccttggcttttttatagaagagttcaacatgatggctacgaaaatgcatatactctcatacataatgggtgtacgaagatcctttgtctaatgaaagaagttcctctaattaaaaagtcaaaggagacaaccaaaaaaaggtacttactatgtgtcaatttgaaatggagagcatgaaaactaaagttatttttgctttaatggcctaggaagtggatgaatttaaagaacaagataaggaatatccaacaaatgtgcataatatccctgataactttttttacttgtggttgtaaagttacctaatcaactactttctatgcgtaatgtacaacatgccatttatttgattcctgatgcaccattacagcagaacatgctgaattgaagaggcaagttgatgaattacttactaaaggctttattcgagaaagcctgagtccttgtggagttcctactctactaacaacaaagaaggatggatcgtggcagatgtgtgtggatagtcatgcaatcaataaaatcacaataaagtattgatttccaattccaagacttgatgacatactagatatgatagttggatcattaatctcaaagattgatctaagaagtggatatcgtcaaatatgtattagaccaaaagatgaatggaagacatccttcaaaactaaggatcgattgtatgagtggttagtcatgttgtttggattaactaatgcctcaagtacattcatgttggtcatgacataggtattgaagccttgtattggacagtttgttgttgtttattttgatgatattcttatctatactcaatcctatgaagatcatgaagaacatttaaggtaagtgatgcaattcttggggctgaaaaattttacattaatttgaaaaaatgtactttcatgagccttagtgttatatttttaggctttgttgtgtcttctaagggtgttcaaatagatttgaagaagatcaaagctattgttgatcaacgaatatcgacaaatatctatgaggtgcgaagcttccatggaatggctacattctattgatgatttttcgaaatttcagctctattatgttcccgattactatatgcatgaaatttgggccatttatttggattaaggcagccaacaaggcatttgaagaaattctatccaagatggtgaaccctcctattctaggtccaccagactttgagaaagtatttgagattgcttgtgatgcttcccatgagagaattggagcagttcttagccaaggacatcctatggctttctttagtgagatactcaatggggtaaagaaaaaatgcttcacatataattttaaattctatgcggtggtgcaagtaattaggtattggtagcattatctcaattacaaggaatttgttttgtattcggatcatgaagtcttgcgatatcttaattctcaaaagaagcttaactctttacatgctggagtagttttcttcaaccatgcaccttcaatttaaagcattgtgcgggagttgaaaataaagtagtcgatgccttagtaggaaggctcttctcttagtaaacatgttagtcactaccattggatttgaagaattaaagcattgctattacaatgatgctgattttggagatatttattcccctcttttaagtggttcaaaagcaacacaagttgatttccagattttagaggggtacttgttctataaagatcgtttatacgtactaaggacttccctatgtgatcatgtcatatgggaacttcatggaggtggaatgggtggacaatttggatgagataagaccatcgctttggtggaagatctcttcttttagcctagtttgaagaaggatgtttagaaggttatttcaatgcaaatatagggttatatacaccattaccaattccaaccaaaccttgagaagacttgagcatggaatttgtacttggattgccaagtacataataggctttgattttatatttgttgtggttgatagattttccaaaatgacatattttatcccatgtaagaaggcctccgatgcttcttatgttgttaccttgttctttaaagtagttcacttgcatggattaccacaatccattgtttctgatcataatgtcaagtttttgagttatttttgaaatgccttgtaggctaagctaggtagtcaattaaaaatttcaagttcttttcatcctcaagctgataggcaaacaaaagttgtcaattgaagccttggtaatcttttgagatgccttgttgagaaatcgggataatgtcttaccataagctaagtttgctttcaacaactccattaatcacactattgagtactcaccttttgaagtggcatatggactgaaacctaagcaagttgatcttattccattacctacttttgtccacaccagctaaaatggtgatgcatttgcatgtcatatacgagatatacatgaaaaggtatgagaaaaaatcaaaataagtaatgaaaactataaagaagcagcagatgcacaccaaagatatattcggtttcaaggaaacctagtaatggtttctctatatccaaaaagatttcattcaagcacatataaaaaacttcaaactaagaaaacgtgtccattttggatactaaataggttgggtgagaatgcatatttgctagagcttcctttagaattgcattctagtccaatatttacctgttgtccactcaacgaggtggataccaaattttttttatgaaatggcgaggcaaaccacactctaaaaatatatagattacaataatagatttttagaagcttaaccttgacctttatgcattgaatcaaacatctaactcattggagtcgagttctttcaagccagggggaattgatgggggaaagtcttttaaagtatattcaagaaaggaaagaaaaggtatgactgagaattaatttgataaaagtgagttaatcctagtgggatgtgtggaaaacgtggatgctttggctgcaaaacttagttgtaaggtcaggagtctctcctcctcttatttgggattgcctttgggaggtccttttaagtctgtggttgcttgggatggattggaggagaggtttcgaaagagattgacaatgtggaagagacaatacacctccaaataagggaggctcaccttgattcggagtactttggctagcttgcccatttatttcatgtttgtgtttactttaccttggacagttagattgaagttggagtagatttagagggattttttgtgggaaggtggggctcttgagaggaaacctcctcatgtaagatgggcacttgttttcttagacaaaagaaaagggggtttagaggtgaagtgtctttcttctcttaataaggcgcttttgtgcaaatggagttggaggtttgcaaatgagagaggggccttgtgaaatcaagtgattaggggaaagtattgggaggagcacgggggttggtgctccaaggaagtgagggatgggtatggtggaaaacaattaggaaggagtggcatgttgtaagtagtagactctcctttgtggtgtgcaatgggcagagagtgagattttggaaggataaatggtgtgaagattcattttttttgttgcttttcctactttatttgctatagctatgtccaaggatgcctaggtaaaagatgagtggagtttcactaagggaggggggtgttggagcccgtatttctttagaccctacaatgattaggagacggatgaggttcatagatttttattgggcctcaatgggaagagtgttcagcggaatatggaagatagggtgctttggatagagactaaatgtgggaagttctctattaagtctctctacaaagccctagaataaggtccttcaatctttttcccatcgaatgtcatttggaaatcctatgtgcaacctaaagtgagttttttttaggtgggaagcaacttgggggaaggcttttactttggaaaattttataaaagaggacggcctttagcaaatagatgctacctttgccaaatgcatgaggaatcgatagatcatatccttctccactgtgccaagacaaggactctttgggtgttgtttttcactctctttggggtgcagtgggtgctgccagcctccattaaggcaacacccttgggttgggacgagtcctttgtgggaaaaaggagaagggaagtttggagagtagaccctttatgtattttttggacggtttagaaggcaagaaacaaaattgcgtttgaagatgatgtgttgtccatttaaagacttaagagttcttttatttattttctttggtcggagacgaaattgttcataaaagatggtccttcgactttggttggtttcattgattgggtaggatcatgatgagggtggtttttttggcccctctacttttgtcaacagttttttgtcccaggcagggagggggggtgcacctattctatatttttttgagtcgctattttagtgtctcttttgaatacaatttcttctcttttaattataaaaaaaaaaaaaagaaaggaaagaaaaagtataaataaactttaagtaggattaataatagttgaaattaaattagaattagtattagttggaattaaagtgggattagtatttggagtcaaattaggtttagctaattaggtcataagacaattagaattaaagtcataatgagttattagaatcttagtagactttggatttcttagagaaacctataaataaggctaattgatgtaaatcaaatattgaattgattgatattaataatattacttttttatttattttatttattgcaagtgttacaatcctcaatggtgacattccattgattttttttctaggtgagactcttagaaggccttagtgagactctaagagttccatctcttcttcatcatattttctttctctccatttatttttaaattttatttttctctactataaactttattccttgttcctctctttacaccctaaaaatgaaaaccctagtccatctatttgagagatttttgtgattttactaattgacaaaagattatgagcaatgtttggaacatgaagaattgaatcaagagtaattgatagagaaattgaaacaaaaccttctccactaatagggataaatgaaccattggcaacaaaaaccttaccataatttgagtatgaactataagacaagaaattgtttgattcattcgtcatatgattagaggctcctgaatcaatgatccagggtttagaagaaatattttcaaatgtgtgtaatgcataatcaatattacccgacttggcaaaataagatgaagggttggatggagatctagattgacctagtatcttgtacaatagttctagttcatccttactgaagggacttttgtctgatgatcgagaggttgtttcaatttcaagatcatttgcaacaatcccttggaaagctttcttgaagggtaccttgctttcttttcacctagagttggtttcccatccaatttctagcaagtctctcttgtatgccttggcttttggcagtaatcataccaacggttatccttttctccagatttcttttgtttccaagatttagaggaattaaaattattctggagcctccatcttgttcaattttcaaagctgagatttcttgggagattggacccatcaacactccttcgaccttccttgacattcatagaataggttcttaaccaaggagtctaccccttacctcatccaattttggtttcaggccagctaaaaaatcaaacactcttgtcacattccagaatttttgccaaggttgctgcatcttcggaagttaccatttcaaaatgttgaaggagatctagttcctaccacaataccatcaggttgttgtagtaaactgtcacagagtgatcatgttgttttgtattatgattagttgtcttcaacttgtagatgtgggctacattccccttctttgaataggtctgagactcagcatcctacacattcttagttgtcgagagttaaacaaagggttccccaatctctggttgaatagagttcagcaaccatgacatgaccattgaattttctgcatcccatatctcgaattcaagatccaagtctttgggctctttgacagttccaagcacatatttcatcttccttctacttttcagaaaatgcttggcagattgggaccatgagaaaaaattctctttatttttctgttgtaatttgaagtgtgggattttcaaaactggtagcaattttgggtggatttgaatagggactagacatggagttatttgagatctctgacattatcaatggaaggaaaaaatgaattggcaataaaggccagaaaaaacttcaatagagaaatggcaatggaggtcgagaagaagaagagtttgccagaaaaatctctggcttggataccacgaaacctgaaatctggaattaggattttgaataattcatccacactgattccattgatttacaacccatttatataagctatacagtgaaggaaaaaaggaaatatgctaaggaaataacaacaaataaaggaaataggctaaggaaataaaaacaaattcctacaattactctaactttcctcactataaatatacaaatctgatttgattttcaattcaatcccatgatttttagaagaaatattctctgctttccaataggatatattaaaaacaaagaaggagccaaatactgatgaagttagattgataacaaatgcatcattggcaataggctgctgagtttaggaagaagtgcctttgctcagagtaataggaatatcaaaagtataaaaagggaaaaaccctaagtaaaagactattgttgttatgcctattgaataaatggacagtatgaggttttctctttgatgccttgggtcttcactaaaagttgtaggtgttatgaaggaacagaaatgaagatatctcttccttactatttgcaatatatcattgccaaatgaattctattggaagaaaataaaggaatctcattctctgatgagttttgactttattgcatgtgatatgataatagaaattaggatcccaatacatataatgctcctcaccagataaaaaaacctaaaaaatcacatgtaactgcacaagaagaaacttcacagtggccagaactcaaagcttcagtaaagcaaacatattatgaggacgattaaacaaggttcaattgagaaaaagtacagtgagatattggccttctttaaatgagaaagagatagcattaatgatatagcagccatcattcccaagaatgttctagccatactcacattatagcgtctcatcaaaaaatactcacattatagtgatcattagaagttcaggtaaccttgatgctatgtgatatagaacttcagattgaaacctagaaattatagagagaaaggaagggcaggataataataactgaaaagaaaggtgtttaattaaaacacttgacccctgttagtgtttattgtattgtagttttgaaactgtaaaaaaacctacatacaacacttataataattgtaattcatattcagaagttgtaacgtaaattctagaagcatttatgagtttttaagtgaaaacatagtaaatagatcaagacttccccagttgaatggaatcctgattgaaatcagtttagttgattcctttgaagtcacaccaactgatgagtttcaactagttatttaatttggataatcagtgaatgacagtatacggatgcagggcatgaattgtatgccatcacttatttccaactaatgactgagcctattaacagtagacttttggatcagcatttacgcttcatttcataggcttctctttctgttttatagaaacgaagggattgcaatgtttaatatgttactgatatatcttttgctgctactgatttccattcatcgtgtatcccctccaaatgttacttttgcttgacatatgatcttagttttcttcctgatgaaaaaagttttcagaacacagattaaaggaaattatattccaaatacattgttttgacagttgtgttcctggtaatatgtacagtctcgtgcccgtggcccgaggcaacc

SEQ ID NO: 10704 - DNA, 2125 bp, Vitis vinifera
  Intron number 4 from transcript GSVIVT01029707001 (locus G SVIVG01029707001) derived from phytozome v7.0 (chr-ID chr1 2; pos 13470524 to 13472648)
agtttaaacaggttaattcattcttcaagctttatattttctttgacattgatttctcatagtaaagttagggttgaggaaaccctgcaatatgcttatggatgtgtttaatgtgattgattatggtgtatattcctttcttctgaccttggatctgaatgctactttctcctcgaactattaaggtagagcaagatgtttatttatttatttatttttatcagaaaggtatagcaagatgttggctccacatttttagatttcctttaatcattccttataatcatatatttacaccttaaaactctaaaagcacttaatgggataaattgaacctttatcttctttgaggccactcaggcactatatgggaaatcaaaactggtaaatattctaaaaaactctcattgccatcatagtaactagacaaaagaataataattgtttatgaaatcttttattgctctctctaaatgaaggaatttgtgtgctatgtggcaaggatacttctcaatgagttccatactcatggttcaaagtattggaagactggtatgactcagttgaattgtatctatcttggccataggcatgatgagtccgacatggagtcaatttatgtgattcagcaaggactcggtcatgactaagatataaattgattgacttggttgatgcctttgagacacaacatcgtaactcagatccaatgaaaatgaaagaaagaaaagcagagaatctttgcatcgtttagagcttcctcacatcaatcgtgaaataatgcctcgatctatgactagaaataagaaattgaaaatggcttattttaaaacaattattgactttttaccatcacatttctctttgttattttcattttttttgaagataaataataattcttatttagcaagctagaatttcaatacattttgataatacccattatcaaaatgagtattggatacaaaaatgggcatgataatgttttaagagttttcatttcttaatactgtcataaaccagtcctaatgctagttgtataactatgtaaggaatttcaaatttaatagatgttttttattagttttttgagtccatctagtttttattttattttatttatttttttatttttagaattttgttgggcttttcccacctcgggacatgttgaatcagtgacaacaaccatactcttgttgaacgtgtaatggacactgattctcacttcagtgtttatggcatacatgtttatggcattttttttgttccccaaaatgaaggaattaatatgctgtgtggcaaggatgcttctcagtgagtgcaatgcctgatgttggagatgtgatggatgctgacaactccatagatttttttatcccaaatctttttctttactttcttatcattaacgtccagtgtgggtttggattatatacgtacataattagtattagagtcattaatctcttgttcttatgtacattatgttattcataaaagtattaaaatgtaatgcttattcaatataaattgtttatgattttttttttttgctacatttctcataaataatatatcacaccttggactcttgaaattcctaatttcttgctatatacttgtgttgtattttgactctaggtgtttgtattaaaggaaaatagttgcattttcttttctttatttttcttttttctttttcgtaatttttttctttgtaggttgctttctaggaaatcggttttctgttctaataaatgtaggtttatttatgctgcagccatgattgttagtcttactttatttgcatattgaaaaaaaaaaaaaagattgttaatccctatcaattataccagagtatcaggaagtcatagcaaaattgctttttagaattttctgcccctttttctgctacttatattaatactggagtgaattaaagttggattggaggaagttgcaattgtaaaattgagctgtagttatcttaggattgggaccatgacattcagtttatatatattaatgtttttctctgttgttttatttctatgtatatttcagaacttcattggcttgttttttgtacttcttagtgcaggccattttattaagagag

SEQ ID NO: 10705 - DNA, 2008 bp, Vitis vinifera
  Intron number 10 from transcript GSVIVT01036911001 (locus GSVIVG01036911001) derived from phytozome v7.0 (chr-ID chr 2; pos 17772419 to 17774426)
cgtaagaactgaaattttttcatctttctttaacagcattcattctgtttacatggatgatttgtgaacttcatgacctacaagttttctattttattttttgttccactgtttcccattgcatcatgcctgattgtggtgacatcatttcttgaaatcctaaaaactatcctacacaattattaagaaaagattgatctccaacgttatgaacatcttatttggcttgcttcaaaatgcaatatggaacatgagctccctcagaaaaatgaaatctgttgggtcaaaatgttcactgtcccggatggacaaacaatttcctttcatcttgtagtttgccttgaggcaatgtaattgagccattttttgaacctatattagtgggacccttggaagtgtaagagataccctattggacatgctgttctctaggaccagctatgagccttccctgtgctggttaggtggagggtgaacaaggctgcaagggtgagctaactaaacaaatccttcctcagttctggttgcaagctgcaactcacctatatgaagctggaatccctattaattgcctgttagccatactgtggtgaatgtgtttgtggtcttgttcacacctctcatcacactatggaaggtagccgtgcctgagattattaccttgaccttgagggggaagctgaaggcagtgttagtgactctagtggtagccctattgggatgtgttaggaggttcggtaggtcgcctccttttcagagagagttattgcttgttgggtattttgatttgacattgctttacacccaaagaagccatctatgtttgagatggaagtcttctttcctttctctaagtttatgagcttattgtctaggttgcaacatgttgacaggatcccatatttcatgtctccatgtccatctcgtgggggtgacattgggttgaaacaaaaggaaagagaatgatggggttacttaagatgacaaggatttgggtgtgggttatgtgtctagaaatgcttattagggagctatgcatccaaagaaaaaaaacccaaatatatgtcttacttttaagtaatcctaaactcttcttgaacattatttcttattagtcacatcctttagttcagcctcaggagtagaagaaaaggaaagagaaattaggaggtagcttagaaattgttcttgaaaatagttttctaatttaaaagatatgtttggcgaatttttaactgaaaacaattttttaaaaatttgttctaaaaacaagtttttgagaatatgtttgtgttaagtatgatgtgcatattgaacttaaatcctgcaagcttaagcttttaggagaaccggtagttcaacatggtattacagcttggtttggtagaaggtcgtgaggtcgagtcacttctccgcaatttgcatgtttgtttttcatttggtatctattggatgtgaatgtctctccacatttgggtgtggggctgcacgtgagggagagtgttaagaagtatgatatgcatattgagtttaaatcctataagtttaagcttttaggaaaattggtagttcaatagtttgatgtgttttcattttttttaaaagaaaattcttagaaacaactgaaagtatgaagaatacttgaaaacttttgttatgatacacaagttcataatacctttatgaaaaataagacataaaaattgtttttcatatctgagttcctaaatggaattttaagtgtgttagactgtttgccgaattcctatgttctaagttttggaaattaaaaccctgatacttgtacttgaatccacacaatgtaggtttaagggtcccaaaaaaaataaaagtaaaaggaagaacttgtccaagatattgatgcacccattcctactcatgtgatcactgaaaatattcaaatgtttattcttttttgggttttaatacaattcttaaaccatattttgcaggggaaattgcaggctatctagacccctgattcggc

SEQ ID NO: 10706 - DNA, 10094 bp, Vitis vinifera
  Intron number 5 from transcript GSVIVT01010707001 (locus G SVIVG01010707001) derived from phytozome v7.0 (chr-ID chr1 3; pos 12163400 to 12173493 reverse strand)
aagaggtaatttcttttatctctatcctctttcatgctgatcaaatcatggtctggtcgccatttatcatctctgtcttttagttggcataagttcgctacacaatttttttttttttgatcagaaacaaaatatatgtattaatagagaaaagagacatgagaaggatgagaaatcctccccaataagtacaaacctgatcaaaagaactaagtaaaccttcactaaccaaggaaggctatacaagagatacaaaaggccgcatgattgaaagaactaacttaactaagtaaacctccactaacccaatgagggctatacaaaaggaacgaaaggcctatacaagtaaaagaatcctgaccctataacccaaccctggggtgtacataactgaagccaactaagctggattacattcaaaggataaggtttaaaatgtctgtacagtaagcccaaaaagaaacatgaaaatgaatttgatcccacatcatctctgccattttcgaaatgtcctcgaaaatcctaacacttctcctctccacacaatccataggagagaaagagatgtgatcctccaaagagtcttgcctcttatagaattcccaaaacacttgaaggagatcaccaacatattgcaaatactgttaggctgaactcactccatcccatcctatgaaaagattctatgccacagtcccaaagtaatcagacaatgcaaaaagagatgatcaatcgtttctctgctcctacaaaggatgcaccaatctgggctaagggttttgaaaagtcttctcacttgcaacatgttattggtagttaccttcttatgagccattaaccaagcaaaggccctggccttagaggggacttttgagttccacaaaaattagctaggtagaaaggaaaagaatttgagacactggctaaggctgaaaaaaaagatttaattgagaaaaatccgggagaggacggaatccaagctttcgcatttggaactaaaggagtcaaatgagcaagttaggctttttaagttaactggttgctgtcccatgtaatccatataaatttaaaaaaataaatattatactaataacaagagcaatggatatggtcctaaagttattaaaaaaaatatttgcagaggtggagattagaatgattcacaatgaatcattctaccagagatgctctttagtgaataaaagaagtcaatgattatgggtactattaattcttgatattgttatctttagagatataaatttgatataggaggatgaaaaatacttacaatgaaagaaaactaatgaagattggagatgccatttgaacaaatagctattgcatcttaaaatgcttgccaacttgattacaagatcatccgtagataatatttaaatgcaaatagtgaatatgtaaaggttgctaattaaggagcttatttcttagttgctgatttttctggaacggtgctacttgatctgttctcttctgcatctgcaaatcactgagttcatccaaaatttgcatccaagcaaaccatgcaacattaatggaattggggccttacatataaatatggatgggaaaggcctgtcactacatgtatgtaatgcaaattcaccaaaagcagtggaaacttggtccaaaacaaggatcttgtgtcatcagttgaacaatgtttgaaggcttagactattaataaccaagaagttcctttgactttcgaaaatcaatctcccttatgctaacatgttaaaaagaaacaataaaaaaaagaagaagaaaaaactgcaattattataaatcaggtgggtggtgtatttagctaatcttattagcattccttagttctgtacttaatattagtggttaactcatgagaaagttaatcttagtgtgtagttacagtagtggtaccacagcaagctattgttgtgggactattccagctacttctggtagttacagtttgcatttttgtatcatgggacaacttaagcttattgtagttttgactgaagttactagagttttatttttagtttctcttatatcttgttagggtattttcttaagttgaaatccctctggaagcttttagcaccatagattcctgttgaagagtttcttttttcttcttcaaagcttttctgcaaaagcatccagtccatggttttatttggaaaagctttttcatctaaagtactctatgttaaccaaacacgctgttaagtcctttaaatataaaaaagaagggtgtagttttcataattgattttgaaaatgcttatgatcatgtagattggggttttctggaccatgtactagaaatgaaggggtttagtcctagatggaggacttggatgagaggttgtttgtccttggtaacttttgcaattgtggtgaatggaaatgccaaaggataggtcaaagcaactagaggacaaagacaatgggatcctctatccactttttctctttgcctttgtagctaatgtgttaagtaggatgatgatgagagggtcttccccttgggggagggggggagaggaacccaaagacgtgttttttgggatccaatgattgagagaatcttgcgaatattaaatgggtgaaaaaaggcctatttatctttaggtggaaggataattcttatccattcatgtctctcccatattcctagctattttttttatcattgttcaagattcccgctgtagtggttggaaaaattgagaaattgcaaagggatcttctttggttagggggtgggagattaagagagactatcttataagctgagatttagtatgtaagcctaaggtggaagggggattggggtttgggaagatttctctaaggaatcgtgctctattagggaaatgcttgtagaggtttcctagggagagttctgctccgtggcatcaagttattctatagttttaaaaagcttaaggcgtacaaaggcacaaagtcctcttgaatcctaaggtgtaaggcgtacctaaggtgtgggctttagtgaagtgaggcgcacctattttacatatataattaaatttaaagaggctcgaaaaggtatgtctatttttccttgatttttcctttcttcttcttcctcttcttcttctcttctgctctcaattctcacattaggttgcaacacacacgacatgagcaaaggcaaaggcggctgattagggcttttttttgggtttaaatggaatcaaaatgcagcttttctgaataactccctaactctagattattcttatgccaaataattccggaatcttgaatttgttgctaggttatttacaatgagaaaggaaatgagagaagagaagtaacaaatttgttactttcaaaaaatgatgaggaaagcatacaaccctttctaggacaatgcaaattacaaaacttaatacatgttattgagttatattctttcatacaagtcataagcactcacattgaatgaccattttgaatatttgacattgttgtgctaacttgttaatttgaaaaccctttgtggaagattatggccatattagttcttagtttcttatcattcaataagcatcttgtgtttcataaaattaggtgcaatataatccttatgtaggggtcatcctatctaacttttaggcattaagattagggatggcaacaaggtgaatttagggtaggtcacccctatcccaatcctttccctattaattaaatcaatttccatccccatcccaataaaaaaaattaaatggggtgaggtatggtgggtaattttccatactcaccgcacccatttacttgtgggtaattttccatactcatcactcccatttactagtgggcaattttccatactcaccacgctcatttactttcttttttttaatatatatatgttaaaaattgttcttatattaaaaataaatgatacatttttttattgggggaattatgtaaccatgaattgtccataaaatatggataaattcagaatccaaaaaagtcacttttatggggagtacattttggggaaaataattctcattccatgtactagaatagtaactttttgcaagtttccaagagtgccctccaaccaattgaaggtgggctaccacttatataaaactagctgacaagtacacttgattggacccacgtacgtagctatcacatcacacatcaccacttcagcctttacatcaaatatgtcattcgagatagtaacaaaatttttaccaaaaagcaacaatgctagtaactaaaagtaccactacagatagaaggatgtactagcctatttataattcatcaccactttcgcttgtatatcaaatatgccactaaagatagcgacattgtttttacttaaaagtaacaacgttaataactaaaagtatcactatagatagcaggatgtactagcttattaaatttttttattgtcattgctatgagtttgacagtgattattaaataatatgctagaaaaatacacataatgtaccttttaaaaacattagttattaaaataaaaacaattttatggtttaaatttttaattaaacaaaaatgtacttttttttacatatttaataaaaaacattagtcttttttttttttttaaatatcattgtattatgatgggaattgtgaatttatgtttaaaattttaatgcaaacactttaaaaattttaattttacataccttcaaatattgcgtttaaaattaaatactcttaaagaatgatcattactaattttttgttggatgaaattaaacgtaagttaatattttttaatattatttttctgtttttattttgaagaaaacaaaaaatgtagtttctacacatgtggatggtgtttttttacttttagtttttttaaatttaggtttaatgttctataaaaaatttagaaaaaaaaaatgagacccataatataaaaattataaatattataaatataaaaatattatgaatgcgaaacaaaataaaatattatatatatatatatttgaaatcaatattatttaaaatattagtattcatttatttgtttattagattgttaattattataggtgagtatatttttatattaaaaactaatttattttaattcattaattacacatgatgttaaaataaaaatttaataaagaaaaggaaaaaaataatgaataaatgaataaatgaattttacttttaaaaaataaagtttgctcttttaattaagtagatttaaaaaaatagggaaaaaagatgagaattattacaaaattaattaaaatcaaagtattaaaaaagaacaaaatttaatttatttaattgtaatataaaacttaatttaatttggtgagaaggtgagaatggcggagaagggaaaaaagaaaacaaagaaaaaaaaaaggtgggggaggctaaaaaattggcccgttcaagtgaggaaaaaaaaagtcaaacagaaagaaaaaaaagaaaaaagaaaaaaagtgagggagcccactttcaattgattggagggcaattttgcaaatatacataaagttactattctaatacataaaatgaggattaatttccctaaaatgtacttcccatgaaagtgacttgattcatgcccagttgagtattttaaccaaaaatatttataaatcctatgaccttatactagcgtagcaaagctactatagtatagcaactctaggatcgaactcagggatgggttttcactctactagtgataaactctagattagaaattgagtctgatgatttcctttatcataaacttaaagtttaaaagagaataaaatttgttttgaaaatggtgactgaaattaaactaacatagaactaagtaaaaatggaagaaagaaagtctcccggagctaagggttgctaggatcaagttcagaatgcaaagtggaaattccggattcttcacctcgcattggggatttaacctatagttatttcccgaaccagaataggtttaacaatgaagatttaatccataaaaagtcaatagaaatggtagtcaagttccattaatggctttagacactatgggtcttcaccttgaatcactttccaatggctcgtacatgataactaatggactgatatggatctagcaataagcatccacagagacctgaagcttaccatgtattggccattcaaagtgattctaagggatttaaagcaaaactttagatttagaagccatttatgaattccaactacctgtatttaatgcacgagagttttccactttagcatctggacttttcacttagcttccttcactccaagaaaccaaaaagttagcctctcatcctctgggaaaacatcctcagaggttgtttggcttccaagaaaatagtagagagaaagtgcaagcaatagagatctctgtatttcactaagtgtaaaatttacataagttggtctcctggagaaagctccccgagagtgagttttcagtgattacaagagagtttatataggaaggtaatttacccttccttggatacttcctagctaaggaattacatgagtggctgaatacaaggagaaaatggaaatttagacacaaaaatatcagaagaaaaagagtcggcaaaaatatcccagtttcgcacgttgcatggtaacttgcgaaaatttcgcaagttgatttcgcaacttagcatccattttcgcacgttgagatccactttcgcacgttgaaatccactttcgcacgttgagatccactttcgcaagttgcaaaatcaacttcgaatgctaggcttcactgcgactacacagctgccatccactttcaatttcggacgttgaagttccaatttcgcaaggtgcgaaattgtccctcagcttgatgcagttgtctttcgaaggccatatcttcctcatttcagctccaaatcgtacacggtttgaagcgttggattcttgacttcctgagctttgaaatggtatatagcatgtaaaaaatggacttcgggaagtactccaaaagtgcgaaggaagactgcagctgccgtcctctgttttccttactctgttttcctctctccattgctttctccttgcatactttgaacgactaaggcaaaggactatgaggctccaaagcttggtttcttcatgaatttgagcttccaaaagctttgccatgactatatatagctctccctcattcttaaattgctttggtgagcataaagctatcaaaaagcaccaaaactaacacaatttgattagaaacgattgcaagggtccttaacatgtcaattgagttaaaaggtaataattactactcaagagtgtttaaaagagttaattacaagctacaaaataacatgttttgagtagtaatcatgactcctttgggttctgaatttatttgtattttatggataggacatctttacatgattcccccttttttattttgtgtttaaagagaaagaaataaagaaataaattaaattattttttacttaattatatatatgcatatatatatgtgtgtttacttaattatatatgtgtgtgtgtgtgtgtgtgtgtgtgtgtgtgtgtgtggtaatacttgaatttgccccaaacccactatgagttaaaaaataaaaaataaaaaataaatcccaaacttgcctttaatttgtttaggcttttcgtaaacctattctattaggagtgggatgaggtgggtgcccgaaacacttgccccattcccatccctagttaagatatgctttagacgtggatgattatcaccagagattcccaatattgagcataacttaggctttcctctgtttgcataaataatggaggtttatatctagttgatgcataaaagtattcattagggcaggtgagagagaaccacaatgtggtatgtccttcatataattggaataacaattacctttgttgtttaagatatgggtttttagaaaggtggatattagatcatagaaggatgcattctcttctcctaaatgggattgcaaaatgaacattaaaagcccctgatctatgttgtcaaaagactttccaatatctgacttcattagtttattgactcagttccagctttggattttagtaaaggtaataagggctctacctttcctaaactagtgagattgacttaaaaaaatatcttcaaagataatatttaataaatgagaaagcacatccataatgatgatattggtcttgttcggctgggtaatggctcatatttgcccaggtttgtttggtttaggaatccatgagcgatacattgagaaaaactgagaagtagagttcaattcaagatatcctttttcatgtcttgcaattccctgtcagcattagttccttataagtggacctcgttcccaaagacaatccaacatgttcattatcttatccatcaaaccattcttttttaaaaacaacatttttcttcccttagaagagccacaaatcttctctaccttttgacttagctctcatttctcgtcttttcttctcagctggttttgaacaccatgtaacatcatcttcaaccacctttcagtgcagccacaaaagaattgcttatacaataaacaggtccttatataatataagacttactaaaagactgacttctattcattaggccagcatgaaacaagaaagatgtgcctaaggcagtatgaaacaactttgcatgccaagagaagaagagagatgttcacaattactaccacaagaaagctgaactcctaccctatctctaaaggggcctgtcacttcattcgtaccttctttgcttaggtttccaactggacttaatggcctttccacccactgctagcaggagctaagcgcttgaaaaggctgctaagaaagattgcttctattggcctttctgtgcaacagtccaccgttagtggaaaagaaggttaccatacatacaagagtctttcagttcgtacagaatctgtttcttatcactcaagtagtacaacagagggcagccataggcctttattctgtacgcggccatacatagcaacaactctctgtttttcattattgactccatatgcattgttacagtccgttagaaatagaatgtgctactgaagcttattgcatattattgagtaatattcttccacagaatgcattgctcacattctatattatcagactgaatatttcaaactgtcctcacaaacggcccacttaaaaacctgtgctccacagaagattttgaccatatttgttcaaatgcaagggaaggcatagctctttattctgttataagacctatctagaaacaactttctgcttttcattcttctgttattagtgatttcttagaggtggtatgtaccatgaagatataggctaaactttgaccatttttgtgttgagccttcttggaagtaaggatcagatttgaagtgattattctaagaagaaaaacaacgcaagaagggtctctttataacatgaccatggttcatcccacaaaagattatttaatgtacagagagtagcataggaaaataggcagataaacactagtgtggctgacttcactttcttgaatgtgtcactgtggatttaatgtgcagagagtaggataggaaaatagacagataaacacttgtgtggctgacttcactttctcgagtgtctcaacagtggaaacacccttgtctgtgtcataattgttgcattgagcattcttgaaagtaaacagatgctgtttttttcaagtgattattcttaaaaaaggaaaaaataatgctagaacaatgatctcttttgaacattgtttgtcacactaaagtgtatttaatgtacaggtgtaggtaaacaggcagattaactctagtttggctaactttaacatcttaaatgtatgaattttgagtctctgaacccacctgagtttataaattgtgctaaacattctattcaagaggctgttgcaaattgctttgcataattgagttgtgctaccaagtgtaggtgtttgctaggatcaagtcccttgccctcaagcc

SEQ ID NO: 10707 - DNA, 7029 bp, Vitis vinifera
  Intron number 1 from transcript GSVIVT01038151001 (locus G SVIVG01038151001) derived from phytozome v7.0 (chr-ID chr5 ; pos 23904024 to 23911052)
gtctccatcgcttccaccatcacctctggttccgagtgagtgtctttcgtcgaaatgttcctttaaaaattcatttgattctcaaaatattctatgagtggatagatcttaccgatgttcattgaaaacaggaggaagcaaaggccaaaagtatgcatcatttttaaggcacaaccaacatgaatagcagccaaacagcccaattgaccacatgaatcttttttttttttttttttctttttctttttccggtttcctatactttctcggcaaccaaacgggttgggagaataggggaaagtgaaggcagcaacttgttcgctgatttgtacaaggccaaccttcaatgcaagtaattgcgtcattcgatgataatcaacgctctcgctctgataattggctacggcaaccctatgattggtttccaagaaaatgatagaaaaacaaacacacagaatctgagactaatgcttgggagacgatccaaaaaagtcaaaacaatcatactgcactttagatggtggtctgtgaattgggccgtaggtatgacagtgggctaggcccaactataacggaaaactttttttttcttttaaaaattcaaatataaaaaatgattttctttgcttattctacagaagggagtaaacaaaaattcccgacctagtatccataaatatatattacaagtaagggtctccaacgggcgggccgggccgcaggcttttttaaataagccaaaatgacttttaaataaaggaagggagagggggggattcgaacccctccccttaagcttaaattttaaggcttcaaccaactgagcaacattctttttgtacttattaaatgagttagttatatatatataaaaataaagtatattatttttttaaaaaaaattaaaggctccatgtgagtcatgtgaccgttggggctaagcctccaacggtcacatgaccaattttttttttttttaaccttcctataaatacattttcttccttttcattttttcatcaaattctctctatttctctctctatttctctctctatttctctcacattctacaatatttcaaattcttttatttttccctcaaattatacaatattgttggtggtgcaaaacaagtattggtggctctaagagttcaaatttgctaggaatttctgcatcggttctctaattgagtaacatacttcacccctactactttatttttttgttacattttttttatatttattactttattatttttggcataatattttatcaataattataatatgacaagtgcttcttcatctagtccatgtgatgaaatatcatcaaacaaaaaatttacttcaaatatagaaataattttaaaaaataataaaaaagaaataaaagcaaaatgtaaaatttgtaataaatttcttactggtggctcaaatacaggcacaagtcatttaaaaagacatcacgaaaattgtaaaactaaaaataatgtagatattagaaattatatgcaattaggtaaaaatgaaagtagaaatttaaaaacattttcttatgatgaatctaactgtcgtgaagaaatgattgattatataataagagcagaacaacctttcaacatgatggaaactcatgattttgtaggaacaattcaacgaggtattaatcctcaatttaaaggttggtctggaaatacagttaaaagagatattatgaaaaaaatttatacacaaaaagaaatttaaaattttttttttgcaaattttgaaggaaatatttgtttaacatctaatatttggacatctttaattcacactggttttttatgtataactgctcactacattgataatgaatggaaattaaataaaagaataatttcatttaaattaataaatgctccacatagtggcaaaaatataacagctttaataaatgatgaaattatagatttagacattcgtgataaaatattgacaataacattagataatgctgctaataatgatatagcaatacatagactaaaacgatattggcaagtaaaagaagatcatgctaaaatatttcatgtgcgttgttgtgcacatattttaaatttaattgtaaatgatggattaaaaaatgttgatagtacattggaaaaaattagaggcattgcatatagtattaatagttctcaagcaaaacatgaattattttttgattgttgcaaaatgttaaatatgaaaagaaaaaatataaatttggatatggccattagatggaattccacatataaacttttacaaaatattacaaaatatagaaaagtagtcgaattatatgaaatacaattaattaacaatgattgtgaaacagatatttatgcattaaatgattatgattggcatattgcggatcttttaagagatctttttgaaatttttgatacttcaacaaacattttttgtggtgtatattatccaacttcaaatcgagttattacgcaaataactaatatttttattgtacttcaaaaatatttaagttttgaaatatttaatgatacaatatttgcaatgatagaaaaatttagaaaatattggggagaaatacctttaattttttatattgctttaattgtggaccctagattgaaatttgaagctttggatgaatggttaacaattatttattttaatgaccaaataaaaattgaagaaattaaaaatgaaataaattcattattatataatttatataactattataaagaaaaatatggtaatgatattaatactattaaattaccacctacaaactcctcatctttttataaaggagctctagaaatgttgaaaagtcgaaaaaagacaacaaatagttctccaaataatacatctgatttagataaatatcttaatactgatataatttcatttgaagatcaagaagattttgatattttaatatggtggaaatcacatcaacacaaatatcctgtgctttctataattgctcgtgatgtactaacagttcctgtgagtacagttgcatcagaagctgcttttagtgcaggtggaagagtagttagtaaaaaacgatgtaacttagcgccagatgttattgaagcagggatatgtgtgaaagattgggaaatagcagataaaaggatgtacgattccatttgagaaacagagatgcttgccgatatggaatctttaaaattatcaagatcttcatggatgcatgatagttcgccatcaccgccagaaaataatgactaaatgtatattatatttttatttttattttttgtggttgaaaaatacagatgattgacaaataaataggtgccaacctagttgggatgtatttattttgtagtgatgtaaacttttcccacatttttaaatgtaattatacattcaatgaataaaattttgaaatgaatatttttttactttttatttttgtagtttttttttaaaggggcgggcctaagggcgggcctacgggccggcccggcccgcccataaacgggcttgggccgggctttagcccgtcgggccgagccgggcctaaagtgggccgcgggctttttggagaccattaattacaagcatattttaaaaatcatttcttagaaaaataaagtgtcgtttccaaaaacatccttcaacaatggttttgaaaacataattttttagaataatattttaaaattgttttacaatgatttgtaaaacaaaagtttgagagtttgaaatgtttttgacatatttttaatatttttaaatatgttttaaaaataatttttatatttagtactttatttaaaaagaccgaaataagaattaaaaaaatgctatttaaaaacatcatattttttatttttaagaataaaaaatagaaaataaatttttgattctcaaagtttttttttttttgagaacataaaactgttataaaaaaataattgtcaaataaggtcttatttttttacactcaagcctcccacccacctacaattccaaaaaaacatcattttttttttgttttattttgacaaaaatgtcctccttaatttcttgtaaaaataattatttcttttaaaacctacatgaaatatttaaaataataaaatacatttatgtcaataatgagttatttttcaaataaaaatataagaataattagattcataaatttgggattatttcatattttttaactaattaattcttaaaaataaaaaaatcacttaaccttatttaaatggacttttgaaaagccaattatttttcaattcaataaaagcttttttttttcttttttttttttttttaaaaagcttaatataaaaggtagaaaaatattgctttttatagaagctatgttttaacttttattttatctaatacaaaaaaattatttatgtttaataaagcttttaaaatatcaatattgtcatttaaaaatgattacataaaaagaaaaattgaaataatattttgagtgattttttatattttttaaaaattttcaaacatctatttttgtaaaaacatgttttcaaatattcaaaaacacttttaactttattaaaatcactctaaaatgacctattggacttaaaattgactttaaggaattagaaatgttttgatgacggtgatagcaatgttataagttatattgggtttgtttgaatcgtttgatagtgattttagagtgttagaaacgttttttaatatttgaaaatactttcttatagaaattagatgtttgacaaactcaaaaaatgtttaaaaaaattattttttcatgtttgatttattatgaaaaatatgaaaaaaaaatcaattaaaacttatgtcttctcagattatttaattattctaaaaaaatataaaaaataagtaaattattttgaaaatttcttttttttaaatcaataacaattttttcttactcttttatccttcttccattttagctcattatcatgtcatttaagcttaaaaatatgtgttcaatttaaacttaataataatttgaaatgggtttaagtgagtcctgaaaaaaaaaccaataaataaagtcaataagtttaatctctgattaaattataattaatgtattaattaaaaaactaatttatgagattatgagaaataaatgaggggagaagatacaagaacaaactcggtgaataatagttaggatttagaaaaaaaatatttattttaacttattatttaaagttatatttagctttaaattgcaatattatgccattttatcaaatatttttaatgattgaaattaacttattaattgtttttgaacacattttcaatttttatttttaaaataagagctcttacatgaaaagtaaaatcttatgtttttaaaaaatcagttttaaaatttttaaattttttaaaaactatcttatttttaaaataagtctctaaaaactcttaaagtgcgtttaagagtgattgtaaaaagcgtttctagtataacatttatgataaaaattttcaagtattagaaatattaaaaacgcttcttaaaatcattaccaaataagttcttaaattgtatgtcaaaattgatattatttttgtttctaaaaataaaattgaagaagtccatctaaataatatttaagtcatatccaactcatattaagtcatatccaacttagttggtatcgacttaattattgaagccatatgttaatattcttttaatgcatcaacctccactcaattaatacaacctcatacgaggctttccaagccaaagtctattgttgagtcttgaatgttaataaatggaactaatcccaacaataaagtcttatgccacatgccaatttcaataattcgtgaaaaatgaccaactttatgtcaacaaatcttatttatacaggcttcaactccttcaataattactctcataaattataaaaattaccttatactttcagatctgccttaattcatctctaagggatttttttttttataaaaaaaataaaaataaaaagcaatatcaaccctacactagtttcaaagatgaataagttcttatgattggaacatagacaaattaaaaataaataaacatatcatataatgttcgaaaaaataaacaaacatctattatcgtaacatagacacacgttatctatctttagtgttgagcatggtgatggtggtaaagttgcaaagcctttttactctagaggagtaaaaaagggccttgatggcgacgaagacaaaacgtggggtggatggtagttgaatattggtgatggtggaatttattagagtactatttggaatctatttggtagtaattttaaaaggaattaaaagcacggtgaattgttttgtagtagtaattttaatgtttgaaaatgattttttttttcttcttgaatttagaaacatatttagcaatgattcttgaaaacggtttttgattctttagaatagaacaatgttttctaactatatgtttcagagaaaataattttgttaaaaatgcatagcattagtagattagcaattaaaaagaaggattttccaagatagggctgaattcagagaaagaaaatatgcatagaatttgattaaaatgtctataaacaagcaagttgagttttagggcaaaataatccttttataaaataaaaatgtaaggtatagccccttcgtaaaacttatgttcaaactgtccgattcattgccgtataaaagtcatgccataaaatatatttttcttttcaaaatttaagttgaaacctcaattatcaattggaacttcatttttttttaactaaaaccataatttgtaagtgagaccattgaggcttcagttgaattttttttttaaagtttaaaatttaattaaaatattaaactataaattattgttgaaattaaaaatatatactttaataataaaaattatatatttaaacttaaaagatctaatataacttcaataaaaataaattga

SEQ ID NO: 10708 - DNA, 13706 bp, Vitis vinifera
  Intron number 1 from transcript GSVIVT01038756001 (locus G SVIVG01038756001) derived from phytozome v7.0 (chr-ID chr1 2_random; pos 539493 to 553198 reverse strand)
cgagaagagagtgactgcagcaaaagactgtccaggtatgccccttgttactctcaatgttcctatccctattcgatttctccacttgattgtcttttcgttttaatattttttatattgttgattggtgtggacggaaagggctactaagattgctgtgttgaagttgattcctgttattcattatgctctcattcatattccattcttctttaatctcttactgattccaagacgccatttatatcagcatgaacatcatgatcactaactcatttgtttgctgaatctgattgcttgtgattgtttgcctatctcatatgttcaaagcccgttgatttgaaatatgaaacgcggctcttcctagctcgttctgttcttattttatttttattttcatttattttttttctttcttctcctcccggctccattcctttctcgtttcggcacattcccctattttcttcttttattttcctttctggtgatccgccatggtcattccttctggacaagtttaatactgcggatgttggagcatgtttgaagcgccacattgatccaccattctttaaagtagaatcagtgtcctctgggattgtgaagtcgcaggcttagagaggaaagaaaatccacaaagaaggtggaagatgtaccaaaccctgttttatcacagttaacgatgttgggggatggaaaacgaacaagagttggagtggtttgaaacccagaagactgtaataagtggagatctcgtcagcttcagtcccgtgtaattgttgatacgcacagatcattgagaaagacggatcacaaccattttccctgtaatctagggttccatttcctcaattcctctagcaaatttttctgacgaatctcagttattcagtggaggcattcttcgcaaatatgtttttccctccgtaccccgatctcttccaccatttcaaattcagtaaagttttcaaattgaaatcgattatgactatcactaattcgggtttcatgatgaaaaaaaagaggaagttgattaccttacacaccggagcaagagaaacagattgttgatgatttgatgaatgaatcagagtccagattgaaagaaggcgttgtattcttggttgtctcatttgccattaaggaggttggggataattttatcttgatcaatctagctaatgttgagagtttctttgggtcaattattgttcaagagttgaagagttagaatgtgaatggggtcctgatgcttaagaccaattgcatagactggctggatcagattaatgttgcataaagtatacacatggcttggcagtcacggacaatcagtgcccaggtagcatatggttccatcacgcaaaacagtctccttcagcccggcattcagttccgggtgcccctgctcacttcagaaagaaatggctaattcagttgtcaataacagttctcctcatgttttgaacaaattccggacatcagaaataggaggttgatggctggttgatggaagtaaagatggctatgagatggaaaaagatatactactagtccaaaaggatgaatccacacttgaagatttgtgtagcaatactacttttcaccaagaagacattatacttgctgaaatgggctcagaaaattggggattactggatggtaatgtgctggcacgagtgttccattttctgaaaactgatgtaaaatcccctgcttttgctgctttgacttgtaaacattggagagttacagtaagatctcttcaagggtgcttccaggcgggttgatttgtcatctgttggttctctctgcactgactctatgatttagagcatgccacaaagtgcattgtgttagtttctggattatccatggtagaaaggctaattagtcacaagttatagacaacaacttaaaatgtgtagaattcttaaggggaaaatgctagctgacatcaagaacagtctcgatcgcatctcaaggaaagaaattcttcagaaaaactgatgctgctgggataatctctgatctttatatggcatgcaagggtccagaggagaaggaagaaactatcatctcttcagaaagcacctctgctgataataaaaacaggtcagtgctgatgctggtctggaagatattgtaggaagcgataaaggtgatcgacctaaagccgagccagatgactgggaagatacaactgacatctctacatcgaaattagaaattcaagacaatggtgtcgctaatggaggaaccgaccatctagttgtaaacaaggtggaacaacgctcaactggcactaataagtaatttctggtgagatcccagccagttccagttagcaagcaggtgaactaggtagaaagaagcattcttgggttttcctagtgtacatgaaactcaggattgcaatggggatggctcagaatttgaacctggtcgatcttgggggccgaggtcagacattatataattaggatggcaaagaagactccttacctacagcggccgaaatttattaagtcgtcctttgacactaaagagatcatcggtttgcccttgataaattaatgtcatcataagcagattttgttcctattcttcagctgagaatcaaatgcatcacaccatcgcacagttgaaatctttaaggcggaacagagaagtggcagcctaccttcttgactttgatcattttgccaatgtgccatctactacccttgcaaagatttcacacccaattttcaatgtcaatgatagagtgaatggagatatgaatcaaagtgggaagctgccataattgatgaaggtcaacaccccaatttttatcacacttcgcagaatataagatgtttgtggctgatttaaggcttcttcttttcagtggttagataaaggagaatacgttggagtttgtgaatctcctgtcatgtcttgactctggcgataatgtaaatagcggcaatgttacgaaaattgactacgatgaccatgatagtaaattaaaagagaggttgtcacagtttactgcatatgattgcaagtcagattcttctagatttgttgagtattggcttcctattctattatctaatgttcaacttgagcgatattgtggtactttactttcaagcataaaggctgcatcaatcacgggaactggaaagtcaaccagctgaaatggatattgtctcagtgattactatatttccaccggatctatgagaagaggttcccttaacatcatctgaaagcaacctgggcctttcactttcaataatagttttacaagtcctatagaaagatgtatgaatttgaatgcaaggaattttattattgagtatgtgaagccgtcctcagcgcatgctggctctcctatgcatagtgattcggggagtctcaatgattggatatggtcaatgacgagaaccggggtaaccagtttgttccataatgcagtggagtgttgtgaagcgtccgatgcagttattgataaatgttcagctttacagaatattggtcgagttgatctatagtgtaaaagagttattcgaagacacgtttctcttcaattattgaaatggaaggttcaaaggaattcaagcgttatttcgtccattacccgtttatgtatgccacctcataacttccagctaatgcccaagacttttaagtcggaaatttgaaaattcaatcctatcagtgtcatatgccatgctgggagactggattttttaagagtatgctcagacggttgtagacttgccggatctatggttttgaagatgagtgcctgggaaagccttttgatatagatggtttgaattatgactatccagtgagcagaaaattttaaaagaataatactgtaaggccgacgatcataatattctattatggggaatttgtaactcattatgagcagtcagagaatattgttaaaaaaacaaacatcctagaagctcgtcaatgacagaaagcgatgctgataagaatccagaattaaatgagaagctacagggtgcatcaggggttttgttggggagtcaggccactgccagtagaagtgagcaagagaaagaactgacaaccgctgcccagcagaaagcatgggaaatccgtaattctggcgttttaattgatatggatctcgaattaactaaggaatcattatcttgcccaaaacaagaccccaacaagctcaccaataacacacgacaatgctggtcaagattcggctaatgatgtttcacataataaacaaaaggggaatggtctggatagaagcaagctccctctcgagagttcctgtctgaaattgttccagttggtcaatcacacgctgttgttccatgctcaaatacagatgacaacagccagttgtttctgtaagatatgtcaatttgcaacaaaggtgcaaactcaacagatataaatgtgcatgagactaagcttgaatcaacatatttatatatacagatggaatactgtccggtggtcaaagattgatgagaaggctgacatgtacagctttaggagttgtattctttgaactatggcactcgtttggaacaacaatggagagaagcatcgttcttaataatctgaaataggagggagaactcctttcttcttgggttgctgaatttcctgaacaagcatcctttttgcagcacttgatgtctccaagtccatctgaccgtccaacttcgagccttttatgtgatgatcccgattcatagaacaaggaaaattctgaagcttgctgattaattgtggaaaaatcagggattgaagttccactcgggctactgccatgatttaatctcacccagtcttctgaagtaatgtctattgttctacataataccttgatctacagaaggcttcactcaacatcagcctgccccaccagtcattagtattatgaagaactggacatactccacttacgactgattcgtggcagaaacagagtaagaagaagggggaagggaaagagcaagacacacgacaaactggagctttgaggttgcatgattaatttctagagatacttgagaagcagatgaattttggcttcagcaaaagaaaaccaagaacttgaaaatcgagttacagccaaatcaaatgctatcaagcatattgatctcaaagcaatggggttcaggacagcaaaaggagtctatacctgtggaaattgaaactgatctagctgcctatcacatcaagggtatccttagtttgctcttgatgaataaataggaagcacatatcgactttgtttgtttgtccagctaagagaccaattaatgcaaaattctggaactgttatggaattagcagagcttttgatagaaatacagatcaaacgccatcattaaagatgaaaaccaagttcattgcagattgtttaagatggtctccgtgtgtgtcagaagttaagtacagtatccaagcatttttgctctccattggaatccctcagcaaacagcagaatttgaatcatgtattcgaagtagtcaggatgtctctccaagtaacgaagtcttcacacaggaagcttaagtatgcagaaaatggtttatttgaccacagaccgcatgaatcgaactttattatggcagattgaggtaaaaattgaaagacttaaccaattgaaagctggcaaaatacagggaacctctcaatgcagaaaattggaaattctaaaccttctattcagtatttggcttatgttgtgaagaattccatttcagcaatctacagaagcatcctcaggcgacccaagtaattcagtctcaagagtagcctagacactaatccagcttggccgccttgccacgtaccatactcattctaatgtttctttttcttctttttgtgatcttatacatcttaaatctagatttcaaaaccattttccgtcaaaataactctagttttcgttaagcttctttaggagtttctaggcttaaaatccagatttcaacaaatcttttgctgtcattttcccttccggcatgcgttttcactattttatttgattttcagctattttcatgattttctcgattttcaataagcatgaacaaactccataattccaaatcatggaatttatggaatcaactcatgcgaaattaattagggctttggtgggggcccgacattcatgacactcacttcaatactgtttacttgatatgttgatttttgattcttcttggggaaatgcttgaattcactttatatttactgttgagatatccttgcttcccatagagatgtggatgcttgttaatcaggtacgtcatttctaccccacaaccctaaaattctatgaatgtgtatgttctcatgagacatgaccatgtttgatggcatgattgactaccttgatgcttgtttgatcatctttgacaaaacacatattatgtgtcatatttccaaactaatctctcatgttttatgatagcgcttgggaagccgtcctggtacgcatccttaattttccttcattgttattcgatcttgttaggcatgcaatatttgaaatcacctagtctacttaggtatccatgatcaaccatttaattgccacgcttcccttaacttagtcagtagagacctttttagggcttagaggggcgctacctcctagaggtaccttcccaataagtaacctgatccccggacttagactcgggtttctcaaagacatgctttttccaaaactatggagtcactttttagggtttttctttcttgttttattttcccttcaaaataaaaataaaataggtggcgactccaacttttttttcaaaaaccaatttttcacaaataaaaaagcgagtctcgccgatcgagtgggggcgcacgtgaaaaatgcgggtccacatccggataagggagcacgccacatgtcctcttggggaatccggatggagttgattcggatatccttgcgcgctccgcggtcccccttgcgtagcatagctcagtccacccggggcggaattccgtccgccgacatttcacatccggaattccgtgcgccgacattttacatccggatatctcacagccggataggagaggaggacgattcaacttctccggtcagacatatccggatcctctgatagcgcttacccggagagttttctctcagtatacagtgtcatggtgttcttctgaagcttcctgatatttccgaccgacatcttgagatattttgctttagatatttgttgtctaaatccccaaagtctccttgtaacccacctatcataggattccttagtctttaagcaaggaaaagggtgaataacctcatatatatagtttgtaattttctttagaagaaatgatgattattattatgtaatcagtggaaggaagaaatatattttagagagcttgctctgttttcccttcatatatttgttttctcattctttttcttactagcaaaacaagctctaaggaattttcctcagagaatgagtggctaggcttttaattccttggagttaaggtttccaggaaaggttccaagtgcaagaatttatagctttgtggtttcagccattaatgaagagaaagtatgatcctttaatgatttctatgtttttagttaacttaaaacaccttcaattcacttgagccaacacttggtaaggcacgtgatctccgtccatggagatgcacttgtttatctcttgcgagcttttgggaagtgacttggaggtaggattttctagaattgccaacacttggtaagcttttggactccaaggagacatccattagttatctcttgcgagcttgagaagggaagtccaaagttaaagatcaccttgaatggcaaatgctaggtgagaggcacgagcattgcaagttgcatcagtgagagggaattagagctgaaatccatttaaaggttacatctgtacagcaccggttagagaattaactatatgttaattctctaatgcaaggaaatgaaccaaatgaccagagctctgtttttgcataaggaacctcccatgtgaacctaaacctccaaagaatgtttttcttcataagtaatttccattactttctttttagttagctttaaacaaaacctcatttaaacaaagtttgtgttttatttcttaagctaaccttgaaatgaaaaagcaccaatttactttgaattggtatcagttgtgagttgaaaacccttcccaatgaacgatcctagagccactatgctatattagctaagctatcctaatgcatggtgatataggttataaattttgttgattactcccttctgataaccacaatcaaaagcaccagctggacatgaatcagctgagacaccaattgggaacgaatcaatgtcatcagaaccagtgtaaggtgtgtagagagatagattactcaggtcggtagtgacatgatgagaaacgccactgtccagtagccattgtggagtggtgggagtagtgttgtgattactactcaaaagttactcttttatagcttgaaactaactattttaaacacttttgagtagtagttaatacattttaactcaattggcacattaaggaacctagctagggttactaatcaatttttggcaagttttggtgtttttggtagcttttttatcattgaaacaagccaagaagagggagacttttgtgaaatccatggcaatgcaagttaaagctcaaatacatgaagaatccaagctttggagcactttcatagccctttgccaagccaattagagatgcaaggaagaaaacaagaggaagaaatccaacaaccaacattttcgcatggctatgcgaaaatttcgcatagcatgcaaaaatttagagaaggagcagctgcacgactaagtgaaggacaaatttcgcacaccatgcgaaattttgcatggtatgcgaaatcttcctgtgcactaactccgttagatttttatcttcagatattttgtgtaatttcctattttctccttgtaatcaacctagatattttcttttatatctttttatatctctttgtataatctttgcaatgggagaccttgaaaacatacaacacttgttaattcccgtaggaagaaatatacagagcctttgctctgcctttccttctcatttttttgttttcacttttctttctagccaaatagcctctgatgatgatttctcaggggatgagtggctaggttttacgtttcttggagtgatggaagctaggtaaaagacccaaatgcaaatatgggagtttttcttgctttaaatgaaaatagttgttaatcattaatggtttttatttcaaggtttagctttaaatcccttaaaatcaccttgaatggccaatacttggtaagcttttcggattctatggatgcttattgctagatccatggatgtccattagttatcatttacgagccattggaaggtagtttaaggtgagaatcaccttgaatggccaatacttggtaagcttttctgattctatggatggctattgctagatccatggatgtctattagttatcatttacgagccattggaaggtgggtggttcaaggtgagggtctttagtgtttgaagccattaatgggaagcaattaccatttttcatgaaccctttggatcaaatcttaaatgctaaatacaaaattggttcgggagataaccatcctttatgttattgtctccaacgcaaggagaagatccggaatctcccattttgcctaaggaacccgatcttagtgacctaaagttccaagagacattctctttgtagttaacttcaattactattttttgcttaacttaaaatcaacttcttcaaccacaattctactttctttcaaaactaactttcataaggaaaaacaccattttattacctttattaaagtcaactgtacgatgaaaacccatccctatggatgatcctagagccaatatactatagtagccatgctaccctagtgtaaggtgttttaggttttataaattttgttgataacacccgtctggcgcaaaaatcaaatgacaccgttgctggggacgaatcatgttggttgcaaaatgagctcgaggtttccatgatgtcagagtgttgttcactggtgcaactagagttgtattgggttgatttggcaccaagtgaaaagaaggacatctcttggcagcgtgttcctgtattccacatatctggcaataaccaagataaggtcaagaaggaggtcgttggctgcgagaagagttttgtccagcgttaggaaacacgggggagcgattgttggtattaggtgagggatgccaatctgttctgttgttaccagagtgtgttgatggacgccaattattgttggtattaccagagttgaaagatggatgccaacttgtagtgttacgatttgcaggatttgctgaggctagaaaatgagagggtttaaattttgtaccttaaagagacgcttcaaaatttagaagctttttgtgaagctcatcgaacatgatcatggtatcgcgggcttgaactgcacgtataagctctttatagtcatccccaagaccatcaagaattttttctgtgaggtcatcttcattcattagtgcctcaagaatagcaagttcatcagcctgacacttcaccaattgaagaaactctgtaacagtttgagaccccttggttagatttttaatttgattctttacctgcttgatgcgccctcgagatggcttggcatatgtgttttccaagatcaaccaagcttcttctgatgttttggctctagtaatgaatgggataattatgggagaaagagatccaactaaagcattaaggatcagttggtcttgtctaatctaagtattatgagtaagatttggtatagtggtgttgttttgagtgatagtggagggtggacaaggtttggatccatctatatatcctaagaggtcatagccgacaaaagagagtgtggaattgaagtttctaggagatgtaattggttgtggtgagtttgagtggggcttaggcagagatattgatggatataagagatgtgtttggttcatttgtgttttgaataacaggtggaaagttggaattattggttgttgtcatgatactggtggctggagaaaagagtagcagcaattaaatgctctaataccatataataatgagagaaacagagaaacagaggagagtgaatatgccacactaagcttcttttaaaaatagcagatataaatacaaaagattgtaacagattggaaatgtatttctaaagataagtgtacaactgtaacttaaaatacaaattcaaaaattaaacaaactaaagcagttacaacaatttatgagaaggaatcgagagacatctctaatactaatattccttataatgctcctagctttaggaagaaaacatgaattatggcatcaatgtgggcatatgtcctcctctatagtaaatctagagtgtcggctaaaacttgggactaataatttggtgttctcactagggaacccccatgcagtaacattagctaggtctttctctcatagaattgccatgaaagaatttgtccttattagtataatggctactctagtgaaggtccaaggttcaagagatcttaggaaggatcttaatgttatgggattcaaaatctttagaaggtatgaacctttggtggtatctgtcttaagttaaattgaaatttgattcaaaattatttggaagatccataggtgttttgaggttatggaccaaatcaattgtcgtttagggataagttgagtaactgatcagggtagcttttgacttggcgcactgaggagagttcaatgttattgggtcttttagggaaaacctattttgtttaaaattcctagtagcatgaataactctgatgagctaatcaaaagttgtggtttagttgattcatcttagaatgaggcctttccatagtcaaacaagcaagaaaccccagtttgaagaagcttggtaggttcttgacctcaacagagtgcaacatcattaaagaatcttatgatgttggaggttaacctaattagatgattctcaccctcttttccattgaaaatatgtggttgttgcacccaaaatttggtgagattattatggatgttgcatgagattcaagtctcagtatgggaatgacaaatttattatgtagccttaagtcaatcaaagctttctttgaagtattcaagaaagaaacttttgatattgctggtgagaggaacactatgacaatcacaattggaggaatgggtcatatgacggaagaattttgatatcttagaatgaaaaggaaaataaggttggaggaattatgggagggacgagtctaggttagaatgggtcagggagggtaattgctactcaaaattgtttcattaggtggataaattatgggaggtcaaagaagctagatatgaatggctaggtatttgaagataggaagagttagtctattgaatttaaggagaattactatggatattagttacaaagaatttatcagaattcctttcaacattagttacgttcccattgggtgctgaggatcatggaatttgatagttgtgttctctttttcctggtgcctagatccttgaattagaaaggctattggttggccaaaagtgaatcatgttcttggttggcttaactagggatatcatgccctgtattttggtggttaattttcttaaggttggggagccaaagacaaatacatatgggcaagctatttttcagtttatgtgggaaattgttttatgtttagtgaaatcgcaccaatgccaagatttcccctttaaaataatggttttagctttagttttagttcctcaccaaagttaaaggaaaaataatatcctcaaacatggcccaaatatgaggccacagtagcactgttgcactcttcatgaggttgaccgagtacatgtctctgttagagagttactaaggattctgagtctatgttaagtaaccaaggttttgcttttagagttattattattttcaatcatatgttttgatgtcaataacaaaattttatttcagaggctatagaaggattgccttgactggatgactcttaaagtggtatgttctgttttagctatttcatgcttgatgagaactaaaccttggattaaaattcatgagagggtctcttgagcttcccatctgttatttttcaagttcactttttcttctaaataacctttttttaaatctctcatttacttattgtatcagctattttatcatggtatttggccttattgttgtttcaagctatgttcttaccttgtgggtctgcttttaaagcttctgaatgcatgtttctaaacattcatgcatcatacacatcttttatttccctgacaggttgtctaatcgacagtctaaatacttagtagttagatttttctgttctttggggtgaattagtatttttcatgtttttgttattgtctgttcctttatgatctggttctggtactgcatcaagaggattggagttcatgtgattttttttttcttgctcactcacaaaatgtcttgccattccaggacaaaaccaaactttgtatctttcttgagcttgc

SEQ ID NO: 10709 - DNA, 6296 bp, Vitis vinifera
  Intron number 3 from transcript GSVIVT01011272001 (locus G SVIVG01011272001) derived from phytozome v7.0 (chr-ID chr1 3; pos 10311633 to 10317928 reverse strand)
aagtatctccttgaactttaatattacgcatgttttctttatttgtttttgacaggagtgcactctgagttcattgaatgttattaatcaacaaaatgttaagcactgcaattttttattctgctgttttacttattttctcgtccaagtttaccttttgaatatggtatagatttcaagggcatgagcatgtgcattaatgtatttgatttccaaacaacagatgtgcgtgcagctaaaaaattagggtcaaaaccttagaaagtttagagggtttttatgtatctgttaggaagacatgtcacagtgagatatttacatatggtccatgattcttcccttgaggttgcatcttgtctgagatgtgcacttcattgtttaacaaacataaggtgctccatagctgatcttgtaattgagatttagacttttccatcttccttaggctctgttttattttactttggattttagaaattttaagggaaagtagaaaggaaagggaatagtgtggaaagttgggaggaaagaaaaagtcaaggaaataaaaaatagattcaaatttaatataattttctcatgtgcttttccaaatttatttctcctatatagagtgaaaaacttgaaaatgcaaggttctaaataattttcatcatgcttaattttccatggtaaataacgtaagagattttggactccttcctacatttttttttcttagtactttctgtgatccaaaaatagtgttaatttattttttaactttaaattcataactagtattatataaagcaagaaactctaagcctgctcaaaggtttttttcttcctttttttttttgccctaatagtatcttataaagatatcctttattttttgatgaaaaaattgcttggaaaaatgctattttcataaatccataattatctaatcaattcaattttataatcgtacatttagtcaacttaataatttcgttaacaaacactgaaaccatgccaaactgtgtgcctctggcactgcaacatatgggcgttgcacatcatgacgtttaacagtctagactaccactttatcccaccttcagcatctgatgaccaccttcatagtgacaatgtaatagttttatgctttttttccccttcaaaaagggaatattacttctaatcttagcctggttgctggagcattcatactttggataaatgctaggtagattaaagtgatcacttgctttctaggaaagttttaactttcaggttgtggtgccctgattggaagtctttgttttcaactgatgcatgacattattgtttgggctgttagctagtaatctaatataactcttcaaacatagaggagtagcaatttgtattattctattagtcattgctcattaaagggttatcctaactacttgggtttgaccatgtgattttcctttttcgtcattttactctatcgaggattataccattggctaaatcataggctttccagccttcttttgcagccatgaacttctttttcttggggatgctcatagcacttctaaacttaaccaagttactccttagtggtagtcattattctcgggtgcgcatgaacaagttacctcaaccctctctcatcttattcagtgctatgctttgcttctctagattacaatttcttttctcattctatctttcattgcattagtgttatccatgtcttcattcttatcttagctacttctagctaaggtgttggctaaccagctcaagaagatggtgggctagatgtttttagtgttccaacaagcttttgtggagggtaggcaaattttggagcaacccttattgcaaatgaggccttagattcaaggccaaagagtaacttcagtggggtcatttgcaagctagacatcaaaaggcataagatcatgtgagctgggatttcttatgagcatttctagagataatgagctttggttagaaatgggtcagattgatcaaatggtgcattttaatgacaaaattctctatcctagtcaatgggctccattcggttttttccaaagctttaagggtttgagatagagaggccctgtttccccttatctcttattttggccatgaaggaccttagtaagattctgaaaaatgccaaggaagggggcttcttcttaggtttcaaagtgtgaagtagaggtggggtggggatggaaatgtctcatttgttgtttgatgataataccctaatattctaagatgctaacatgaagcagttggagtatctaagttgggctttgatgtgttgctaagtgattttaggattaaggataagaatggagaaaagtgagtgttttccagtagaggaaaccacatatttggaggaccttgcctctgtgtttgattatagggttgggagccttccttccacatatttgggcttgcctgtgggtgcacctcacaaatcaacaagggtataggacacgatggaggagagatttcggagaaagttagccttgtggaagaggatatctttctttcaaaaggagggagactcagtgatcaagtatactgtcatgtatgttgatatacttcatgtctcttttcaccattctgagggggttgagcttaagactagtgcatacccaaaggaacttcccttgagatggaagggctcgtgagagaaaacctcacttggttaattggaccactatgtgcctagacaaaaaggataaggggcttagcattagaaagcaccatactcttaatagggcttttctaggcaaatggagctagagatttgtgtttaagagagaattcctttagaactaggttatggttggaaagtatgggtcataagaaaggggatggagctcaagggtgacaaagaatagctatggggtggggttgtggagggccataaaaatgggtgtgaagtatttcgaagtagaacttgtgtcatcgtgggtaatggtggatgaataaaattctagaaagatgcttagtgtggtgatatctctttggaagaggctttgccaatgctctttgccatagccactggcggagactcttgaatagcaaatttgtggtaggaggacagggagggaaggtgaaggagcccccatttccacagacagctctatgatggggaattaggagtggaagtcttttttggaaaattgcatcctttctcaattagaagagacgggaaatatggtttaagttggaaggaaataaagactggaaagttttgcatcaaatctttctatgcatccttagcctagggaggtagtgagcttccctacaagcatcatttagaatccttgggtgccaatgaagaccaaaatatcactaaacaatttaatttgcaaatccataaaaaaacagtggtctaaaatagctagttctctacccatttaatttctctttagttttttgctttgtctgctttgttttcttttacttgaagagtagctctttgttttttagaaaaattttgtcttttttttttccacatttaataccacccattaaaaatgtaactttagtctagtagctaactcatctctagttgctgccaatgccatttgactagtcaacctaggcgtctccaagataccccctgctcacacctgttctagcccttttccaattgcatcttaagatgacaaatgacacctacaacaaccaagtaaaactagagaaagttgactaaattttcagtcacacaaaattaagcagcaactaactaagttgccagcttgcataactaatggtattgcaaagaatttccactattgttaaccacttttaatgtacttttctgtcaatttaacatgcttattactcaactaatcattttccttaattgactaactaatcaattcactaattgagtcattaatcctcatttaaaaagactaaacaacgtatattagcttttaataatcttcaagtcattgctatagccattgaaaagatgaactttgggcagaaatggatagaatgtattaagtagtacatatcttctgcaaagttttctatgattgtcaatggcgcaacttcgggtttctttcagagtccaggggttttaaggttcggggaccttctatccccttaagtatttcttgtagtaatggaggcccttagttagcacatggctaaggcatacaaagctgcagctagtgaagtggctggttgtgtgcacaaagaaaagcaagggggattaggctgtagatgcctatcttcgttacgtaaggctctattatgcaagtggagttggcgatatgcaaatgaaaagggaactttcttgatacaggttacagaagaaaaatatgggaaaggaggagggtggtggtcttgcaaagtgagaaacaggtatgggattgggttatgaaaagctattagaaagaatggggacactttttatggtatagcatccttctctttcaaaaatgaaaggagggtgaagttttggaaggaaaggtggtgtggggataagcttctgtgtgtatccttttcatctttggatgccttgaccgtttcaaaggatgcttgggtggcaacattggaatctttgtttttctagatccttgaatgattaggaggtggatattgttaaagatttctttgctaggttgcaatgaacgttggtgaacaatgagaggaaggacaaggtggtgtgattggacctagggaaggataagttttctgtcaagactttatatgccatcttggaatcaagggtgttaattcttttcctaaccggtattatttgaaatccatgggttttgtctaaagcaaacttcttcgtgtggaaagctagttaggggaatatgctgacccttggcaagcttcaaaggagagggtggtctttggctaatagatgttttctgtgtaaagttgaagaatccagtgatcatcctcttcttcattgcttcaagaccagggtcttgtggcagctcctctttgctttgtttggtgtttattaggtccaatcctccatagtcagagactctcttgtcttggcatgtatcctttgtgggaaaagagatgtaaaaagacttggagagtggctcccatgtgcatttttttgactgtatagagagaatgaaaccaaagatgttttgataatatgaagcaaatggatcattctttgaattttttttttcttttcaatcttctctcatggtgaaattgtttataaagggaggttttatgtctttaatcgactttgtagattggttggggtcttgctaagggagtggagttgttttttgtgtcctctctttttttggttatgccttttggcgtccattgtacacaacctgtatgcttttgtgctctttttttttggtgctttttacaaattcttttcatttgcctagaaaaaataacatagttttagtaataggaaaatttagttttagtaattatgaaaatggatacattagatcaattcacataaaagaatgtaatgattgaggatctttattccagcaccatggaagctttttgattgttgtataataagatgtgatatcaaaggagatgaaagaagagaaaagatagatctttcatgtttggcaatcataccaaagttcctatgcaatcacacctagagttccctaagcaatctcacttggggaagacaattacctcttaagaacttagatagctactcatttttcaaaaaattttgttaataaaattgaaagactacattggtctatactcatggagttctttttcctaacaaaaactaagactttatttcctagcaaaaatatgactcctttcctcatcaaattagaaactaaaacaaaaaaaaatttgaaggaataaactactaaatcaatttcaataatactaaaaaagactcctactaaaatatgaagtgttaaatctctaaactatttttgctgaatatttttcctttttctttcataagttgttgtaaggtgcttaacatgttgttcacctttatatggtatatcaaatatctcattactaacatgaagtatttaggagacttgactaacaacatgagtcttgtttagccattttgcatggtgcaaatcagttatgattttcagcagaatctcattgatctaacatgctgttacataaaagcatatagtcaaaatagggtccagagggtccaaagagagttcaagaagacttgacccaacaactgatacctggaactccaaaatgtttaattccaaatattttctgattgtctgcagttattcctgcataaatctcatgtatataaccatttcttgtgttgccatgacagg

SEQ ID NO: 10710 - DNA, 5468 bp, Vitis vinifera
  Intron number 2 from transcript GSVIVT01021353001 (locus G SVIVG01021353001) derived from phytozome v7.0 (chr-ID chr1 0; pos 4365689 to 4371156)
gagtagtgaaacttccgagggtccctccggtggtgaggatgtggaacaggatgaggaagaatccgcagattgacggcaggaggcaaagtgagagtgttaggaaaaaaattgcagttggaggctgttcccaagagaatgtagttgtagaagatgaagactttgtgggtgtggtagtgtgattatgtgactggccttgactagtgatggaaggagacccattttcaggcgacatccatgggccaagggcgggtggaattaatagaaataaaaggcatgatttttgggcatgaaactcaaatgaaactgggacaaaataatcctaataacaccaaagcaaagaaagtgaaacaactatagcacagtcaatgcaactcataaatcagttaaatatgctctctgattcgcacctgggagtccttgatgctctgcttctgcttcttatctttgctactccaataaatccctctctcatctctgctcattccctccccttctcctagaactccaaatccctatatcacttcctctattttctccttttttttttccgtcccatatggccaccaaagcagctcacccatgccctattttcctttcacttccagtcccatctgggcgcccaaaacaactcattctcggggtggtcagaagaaaagaaaagactacttctattcgagggggtctacacatttgtatatcattttcttattttttttttctattttttgattaactaatggttgaccaataggtcatttggttgaactaataggtcaattggtcgaaccaataagtcgatcaagtggatcaagaggccaactaattgaaccaagtggtcaaaatggcaaaagattgtctcaatcaattgaggtgtaacctcgattgatcaattgaagtacctattgagctagttgcttgaccaatcaacctcttgtaggaatggtcacttttggtaccttttttcatcaaacagctaggaatctattcaaccatatgatcgaccaaataaccccaaattttacttaatgactaatttaggctttcaacttctatttaaaaacttcaaacttattgtattgataagagaagtattctaaatcattattgattatcacttaagacattgaggggtatttttaaagtatatttgccttgaaacttgcattttatcttaatgcaccatttaaccctagtttttttccatttgaacaaacaatgtaaactaagaatcctttcttcatttctatatcttgtgaaagtgttttggaatcataatctaaaggggaagagtttagagattttgtcttaaaaactcttattgtaaaaaacgtctagaaccataatctaaaaaagtgtttgaaaccataagtccaagaaaattgattgaaactataatcccattgtaaaattgaaggtttgggttgaaagctttgttagtaaactctcaatcgattacgagtttgaggagagtgaacataagcattgcattgaacaactataaaaactagtatttgcattatctcttccttattttttttatgcacttgtttttccattatatttattatataattattatttatattttataattattaaatttgtaaaaagtaaccatcatcctattcaccccaccctttaaggtgactaggtcgatttagctagaattctaatagcttcgattggctaaataattattatgaaacttttaattataaaatgcataaaatatatatttttcttatccacatagaatctatgtaatattataaaatacatatttttttaaggaataacttaatatttcacattattataatataaaacaattaaaaattatcctaagcttagcaaattaacataataattagaaatgaaataataataaaaaatgaaaaataaagtatatgacaacatctagctttacaacaaaaagaaaaatttacatagtttatggcaacaaaatattctttgaataattggtaattttgttttaaataacttttaattatacaatgaaaatagaaattgttggtatttcttatagccataagataattgtcaataaaaatgatctccatagtttttcacgtctagacaaagtaaatataaattataataataaatataaaatatgatgagatatcactaattagagtatttgaagataatagcgttacgtataaataaaatctcctaaataaattcatctttttttttttttggctttgtgtgttcaaaaggaaagaaaatagattaaacaaaattgagaggaaattaagaaaaaatgtagtctaaatttttctatttatatagttaccttaacccatttataggattacaatcataactacaataaatatttttatgataactaggaaaattacatggatgtttgaaaaggtatgcaatatccacaaatttttagactcatatatagactagtatttacattgaagttattttttaaaaacataatttcggatataatataattagattgaaattgtccgaataaatttttagtatttgacactagtaatatttttataaattccagttgatattcatacccatatatatgggagaattacccaaaagggtaggctgggcaaaacaattactaaaaagggtggtatcttttaataattcttggggaggactttaataagtttaatataccaaaactgccctttaactaaaacttttaaaattcaaagcatttaaagcactttacttgatttgtcaatacatttatggtatatgggtcccacatttattgtaattattgatatttaaattttaaatcaaaattttgagtttaagccttataattatatataatttgttatttaaatttactatttaaaacaaaaatacttttaaaaaatattttcaaaatatcatttatttatttttaccttttttatttttattctaattttttattttatgaagaaaaaaataagttttataattatataataaaaatgatgattttttcatatatatatatatatatatatatatatatatatatatattatttttaaattgataaattatgattttgtattaaatttaaggaagataaaatgtttaatttttcattcagattctctaaaaagaataagaaaatgatagagaatgtttaattattttttatttttgtaataaaataatttaaaaaaatttatatgattttttttcctttgcatagtgttttttttttttttttttaattttcataatgcatcgagtagatgatgttaatatatttgatatgttgaatattaataaggtataaaaggtgatcctcaagattattacttttattataaaatacaggtacaataaaaatatgttataattacaatataaatacacttatattacaatacattacaataaaacctaattaagaaatttatgaatttttttataaaaatggtaattttgtatgatcataccatattttacaacatacttatatcataaataatttctgaaatcaaataaaatattaatttgaattcatgtagtttatatatatatatatacaaaaattattaaataatttcaaaacactaaataaatattgttaatatatttatacaatgtgttaataccaatagggtatgaataaacatttttaaaattattgcttttataatgaaatataggtacgacataaatacattatacttacaatataaatacactatcattacaatatattataacataatttaatttatttttatttaattttttcacgtgctatattacccaatgaataattgtgagttattccatttaataggtgtgtgttagtcaattgaatatttatatattattcaattgatgagtgcttgtaaaaaataattatttattatattatgataacaaagtttttaattgtatgttttatatataaaacgatataataactttaagatatgatttttatttatgagatattaaaaattatttttttttacaaggttctttaaaaaatctcaaaatttttttttaaataacaaatttttaaacagttgattgttcaaaagtgacaacaattttttcaagttaaaaaatgtaccgttgattgtctatcaacctgtacttatcatcatgtatgggccccacatcatttatcaacctgtacttatcatcatgtatgggtcccacatcattcacaatctcaatttatttataaataatatagaaaacatatttaagggtaaaatatattaacaatatttatttactgttttgaaattatttaataatttttgtatatatatatatatataaactacatgaattcaaattaatattttatttgatttcagaaattatttatgatataggtatgttgtaaaatatggtatgatcatacaaaattaccatttttataaaaaaattcataaatttcttaattaggttttattgtaatgtattgtaatataagtgtatttatattgtaattataacatatttttattgtacctgtattttataataaaagtaataatattgaggatcaccttttataccttattaatattcaacatatcaaatatattaacatcatctactcgatgcattatgaaaatttaaataaaaaaaaaaaaacactatgcaaaggaaaaaatatcatataaatttttttaaattattttattataaaaataaaaaataattaaacattctctatcattttcttattctttttagagaatctgaatgaaaaattaaacattttatcttccttaaatttaatacaaaatcataatttatcaatttaaaattataatatatatatatatgaaaaaatcatcatttttattatataattataaaacttattttttttcttcataaaataaaaaattagaataaaaataaaaaaggtaaaaaaaaaaaaatattttgaaaatattttttaaaagtatttttgttttaaatagtaaatttaaataacaaattatatataattataaggcttaaactcaaaattttgatttaaaatttaaatatcaataattacaataaatgtgggacccatataccataaatgtattgacaaatcaagtaaagtgctttaaatgctttgaattttaaaagttttagttaaagggcagttttggtatattaagcttattaaagtcctcccaaaaaattattaaaagataccaccctttctagtaattgttttgtccagcctacccttttgggtaattctctcatttatttataaataatatagaaaacatatttaagggtaaaatttctttttggataattctctcatttatttataaataatatagaaaacatatttaagggtaaaattgtctttaaaagattgagtgtttatagtcattgttttttctaacccaccctttggtaattctccctaaatattttacaaatatttttctgaaaaaatgtggtacaaaaag

SEQ ID NO: 10711 - DNA, 922 bp, Vitis vinifera
  Intron number 8 from transcript GSVIVT01035212001 (locus G SVIVG01035212001) derived from phytozome v7.0 (chr-ID chr4 ; pos 10625567 to 10626488)
tgtaagttcaattaaagaaatcattagattatatacatgtagatatgaaacatatataaatttcataaatgcatcattacacatgcattctctcatacaagatattctttatgcatattaggagttgaaaataggtcattgataaatgaatttgagtttggagagtaattttaggagggttagaagcatttcctaacattttgacaccctttgcttataatgatcaaggatttgacaaaatttcaaaaattacttttaaaaatctaaaaaatcacttgaaatgattcttctatcaatactttttacttaaagtgtaatacattatttaaaacgtagtcataagtacttctgatttatatcctaataatatatgattctctagaaattaaagtatatataatagaagtgttaacgataaaaacaccataccataaaagtgccaagtgaaccttggttatttatctagattttttttagatgaatgtcaccataatagatctttttcgataaattgtagtacttataatttttaaacaatgtttggtaagttggaactcttgatttagaacccgtttaatagtgattttaggaagcacttctaacatttttaacacttgaaattttgtatcattcaagtgttagaaagaatataaacattttctagaatcactaccaattgcactataaattttattatgctttaagtacaagtactttaggaatttaatagaacctataacaatcacaattcatacaagtagagatgttagggccctttgtcacaaaaatgataaccttatcatttatgccttctttttactccaagaagatggagggtaagaaatatattgtttccccaatgttgttctttttgtagaaatagtcttgatcaaatttcacatctgtatgcagtcaactgtgg

SEQ ID NO: 10712 - DNA, 7870 bp, Vitis vinifera
  Intron number 1 from transcript GSVIVT01028644001 (locus G SVIVG01028644001) derived from phytozome v7.0 (chr-ID chr7 ; pos 11488129 to 11495998 reverse strand)
gagatctccagaagctttacctgctgcgtttgtttgtcagttctctctctctctctctctctcttgattctttcattttgtttttttttttttttgctttatatgtggtttgggttttggttcaatctgtgtttttcttctttagcattgtttgatttgtttgattgcaattgtaaggtagtgaattgagcatgctttgctagagaatgataacgtgtattttgctgattgattgaattttccttgggaattaactcttgcccgaaataaataaagaacaaattatttatcagataaaaattggaactttggaaagttatttgcagttcacaggctgtactgcaattgagggaattcaaaagttttcattacgattagcttgttccttgggaaaggaatgaaaattgaattgatgagtgatgcaaaaaaattggtgtaaggactcagaaatgttctattatggcctgtgcctcttcgaagtgcattaagcagatttagtgaagcttgctaaattcttggtttgattggtgttgttaaaatcaagattgatttgttgatcactttagttgtatgcctttgttaattttatcccgctcaaagggattatttgacttgattagaagatagccactgcacagggatgtgtccaaattattgtaaaagaaaaaaaaaagtgtgataaaagcaaaaattgaaaatggacaaggagattaatagacaaggaaaaggaaaaaacattggaggatgtggtgtttggtatggtataccatactggtgcaacatctacctcaagctctgcctaacagaggtgtggacagagcccccaccccccttcgggcgtgtcccgcgccccgcgatgccgtctggttagaagctgataaagaatctctcgttagaaatgaggaaatgctgggtaggtgtctgataggcctttggaagggagactcggaccgcctccctgatctcgttaccttcgggacatgggcgaaaaatacctggctcctagaagggaatctttggctgtctaacatgagggaaaacctcttgtttttggaatttgagtttgcggacgaagctgagagggtgcttaatttaggggagaaaagctttagaggaagaagcttccaccttgaaaaatggaagccttcaatgggctgccttaaggaagacaacggggatacgcgccttgtatgggtcaaaattttaggtctcccgctgcacctttggggaagaagcctcttcaagaggtttggggactcttgtggaagattcgtggctgtggatgaaaacacagccgagcgtcggaatctcaagtgggccagaatcctcatcgaaaccagagactggcatcacccaagttctctgcaggtggtcgccggctcctcttgtttcgctctgcagctctggtgggaagaagaaccccgcttctccactgtgctcccttcccatgggcccggtgcttggaagcgcaaggatgacgaagtgacccactcacgcgccgaggggagcgtgggctttccgccctcttcctcagccctttcgcagcctgaaaagctgcccccgcagcctgaaaagccgcctccgcagcctgaaaagctgcctccgcagcctgaagagctatctccgccggttttggggagagatgacgcatcagacaagtcgaagtcaactgcccaccaggcccttgcctgcgatttggatttgggccttggtctggactcctcggcccacccggacctagcccgccccattgggcctgggttagggaaggcccattctctgggaaacacttatataccccttggcccagcttcttccagtgacttagggctgggaacccctacctgctccccgcatcggaggagaggaccccccgctgagagcccccagttggaagcgccgtcccatttggaagcaacgtcggcaaatgacctccctcccactgccgaaggccgcaatcttcaaggtatgctcttgccccctccaccccccttgagtgggatgccttcttctccttcttctactccattcttggttacgggaaccgagagggaaagggaatgctctggacagacgggtccgacgtcaagagagactgaagagacgccgattcctctgtccttgatgcttagagatgggtcgacagtggtcctgaggcccgaccccccaaactttgcggcgaagcagaaggaccacatagatatctccccgcgcgaagaagtatggtcagaggaggagatttccaatctcttccattttagcaaagtcttgggaatgtctgtcgaaggacacgaggttgaaattctgaatttacttgagaaattgaagctgaggacgggaaatagcaccctttgcaagcgacgaaagaagaaaaaatcttgcaccacccgcttcgaaagagagttgaaaaggttggaatgctctgttcgttacggggagacttcagggttagccaaaaagtccggccacaattccttggatttggttccagttgactaatgagaattaaaattctctgttggaacgttcgcgggcttaatgactcagagaaaagaaagttgatcaagggcgtggtaaggaatcaaaaaccagatttggtttgccttttggagacgaaggtgagagagatgtctcagcaattggtcaacaatgtgggtactggaagatttcttaattgggcctctgtagatgctaggggtacggcaggaggtctcctgctcctctgggacaacagagtcttggagaatctggaggtagaaagggggggggggggggggtactctatctctatccgtttcagaaactgtgtcgatggtttcacttggattttttctggggtatatgggccggtgattagcagtgaaaaggaggatttttgggaggaacttagtgccatccgtggcctctggggggacctctggtgcttaggaggggacttcaatgctgttagattcccagaggaaagaaggaactcccttaggctcacaactgaaatgagaagattctcagaggttataggggaactggggctaaaagatctccctctggctggaggccctttcacttggatagggggtttgaactctcaagctgcctctagactggaccgttttctgttttcggaccagtgggaagaccacttctccgccatcacccaagctgctctccctcgtttgatttctgaccatagtcctatagtccttcaagctggaggattctcctcaggcaaaagtcctttccggtttgaaaatatgtggctaaaaatcgatggtttccaagacctagtccgaagctggtggaatgggtattctgttgaaggttctagtagccactgcattgccgagaagctcaaagcgctcaagaaggacttgaagaactggaacaaggaggtgataggtaatgtctctctcaatagagcagaagccttctctcgcctgcagcgatgggagaccagggagaacgacagccccctcactgctagtgaagtagaggctaaaaatctggctcttgaggactacaagaaatgggctctgttggaagaaacttcttggagacagaagtcaagagaaatttggctaaaagaaggcgacaagaacaccaaatacttccacaaaatggccaatgctagggcaaggaagaacttcttgtctaaaattagaataaatgaggtcactctctcttctagtgatgacttaaaagaaggcgtttgtagggcctataaatccctcctctcagaaccaggggattggaggcctaatatcaatggccttaacttcaaggagctgggagaaggcttggccagcagcctagaagttgtgttttctgaggaggaaatctatgcagccctaagcagctgctgtggcgacaaagctccaggcccggacggctttacaatggccttttggttgtgttgctgggatgttgttaaatcagaaatcttggagctcttcagagagtttcacctccatgggaccttccagagaagtttgaactccacgtttctattgctcattcccaaaaaggaaggggctgaagacctaagagatttcagaccaatcagcctggtagggagtgtatacaaactactagccaaagtccttgctaataggctgaaatcagtgatgggagaggtgattgctgattcgcagcaagctttcgtccatgggagacagattttagacgctgttcttattgccaatgaagcccttgattctagattaaaagaaaacgtgccgggcctcctccttaaattggacattgagaaggcttttgaccatgtaaattggaacttcctcatagatgtgatgtctagaatgggatttgggcacaaatggatcaattggatcaaatggtgttggtccacggccacattctcaatcctcatcaatgggtgccccacgggcttcttccgtagttctaggggattgaggcaaggcgaccctctctccccctacctctttctttttgccatggaagctcttagccaactgctgtcacgtgcaagaaatgagggctttttttcaggcttcaaagtgggaggaagaggtagagaggggctgatcgtttcccatctcctattcgccgatgataccttaatcttctgcgatgccgatgcagttcagttacaataccttagctggaccttcatgtggtttgaggcgatttcagggttaaaagtcaatctgagcaagtctgaggccatcccagtgggggagtgcccccccatggagtccctcgtctcaattttgggatgtaagattggatgtttacctacttcctacctgggtcttccccttggagccccctacaaatccactagtgtgtgggatgcagtggaagaaagattcaggaaaagattgtctctctggaaaaggcaatacctttccaaaggtggccgtctaaccttattaaaaagcaccctctctagcctcccaacctactttctctctctctttgtgatccctaagagagtttgtgcaagactcgaaaaaatccaaagggatttcttatggggagggggcgctttagaaaacaaacctcacttggtgtgttggaaggttatttgtgccgctaaaaaggatggaggcttgggcatacgcaacctagctatttttaataaggcccttcttggtaagtggttgtggagatttgccaatgagaacgagcccctttggaagcaaattatctctagtaaatatgaccttcaagatgggggatggtgctcaaaaggtgttagagatcgttatggggtgggtgtttggaaggccatcagaaacggttgggaaaactttcgatctcactcccgcttccttgtaggggatggcaccagagtgaagttttggaaggacttgtggtgtgaaaatcaatctctggaagaagcttttcccatcttatttaatctctcagtcaacaaagaaggcttggttgctgaggcctgggaggaagacggtgctgggggtagttggggacctcgtttcaacagacacctcaatgattgggaggtgggggaagtggaaaacttattaagcaagcttcatcctttggctattagaagaggtgtggatgactcgctcaggtggaaagcaaataagaatgggaccttttctgttaagtgtttttacagctcactctcaatgggcatcaaccaccccttcccagctagtactatctggaagtcttggactccaaccagggctagtttctttggttgggaggcggcttggaacagactactcaccattgatcgcctaaagagatttggctggaacatccccaacaggtgcttcttgtgtaaaaatgaggaggagtctattgatcaccttctcctgttttgtgagaaagccagaatgttatggtatctaaccttctccctttttggggtgcaatgggtgatgcactcctctgtgaaaaggaatctcctgggatgatatggatcttttgtgggcaagaaaagggagaaagcatggaaaactgcccccctttgcctaatgtggactatttggaaagaaaggaatagaaaagccttcaacgatgtggaaagaaatgatcaagatatcaaatccatttttttttacacttttgtgaattgggctagggtatatattaaggaccatactttatcgttgtttgattttgtaaattggttagccaccaagtaagggtcagaaccttttgtttcttgatcctttgtatcttggtatacttcgtgtatactctctttagccttttggcttttaatgaatttcctttatctatcaaaaaaaaaaaaaataatggagatggtctgtaccgcttattaattccatttgtttctcttattatccattataaggactgtgttgaggatttccattatcaaaacgaaaataaccattcatcctgaattgaaaggttatatgccctgagttgaaaactttactgtcagtgggacaatcacactcaaatgcaagaaaaagactgaacaaaacttgtagcctgattgggacttgaaacatttctaatgaactaagcataaatgaatagtttgatgattatttagacaagaaggaaagagatcttatcctgcttataccacataaatttcaataaactgaaaataagaaaaggaaccttaaatttcaagaatctcaaagaggatataaactagggaacccatgttccaagattagaattgatcatctggtggcatgatttaaactcccatgatagatgatggagctctgagatgtggcttttccagctacatttagagatcattttatgagggacatgaagccaaaattctcaccaggtttagagcagtacaaatgtaatttgaatttaccttcttttttgttgtactttaactgaattctaagcaagaagttgattaaccgggtcaaaatttcttttagtaatttctatggccattataatttttgtctatgctcttgcttttacttatgcttgtactctcactatatcgcctatttctcaaacagtcttttgacagttttagatattataggaatttgcaacttcttagagctttagccaaataagtttgatattcattgttggcgcatttccctaagagtttacacttttaggttaattggtaatttaacatggtactaaagccttgttttatggaaggaggtcataagtttaaccctcatcagatttttatatcccccaatttattaaatccatgcatgggttcaaagaaggcagcctgtgagacaaggtgttagggctttagcctaaataaacttgattcaccttgtttgcccattacctaacagtctaagcttttggttcaattggtagcttaaaacgtctattttacttgcatgccaacatttattcagtggataagtaaacaactcgttaaatgtaagaaatgaaaaacagaggagatattctttaatagacacaacttgcaagaaacaacaaaatagcagtgtgaggcccaaagaaaacccaacaaaaccttgtgctactataggagatctaaccatcaccatggggttagagttccactacatggtccaaggatctggccaatcttttttcaaataatcagttagatgcttagatgatctcatattccaaccacatgatgggattaggccactagagaaaacataaatcttacagatctaatggttaagccacaaggggcatctattctctgaggaagcatgggatataacagctgagaagtgctcctccacaaggcattttctaatgcatgccatcatgatatctatatttcacagtctgtcattgtgtacaaatccttaaaattagaaacatgcttctgatttattgctctcaaaaaaagttgattaacctaagtattgatgttaacatagatcctacagattca

SEQ ID NO: 10713 - DNA, 1036 bp, Vitis vinifera
  Intron number 1 from transcript GSVIVT01038176001 (locus G SVIVG01038176001) derived from phytozome v7.0 (chr-ID chr5 ; pos 24085265 to 24086300 reverse strand)
aagtagggttttgaactcaaagaccacaatttcaggtatatttctaaccctaaccctcctgtttggtttccgagaaaatcgaggaaagtgaaaagaatatatcgagcttttttgttatgtttttattaggtttgccagtttttttatcagatcctgaatgatgccaatttttttctttttttgaatttcctctgtttggttgctcagaaaatagaggagaagggaacgaaatgatattcagagtctatatggtctgattttatttttattttattaaagattcaaaagagaaacccccagttcaacttagccaagtacttcgattgatgatatatcctaacattcaaattttttggtttgttttcgtaggtattctttagcttaattttctcggctgccaagcagtagtctggatttaaaattttgatttgttttattttctgaaattttctcagcgaccaaatgagtctaatttggttcttgtttatacagagctacttgttctggttctgagttatgttcttttgtgcttactatgttcttttgtgggtttgattcggtgctgtgttgaggaaatgtgatctggtggtttccggctattagagatggaattgaatgattgatgtggctatagagttagtattttgttataaaatttattggggtttgtggattctttggatataatgttttatatctatcctttttcactgttaattattttcatatttgcatttgagtttggtttagataattgctgtatggagcaactttgatgcttaccgtgctagttatgaaattagaaatgaggacgaattgacgatgttatgcaatttatcataatatcatgggattaaaatataacaaattcatagaccaaattagtggagtgatttgcgttacctttagtattagcaattgattcttgttagttcttttctctttgcatttttgttttccaatgattgttaggttgactatgatatgattatgtcttttaggattcagaacttcctttctcaaagtcgagaaacac

SEQ ID NO: 10714 - DNA, 4021 bp, Vitis vinifera
  Intron number 4 from transcript GSVIVT01023295001 (locus G SVIVG01023295001) derived from phytozome v7.0 (chr-ID chr1 2; pos 20002589 to 20006609 reverse strand)
ctgggtatcacattcccaaaggcacccgcttgctagtcaatgcatggaagttgtaccgaggtcctgctgtttggtctaaccctgaagagtttcagccagagagttttgacaagccatgcaactttagatgttttttgccagcattttgagttaatcccatatggttctggtagaagatcttgcccaggaatcaatatggccttacaaatgttacacctgacaactgctcggttgcttgaaggatttgacatggctacaccatcaaattctctggtggacatgacagaagggataagtatcaccatgcctaagttcactccattggaagttatgcttacccgccttcctgctgaactttactagtactgcataaacaaatagcaaaaaaataaaaaggcgagcacacttagcattgtgtatatctcatgatttcaacatgatagggcactggctggattcttagttgattcaccagattgtcttttttaggtataggtcattgtaatgaataaatgtaagggcatgtagatactatccgtaagtcttattcctcaatatttacactaaacttcatattcgtgatacaacaccatgcttgctcccggtggaccctaccttagtgcttggggcatgtagatcttctcaatttagagaaagcaaagacaaacttattgagagttttgggtgtggggaaggctgatagggtttttccaatgttcacatcatgaaacaaaacctctttttggcatgatgtttatgggataaaaatacctaccaaatggaaagttgaattccacaataaaaccaattaaaatatgggaaaaatataattgtgaagagttgaatttctgccttgagcacttgagtgcccttaggagcggttgagggattgaagacttaattaaaaccaagtttaaagcatttttcacttaaattaaaaccctaatccacttcacgccttaattgattccaactaacctttctaggatccctttagacttacctatgtcattcctattgaacataaaacaactttgaatcttcaatggagaataataaaacacaatctaaaaaagtcctaagttagaatgaatgaaacaaaattgtcaacttaaaatacataccctaatgtaccaacatattaaaaataaatatgttttataaataaataaatattttaatttttataatttattttttagaagtaaataatttttattatttttaatgtgttagaaagaagaaaatgaaaaaaataataaattaaaccattttttattataattatacattcaatcaaggcatgatgaggtgggagaagtcaatacttgaatcatcttaagttttaaaaaatatttcaaactcacccctatatcctatttatcctcattccaaaagcagctttattactggtgtatgtgtgaggggtgagagggttacccaaaacgacccgctccattgtcatccgtaaaatggttttaccccacaactaggggttcaactaaagaagcatgtaaacaaagtttgttttgtacacattaaatttgccaatataggcattatgctcaccgtttacatctcatatataggccacttaagaactaaaatttattcaaaataaaaagacgttggaaatggacttaagaaaataaaaaattgaacaattatgttgtaataatactaataatcataaagatatttaaatttcaagattacaacttctccttctcaagactatatcgttgacctatcttcttttaacttccatgatatttaatacattttaacttctactacatccaaaaccattaaatagagaatgtaatattccataaagtttggactagatgaaaaacatggttggtaataaactaattaaattttgtgatacttgctaaattgttttgcacatatgcacttggacaaaaattattatcaaatatctgttagtgcattagttgcttagtttaagttagcaacttagttccattcatcttggatgaggatttttcttgttgactgtgtcttactctccattgaagactcaagctaggttgttgcatgatcaacccaagatggcacaagtaaatagagaaaggtccaggaaaggctaatttgattaaaatatggcataaagtgggttttagattttaattgggctaaaatattttttaatttaaatttaaaaagttagtcgagtgcttaagcactcaaacttagcacttgagcactcaaacctagcattgaagtgttgcgagtgctccttcaagtgttcaatcatttaaagtagattttcctaatttcaagtagtgatttgttttaattctttccattttctaaagttttgaaaactttaggattttgtccaccagaatttcatctttataaattctatgcacaaatttttgaaaaatgattattagcctttcccacatccgaaaaactctcagactatgtttgtattctcattcttagctttatgaaagagatttactttcccttcactacaagaaaaagggtcattgttaacatatattatctttacttaaagtagtatatgtcaatatcttttatttaaatgggcaactatgacatataaaacttagttaaaagaaataatgacatatatgaattccagtgattattccatgacttatgacgatgcaaccttgacagagaatttataagtcaatataaaattaatatattcatatgtaaaggtatctaaataaaggcaataatgacatatgtggaatttgctaaaattttctttaatttatagtaatacaatcttgatagaaaaattataagtcaatatatagagttaaaatatttttatgtcaaggttggtaaaagctatcttgacaaataatttataagtcaatctaattttattaataaatctatcaaggttatattagtaaatattgaaaatctcacttctcattttttttcttttaattcttttatttttcttttaattctatctaggcccattcccatctacaagcaacttgaaagaaaatcctaagacaataggcaccattaaaaattttgtgaaaagtaaaaataatttttatgaaaatttattgaattagatatttattctccatgcaaatatatatcctttatagggttttaatttttgtttttgctttttttgtttttgtttttttgcattttttatgacatttattaaatgatgtaacatgacttccttttattttgcttattgttgcaaccataataatgtacgcatgtaaaatgtatgcagtcagtggtctttgtcacacatggacaaatcatttataatgatatttagatttaacaatttggtgttatttgtgcctaatacttaaatagcctctgcaacttgcaccccagttacataataccatttcagaatttctactagtagagggacatttggtgggataataaaaattatatgcctaaataaatgcctttgtgggcagtttaaagttgccccaaattatttgagtaaattacaaaatctcataaatgctccaacgggaccattcaactgtaagtcccagaaatgacaaccaaaaaatatgtttgtcaaccttctcatgggatcatccaaacatatgagcgtgagtttagcagaatactacaacaaaaaatgccaaacccacaaaatagagggttattggctacagatttaacattcatggattcatctcaatcctcctcaagctccatatgaaggtccaaaccctaataaaccatctaattcaagaaaagctagaggaatattatatttgcaaactagcgcatgtagagtttagcatgtcaaatgtagttgtaagaagtcttaactaatgtaggtgaaatttagctgaaataaaataagggtaaaattggcagaatatagtcacgtgtccctgaaatttctcttgtatttggtgtaataattatgaactttagctgtctgtgtgaaattgataatccttttaaaagtaagaactaggaaaccagtctcatttcttactttgga

SEQ ID NO: 10715 - DNA, 4858 bp, Vitis vinifera
  Intron number 3 from transcript GSVIVT01015308001 (locus G SVIVG01015308001) derived from phytozome v7.0 (chr-ID chr1 1; pos 2549389 to 2554246 reverse strand)
tccagagccataggtttgccctgtactttaattatctacttcattttgaaatgtccagtttagcagttttcaagctagtcatcgctgtttatatatgattctgtgaatctttacgcagataggggttctactaaatttttagttgacaatctagactgaaatattcgtgatgttgatgcgtggatgattggggtttttttttatttactttgttttcttttgtttctaatagattttatataaaaggccattatagtacatatgcctatgatatttctagatgctttgaatcactaatatgaaaaaactgtaagttctctttagaagaagttttgaaacattacttgtgattacatgtgatttacagtctgaattatcacgttgtaagtaggtggaatgggaggaaaactgacagcaggttagggtgccctttttttttttggtagaggagagcacataagtaactggaaaagagggaaaaacagttagaacatgaataaccctgtaccatcctggtccttttaaagttcaaatgtgaccttttctcttttgattcttccaaagtgagaaactgtggccacacatacatacatacgtatatatttggtaggcacacctgacattaaactacaaggtgcctacgagatgtgttgcagcctggatatgtgggaaacatacatggaatttccaacaaacataaacaaaagggaaaaacaggactcagttatgacaactgaacgcatcaacaaaatctgtaaaaggcattctattcctcacagttttactggcctatacaaatgggacattttatatagttctaactccgacctctccaagaagcttttacgcatgaatcacccagaatcttctgtttcaggaagaccaaaataaggaaaatgaagctgtattctatatttttctattcttgttatgaaaagatatatctttaaaatacttaggaaacacccaaagaataccaactgatgaaaacaacagggatccaagcctttgagccattccacaattgataaacaaacagttggttgattcctcattctttctgtgcaagcagcaccaattatctaaacaataccatttctctaaagctaatacaaggtaagaattttttctttctaacaggtgacaagcaaagaaattttggagagaattagacaatttctatacaggaaaaaaaaaataaaaaaatcccaagacttgaacctaaagccgtatagatagacttaattaagaagcaacgatctgtagataacttcctctcaaatttgtcctttcatggtttcaatgacctccactacctctcacatctcagtagtataccaccttacctctttgatctccttagatggagaatcaatttggaaatggttctccccacaccaaatatctaccaacttttagttccaagtccattccccatattggagcattgttcaactgagtcatgaacgactagggagttgctcccacatgggcgaatcacataagagttaaacttttcacacctcttgcaaccataatctcattacatgaattattatcctgatttacataattatgacgttttgagcctttgtatcattcaacgtgaaattgattgtggaataatttttttagtatagaatgttgtgaatatcacccaatatcaatgtgacatgctatgattaatttgtcttgtgagcctctgagttagcatctgatacctttactttgaaccatgcatatgactcataggtgttaagtattggggaactttgtaaagatagttggtttattgtttagaagcttatgttttaagtattagtgaactgtgtaaagatggttggtttattgtttagaagcttacattttaagtattagtgaactgtggaaagctggttggtttattgtttagaagcttacgtttttaaggcaatcagttatttagtatagcgtcaaagctaaaaacactaccctggttcttgagatcgtaagaatgctaaagaggggctaatagagacaacattgcatcccctattgatggaaggaaaaagttggcctagtgcataaagataaggttataggataagagaaaaaccttattctatatctctttagccttagaaatcattatcttgtttctgttctccaatagcccctgaatttctagagtacccatggaattatcattgaatttttagccacccatttccatcgtcattcttattggcttttttttttttccaagtaccaaaagtttagtttagtttctcttcaatgttttaaaacatgatttcttgtttttgcatttctacctcttgattgggtatttgatatctgatacattttggagaaaaataatgttattttagttaaactaaatggcaaacattatataggatagtcatttctactcaaatgctatgcagaaggacacagtcttggaggatatcttaatggaacaaccataaaacctgctagtggcagcagattgatacacactagttccaaaataattttaaagtggctactagaattttaatttcattggacataagtcattctctaccaaacttttttccccaatttttttttcatgttttatatatatttttttatttgatacatcataccagactttggttcttggaggtcttgggttctaacatctttatttgtttattaccacatttattgaactaaaatccaggagggggatgcacctaaagtagggtattaagtgtttattaacctaataaacattgttgactcatttattataaacttaaacttttgagccaatttgtagttcaataaagaaacaaaggcatccatcattttgttttagacctccaaagaccagatattgtcacccttttctcatcctagaacaccctttgcccatgtcactcactaaaatttctcacaatgacatttctccactacctatctttatccatagtaaatctcgatagccacttaccttaaagccattttagaaacaatgaactctaagatatacagactgcctctctttaggaaaacaaaaattgcctagccaaccttatttcactagtcctttttaccgcataaaatctctttgaatcttctacatcctaacttgaacagatattggcatcacaaaaaagaattattattttaactatttgtgcattcttcaatgaacatgcgaaatactccagtttgtttcctgtcatgatccaagtcatcatatttgatcttatttagtttattctcctctctcaaaggattcccttaggagaaaaaaagggtttctatatttttcactaaaatattgatttttgtcaacatgacttaaatttcagtatcttagattcaaagaggagttctcttgaaatactttaacattcgaccataagatcaattgaccattgaaaatggcttctcaatgatatgagcaattggggggaaagcatgtgttggtttattggtgtaacaaaaattcaactagattagtccaaacttttgctaatttcttgacaaaattaaacatgtataattcaacaatttgggttgacactgatccaacaatcagttgaataatcattcaacaattttgggccacgaaggatccaaatttgacaaaacaattccaactaagtatttctacaatatgaataaaattcaatcatcaaatatgcataagtaactttcatctcaatcattcaccatcactagaatgcaaagataacagtaattaatgaaatgtaaattcacaatcacatgagacattggtacaatgtggaaaacctctagaagaggtaaaaaactagagcccacggctacacaaacatctactaagaatcaaaataaatacatgatttttatctaacccaagatgattgatcctcccatggaactactggctgagcattcttcatccttaattacctgagcctcacacttttctcttagtaacaacaccttggatttataacaaggtgcaagctgataattccttgaattcatttcaagtatccattcaggttgggaatctgaaaatgaaatagattgaagagtgtgaccaactaaaactaatgaaggaagaattgaatctccagatgatactcatttttcactcaaaaattagatttaagagctagcaaaaatctctcaaaatagtgttcttccttaaccttcaatggaggcttacacttacaggtatatattccaaaagtagcagagtattggtcatttctgaatggtccagaaatggccagaaacacaagaatgagatcaaagattgattgaccaaccaatcaagtgaggttgattagtcaatggattgtagtgcttttggtttatttaggtgatggatcatcccaatgtgtgggttgagctctccctctcagaaataaaggtgtcacttgtcttggctatttctaaactgcttaacaacaacctaaattgtaaaaccatgctcaaaaatgtttttcaacttaaattcatccataagtcttgcaaacttatctcctgcacgatggaacccaatttcaatgtatagatgatgctttaactctttggttagcgagtagctcaagaaaggatcatgttcgctcaaactgattttacaagggatcattagcccagaattgctgataacaaagtatacatcaatattagtctccttgctctttctatgagtcttatgatttcatgataactggatatcaggaggaacttgcaaattcaattaaattctaattcctaaccacactggtgtttgtagttcattttttttgttgcacactgcatgtatatgatatgttatagtattttctgcttaatgtgtatgttcaggagatcgatatttgcggcc

SEQ ID NO: 10716 - DNA, 6897 bp, Vitis vinifera
  Intron number 1 from transcript GSVIVT01026245001 (locus G SVIVG01026245001) derived from phytozome v7.0 (chr-ID chr1 0; pos 14771015 to 14777911 reverse strand)
gccttcctgtttcagaaatttcaagaggtattcttgatattaatctcttctatagtttctctgttggttggattacgaatttcatagtaaaatgtttcccggaaagacaatttcgggaacatagagtttctccaacctcactgtcaagttctcattgagatcagtggaattattttttaggagaataatttactccggagacaagtgagaacaatggattatgggtattgaattctttgggctctatgtggatctcagggaacaatttgaaaaattagaggaaagtgctgacaatgggttaacgttgcattctcttgctcaagctatgtttttttgttttttgtttttttttgtttttcttatgaagtttaagggaatttatttgtttctgtttgggatgaatcaaattatctcgagaatagagagtgcatattcatttatgatttatggatttgagattttattgggttatcttcagttaggtgtttagtaaagaatatctttacgctctctttggttcctgagaaaaggcaggaaaagaaatgagacatggaaattttgaatttaaaagtttattcttgtttgcaagctataacaaataaaacccaagattgaaagcttttctcgtctccccctctttttatttccttttctcagaagaaaagagtagtgctaggaaaatagggaatatcatttgggattttggatctcaaaatttgctcccaagtgtgatgctcattgatgttttttttggttctgatacaagagagatgaaggagcccattgatttaattgtaattcatgttgtactatgaatgtaattactcatgcctcatggcataatatgctatcaatgagacatgcatatccacctattttcccaaaatgtggcatcagaactagatcataggaattctcttcctctcaatttggtggattctgtgttttaattgattctgagagacaacgagggaaaggaaaatgcttaatactggatttattgtcggttgtcctactaaatgagctgttgatcttttttttttttttttttttttttccatgagctaacttttttaatgtaacatttgaataccaggataattaatgctatttttccaccaaattgaataaacttcaataacaaaatttaagaagttcttgtgcattttaggtgaataggtgatatttgaaatattcatatctacttttttaggtctggtaacacttttcaatttaaggtgtcccttgttagaaggactttcttaaggaagtctctctacttttgtgctccttatgttggacttaattatgtgtcagttggtgataagacttctgatcataacttttaggaggttattattgagagggttatttggaaaatccattctctggatagagtgttgcagactactgtaatggatatatgtgtgtatatgtataacttagtgtatcttgtgaaaattgggactcacaaatgatctaatcactccctaaaatttgcctctctaaggcaaatgtcaaccctaatgtttttctttataaaaagggaaaaaagtgtttcctggtttaagaataaaacacttttgggtgatatagagtttgtgtgggtgctccaaatgaagatgaagggaatcagtgggctcttgcatcataataatcctctttatgttgtgtgggcaaaatttctaaaatattgattctttacaccttcgtaatgggtcatgtggtttcacattagatgcgtgtgtgtgtgtgtggaaggcacatcaaggcagtgtgtctctccatagaaggtccattttctttgataggtaaataaagggcttgcattagaaacacttaaaagcggcaaaaacagtatacacgaagtatacaaactacgcctaaaaaaacttgacaataaggagacaaaaaaaaggccttccccttacttggcaaacggccactttgtaaagttgatcatagacaaagtttgttattctatatacaccctaacccaattcacaaaagtatataggaaaaaagacttaatagcttggttagatcgctcaacatcattgaaagctcttccattcctttcctttcataaagtccacattaagcataagagggctgccctccacgccttgttccttttttacctacaaaagactcgtgtcagtatagcagattcctcctaattgaggaatgcataatccactacacaccaaaaagggtgtagatcaaattccacaacattctagccttgccacaaaacaggattagtttcctcttcttctttgcattagtagcacccatttaggatattccatcccatccttttctgttgttcgatagttattattatgttccaagacgcttcccaagcaaaaaaactcactctcactggaacccaagacctccaaataatactccatggaaaaggatctctagaagcccttgtgtaggagtgataaaaggatctaactaaaaatatgacattcttactttctcttcagctcaaaatattctccacttctcttttcactaccaagggttgtagttttcaaaacaaggactccacttgtcccatcgcccaatcattaagatgtcttgaaaagcgaggactccaactacccaaatccctgccctcctcccaaatttctgtgacccaaccatctttcttaactgctaatagaaataagttagtgaaagtttctttcaaagtttggtcatcacaccacaaatatttccaatacttaacccttcttccacttcctactataaagcaggatctacatcttataccctcccattcatttcaggtggctttccacacccctacaccatagcgacctctcactcctcttgaacaccaccccctatcctctaccccaaacttcctgatgatgatttggttccaaatgggctccctttcttctgcaaatctccaactccacttcttgaacaaagttttgtttagggccacaaaattatgaatttctaggcttccctctatcttatgcgtgcaaactaaattccaattcaccaaatgaggccttttctctagggcaccactgccccataaaaaattcctttggatcttttcgattcttgcacacacctttctaggaatagcaaaaagggacatgaaataaatcagaagacttgataaggtgcttttgatcaaggtaagcctccccccctaattgtctcttccacattgttaatcattttctgaatctcttttccactacatcctaaacccttggagatttaaaagaggcacccaagtaagaagtgggaagcttccctactcttacactccatcaccgaagcaacatccttcaaagtctgtacccttcctatgagaataacctcacttttatccatattcacttttaacttagaaagcgcctcaaaccacataaatacccaactcaaatatttcattcgctcattattggcctcacaaaagattagtgtgtcattggcaaacagaagataggacatatccctcccctctccacttcttcttcctaccttaaacctagaaatgaagtccccgcatttgactctgaacaacaactgactaagagcctcatgaccaaaatgaacagatagggagataacttatcaccttgtctcaagcccttagagttgtggaaaaagctcgaaggagttccattgatgagaattgaaaagctagttgtggaaatacaccaattgatccaactaatcaacctttgctcaaaccccattttagacattattggtagaaggaaatcctagttaacatgatcataagccttctcaatgcccatttttagaagaagaccgaggatattactctttaacctagaatcaacagtctcactagcaatgagcacaacatccaaaatttgtctaccttgaataaaggcatgctaattctctaaaaccacctcccctattgctgtcttcatcctgttttccaatactttggcaaacaacttgtacaatcccccaaccaaattgattagtctaaagtctttaaagtcttcaactccctttttttttatatgtacttattttttaaatcaaaaccaaaaaggtggaattaaggcttccttggaacatgccatgaggaaagaactctccaaagaaagccataattggtttggtaaaatcccaacaaacattctagaaagtcatggtaaaaccgtctgggcctggagctttgtcaccaaagctttgtcaccaaagagactactcaaggcttcaaaaacttcctcctcttaaaaaagcacctctagacttctggacttatctttttccaacacttcgaagtgtaaatcccttatgtttgatctccaatccctcgtttttgaaaaaagagtttggtaagaactacacaccctaaccttaatctcttcatcatcagtcagtataatcccattgattctcaccttggttagcaaattccttcttgcacgtgcattgaccatcttgtgaaaaaacttggtattcttgtcttcctcccttaactagatttcccttgatttttgtcttcatgaagtttcttccaataaaacccacttcttataatcctccaaggctccctttctagcctctgcctcctcaagagaaagaggacaatctctccccttaaagtcctagaattgaacatgagaaaaggcttctaatttgctaaaggagacattgccaaaaacttctttgttccacactataagatcctttttaagagtctttaatttctcagcaaggcaatgactactagtacctataaccatatacccaatccaccagtttctcactagcttctgacccctttgtcaagagccatatattctcaaatataaagggggtcttgtcctttttcccccctccacccttgagaataatgggacagtgatcaaaagccatcctaggaagagtaaattgagaaatacccgaaaaatggtcttcccactcattagagactaagaagttgtccaacttgaagttgcttgagaatttaaaccactgcaccacgtgaactgacctctagaaaaagaaaggtccttcaaccttaactcctcaatgacatttgagaacctccttatatttgttgtgaatatgaaatcattccttctttcccctggaaatctaacaaagttgaaatccccttttacgcaccagggatcatcccatagacctctaatagctcccaattctccctagaaatcctctttttccctcgataagattggaccatagactcttgtgaacatccatacaaaaccatcttcaacattcttaaaacgactaaatatggagaaccctccacactctaactctagcagatccaaaactctactatcccaacaaatcaaaatgcctcttgatgctcctcttgcatcaactacaccccagctcaaaaaccttccgacacccaagcttcttaccaccttcaatgacaactcttgcaccttaatctcaagaaagcaaatcagatctgccttctgggtcctaaccacaaacttgatcaacttccttttctcaccatcgttgagccctcttacattctatgaaaggattttaatcttcatcaatcaacaggaactagttcctaattgttctcgccactcctagatgagagaaaagaacctccataactaaccgaacaatccaatctccttagcttccttttgaaatgagaagatgacaaaggtttcttcctccgccctttacttggggtcccacattgagccttcttccttaactttctcaacaaagaccagatttcttcttcaaaccctcaatttgcattcccaaaaatctgctaaattcagtaagcttggtgaagtctttgtttgaaaggggatcctcaccaaccaggccgccggaactcccctcttagttgagactgaagctgcgttaccccccaacacaaccctactttcttgaatgggagaaaaattctttgggaagacagctgctgaaccgtcttgaaaaaccattgacagaggccccttcactgtgtcagccacaatttctgatgctccccctcccggctcagaaaaaacttcccctccctgctcaatacccatggtccttctgcagtctccacagaaggtcctctaaatggaggttgttgatttgacccaacagtctccattgtaccattccggtagattgaccctattcaaaagaagatgataatataaacccttcatcatttggggaaggaaaggaaaacccatactagataggtggagttcttatacagtcttgtaagttgtaatgaaaaaaaaaagggcaatttaaggctgctggtgattgtgcagttaaacaatgatatagtgtactggatgaagatgagtagaagttgtggagagctttttaaatgttaagagtacaaaaggagctttgagattatagaatgaagatttttgaaaatcctaatattctcttattcatttttctattttcttgttgtctcttgctgtctttctctcaattttaataatcttcatttttcaaaaaactttagtcccttacttttttctcttttttttgttaaaaagatatggccaggattttggaacagatatcaaaatcttgaaaattctggtacttaaatttatggcacctgttgagacttggacctacacatggatggattctggttattggattcctaatgccttgatattcaccctaccaatgacccacaaattgggggttctcaaattcttctgatgcttccaataaaagcaacttacaatagaagttctttctagattctgttagctcttgcattctctactgttttacataactgcttttcgtctcaagtgcttccttacgaggattttctgtttgtccattgcacttccaggctgtgaagactcttgccaaaagtcctgtatttgc

SEQ ID NO: 10717 - DNA, 2089 bp, Vitis vinifera
  Intron number 6 from transcript GSVIVT01008093001 (locus G SVIVG01008093001) derived from phytozome v7.0 (chr-ID chr1 7; pos 5835254 to 5837342 reverse strand)
tgaaccatactgttgaaggatttcctttgaaagatgtaagtgctaatatattgaatgattacttatcatatcattaaataaaaagctactgatacaaatggcatgggactattttcttgtatttaactttgggaaatgcttataggccttaacttattattgtgaaaaccgttgcttctcattgagaaaataaaagattgcacattgtctatgaaccccacaagatgggtacgttgtttatgaatcccacacaatgggttataatggtcatcaacctgaaaattcagttggttgatttccttcctcctgcccccctcctctcccctctttctggaaatgggttatttctaatagagaagaccaagaggaaattttaattgcttgatttgttaaatattttataaatgccaacccgattcctatatattaattgtttgcctataatacataaaaaaataaaaaaataaaagaaggaaaaagaaagaaaaaaaaccaacctaattccattgcaagatttgaaagaaaaaggcaaactgctttctacatgtaacattttgcaagatttaaaggttcggaaaatgaagtagatcattgttgattttcaaatttcagaacttttgctgaactatttttgttgagcctcttattgaaacaaaagattgacatcttatttttgtgattatggtttaaatgctattttgcgttatgctcaacttaatagttgtatggaatcataactatgaatcccttattcatgttttataatatcattttaacttcccacaagcaatttatgatctaaggttgtcttattgcagataattaatgtaacgtttgtttagagattatcaatatttcatcattgacaggatttgaagcatttcctccaattttcccccaaatgcaaagtgaaattcttaatcataacttcctatgatattcagttccatgttcaccattcgaaatgatggtttttccacaaatgtggtatttggatccttttttggaaaatgatggaccacagctttgccatatttgttgtattgtctctttttgtagatttttgtcatcagcaaagccatgtccatgtcctttcatcttttttattctagttcactgactacaatcttgtctccaccatagcatgtgattatgaatgtttgtggtccagccacttgaatctttttcttgataagtaaattggtagattttataaatataaaaaaacgatgctatacactaaggtacacaagatggcatatacaatcgggtaccaaaaagcgctgccataaaaggtagccacttgaatcatgttttgccatttctctctatgtggcatcgtattctgttttaaataatagttcattcagatccttcttgcttcctcttaacacttcattttcagccttccaattatttttcaagaactttgaacctgaacagtcaactacttacccatgcagcatggccatgccatatgatcacatcacctgttggtgcaatcagttattctcaagaaaacattgttctattctaaccttgtcatgtgtcttccctgaacatcctgcttccagttgccctcactctgcagccatgttaaacatattggttttttcaagttcagtattaccattttgattgtatattcttcctaaatgaaacttaaaataatggatttgggtagagaacatcctgcttccagttgccttcactcttgaatgtgttggggtaagtttaggaaaagagcttatggtttaaaaaggagcttaatgccaagatactgttgtttcttgtagaagttctcttttaacttatataggaagttatttcatgttcattgaactccaatcatactatggttgcctctttaaaattatggcttctgtttcttattaaagcaaaaagtaagctttcccaaaggaggcatgaaccaagagagaaatatataggaagacaatattttgatagagggtttatatttgccataaacattgttggtataaaggttttaatagagggtgtatactgcattattcttcaaagttctaactagtcaatatggtgcatcagcttggggtacagacatttg

SEQ ID NO: 10718 - DNA, 7387 bp, Vitis vinifera
  Intron number 1 from transcript GSVIVT01029489001 (locus G SVIVG01029489001) derived from phytozome v7.0 (chr-ID chr9 ; pos 22331579 to 22338965 reverse strand)
ccacacctcttcacaagcccattagactaaggaaagtgggctagttaataaacccactaaagatgttcctctttttcctatgtgggacaagcaaaaaaaaagcacttttcacatttacactcttcctacaatcattggctccttgaatgaatattctggtagaggaaagatcctttggaatagcattgttgtggacctatatttttcatgtgcgtcctcactcaatgatgactcgttttttagtgaaaaactaatttttttttaaaaggtggagtcaccacttattttatttttaaaaaaaatggaaaacaaaataagaaataaaaccctaagagtggctaaaaaacgtgtttttgaaaacccaagtttaagtccaagagccaggttacctattaggaatgtatcatacgataacacccctttaaggcctaaataaaggtatctactaatgagttgagacaactatgacaattgatttgtaaattagtggatatcaaagaaataagtaatgcacaatcaagacaatggtgaaatcataatttgcatcactcaaatgaaccatgcattaaaaaaaaggaaaagtcatctaaccttacaccaactaaaaaaaaaaaagagattttggaactttacttttttctttttaattttggtgtaaaatgggaaaaaaatattgtttattcatgcactccaatagagctttcaaatttgttccacaattaccttcaaaagtaaataataaagtacacaccaatttaataccacatgttaacaagtacatgtgtaatttatttttattatttttctcacatcaatatatctccctgaccacttgccacatttccacttttttcttttttttctttttttttttcctctccagccaccataatccattgtcacctattatagtttttattattatttttctttttttcctttatattctttttaatatgctcatgcattttctcataaaacttctttaattttaatttatttttactctctaatttgcctatatttattgattttaattattattttttgacatattaaacttaaaatgatattatataataaataattaatataataaattaaataaaaacaaaatatataatggacaaaaatgaaaatattatcccacaaataataatgattttaagtattagttataataatacattttataaattaaggtttaaatttaaaaattccatgttattatttagaagtttatgatataagattttttattttaatactaaacaacagattcatttattttgtaaattctatcacatgtaatagtaaaaatatcattgcaatattattttattatttacattatttttctttttattttcattttaaatttatcatatcaaaatcacaataagtaatggtgcttttatcatttttcttatgattttaaattgattgtggatctaacttttttttggttaaaatctttaatttttaattaaaataaaatataaaagaaaatatatttttcataaaaaaatgtatttaaccttttatattaatttcataaaaaataggtacatccttaaaaaaaaaaaagtaaattaatgcttaggagaactagaaatactatcatacttatcatggtatatatattctttttgggaccctcgataagtaattggaggtctttgcccaccccaaaaagaactttgggatcctaggtatatccattcttagaggaactaagacccatattttcattttcatgattcatatattcatttggggacccttgagaaggaattagaggttattccccaccctaaaacaaacattgggacccaaggtacatcctaaagacaatttggtacatcatttacaaaatttggtacatatttcataaaatttggcacatccttaaaacaatttgtacatataatccatgagctactaggacctctatattattactcatagttcgtttatttctttagggatttttaggaagtaattagaggtcgttccctacttcgaaacgaactatggaaccctaggtacatccttaaggaaatttggtacatcgttaagaaatttggtacatccaatcctcgggctatcgagacccctatctattttcccatggtccatattatcctttgaggacccttaggtagtgattgaaggtcattccccacatcagaacgaactttggcactctcggtacatcttttacaaaatttggtacattcttaaaaatatttggtacatacttgagctattgaaacctctatcttattacccatggtctgtttattcctttagggatctttgggaagtgattggagatcattccctactccgaaatggactttggaaccccaggtgcaccattgagaaaatttgatacatccaattcttgagctaacgagacacttatctccatttccatagtccatttcttcatttgaagaccctcgagaagttattgaaggtcgttccacacctcataacagactttggcaacattggtacatcctttacgaaatttggtacatcatttacaaaatttggtacatcattcacaaaatttggtagatcattcacaaaatttggtacattatgaaggatgtaccaaattttgtgaagaatgtaccaagggttccaaagtgcattccgaggtggggatcggatcccaatcacttccttatgggttccaaaatgaaatcatgtaccatccatgttcagatgggggacctagaaacaataggatcggatgtaccaaattttgtgaagaacgtaccacgcattccaaagtgcattctgaggtggggatcatccctcaaccacttccttatgagttccaaaatgaaattatggaccatccatgttcagatgggggtcccgaaaacaatagaatcggatgtaccaaattttgtgaaagatgtaccaagggttccaaactgcgttctgaggtgggaatcgacccccaatcactttcttataggttccaaaatgatatcatggaccatccatgttcagatggggaacctagaagcaataggattggatgtaccaaatttaatgaaggatgtatcaaattttgttaaggatgtaccaagggttccaaaatgaaatcatggaccatccatgttcagatgggggtcctaaaagcaatacgattagatgtaccaaattttgtgaaggatgtaccaagggttccaaagtgcgttctgaggtggggatcgacccccaatcacttccttatgggttccaaaatgaaatcatggaccatctatgttcagatggaggacccggaaacaataggatcgaatgtaccaaattaataaaggatgtaccaaattttgtgaaggatgtaccaagcgttccaaagtgtgttctgaggtggggattgactcccaatcaattccttatgaattccaaaatgaaatcatggaccatccatattcagatgggggttccgaaaacaataagatcagatgtaccgcatttaatgaagaatgtaccaagggtttcaaagtgcatatggaggtggggatcgatctccaatcacttatgggttctaaaatgaaatcatggactatccatgttcagatggaagacctggaagcaaaaggatcggatgtaccaaatttaattaaggatgtaccaaattttgtgaaggatgtaccaagggttccaaactgcgttccgaggtggggatcgacccccaatcacttccttatgggtttcaaaatgaaatcatggaccatccatgttcagatgggggacccgaaagcaataggatcggatgtaccaaatttaatgaaggatgtaccaaattttgtgaatgatgtaccaagggttccaaattgcgttctaaggtggagatcggcccccaattacttttttatgggttccaaaatgaaatcatggactatccatgttcagatgggagacccagaagcaataggattggaatgtaccaaatttaatgaagaatgtaccaaattttgtgaaaaatgtaccaaaatctgtgaaggatgtaccaagggttccaaactgcgtttcgaggtgggaatcgacccccaatcacttccttatgggttccaaaatgaaatcatggaccatccatgttcagatgggggacccgaaagcaataggatcggatgtaccaaatttaatgaatgatgtaccaaattttgtgaaagatgtactaagggttccaaactgcattccgaggtagggatgggcccccaaccacttccttatgggttctaaaatgaaatcatggaccatccatgttcagatgggggtcccggaagtaataggatcggatgtactaaatttaatgaaggatgtaccaaattttgtgaaggatgtaccaaaggttccaaagtgcattccgaggtggggattggcccccaatcacttccttataggttccaaaatgaaatcatggaccatccatgttcagatgagggacctggaaacaataggatcagatgtatcaaatttaatgaagcatgtaccatatgcagtatgcaaaccaggggcacacccttgattttagaagcatgcctattactgaaaccattatatttgtaggctttgtgcactagtcaacctaagagcacaaccttcatggaagacgcatgaatgtgggtgaaaaatttatttttgttaagctatgtgcagtaggaaaaaaatagacataactctctgtcagaggcatgaatttaggatgacttgctttaaggtatgggttgggcaataaggcaaatggaggcatgctgatagcttgaaaggttggcccttgacgttcatatgaaataagtagtggaaataattccttgttgatttaaaatcatatattttttgaaagattttttttttaaaaaatatttattatttttaaaatttttaattgttatttaattttttttattttaaatctatattatcattttattttatattatctttttatttttaactactttttttatttagctcattacaggaaactagctagtatattttgtttcattcacataaatttcaatttgcattataaaatggtaccggttgaatctctgtaccaaaaatttggtacatctaatccttgagctaccgggacccctatcttattacccatggtccgttaattcctttaaggatctttggaaagtgattggaggttgttccctactttgaaacagactttggaaccctaggtacattcttaagaaaatttgatacatccaattcttgagctaacgggacacctaacttccttcccatggttcatttatttcattgaacaaccttagaaaatgattagaggtcgttcccttcttcgaaacaaactttggcccctttggtacattctttacaaaatttggcacatcattaaaaaaatttggtacatccaatccttgagctaacaaaacctctatcttattacccatggtttgtttattcctttagggatctttgagaagtgattggagatcgttccctacttcgaacaaactttggaaccctaggtacatttttagaccctccattttgtccttttagcacatgtccttaagttcaattccagtgctccacaatagttccttggtggcccattgctactcatactgcttacctttttttttagccactttggggactttggttgaagggtttatctagctcgacattatgaccttagctgcccatcaagtttagattagacttcacttaggtgcactttaggttagacttagttaagcccgcccagtctcaccctaggcccgtataggcataccccgacccattaggcaccaccttaggcacttttagactcactttttatatgacttgcatgattcacatagccgcatgacttgcatatcccgcataggattgaccattctattttattttattttattttgttattttgttttactttatttatttattttattttactttattcctttatatgttgcaagattgctagcttttttttggttttattctttttattttctttttttattgtttgacaagagaattgggggttgctaatcaactctcactaagcacgtgcacttaaagaaggtaagaaaaatatttttggagggaaaagaggattaatatggttgcatacatatggaaagaggagatcccacatagaaaggagaaacattctaattttcaaaaatgaagggaaataaaagaaatgaaagtggaattccttcagcagattgagtttttgagaggttgatacaaatacaaaaaaataaggattttggaaaaaaaggtgagggaacaaacgagtgagaaaaaaaaaagaggggaagaagaaaaaagaggattcacgaagtttttttttctttttggggagattttgggggaaaagcacaaaggagcaagaaatgagcaattgcagccgagtttgtccaagtatgtttcttgttactcttggaattcttacccttattcgatttctctgtatgttcgtttttgaatatttaatatactgttgattggtgtggacaaaaaatgccacaaattgttttgttgatattggttgcttgcttgtttgccccaaatctgtttgtgatcttccccactagcctgagcccattgaaagatcatgaaatgtggttttatctgatttctatcctgcatatttgttatctccttgttttctctattctccactacacttgtttttgcttttgctcctacccgtcatatggtcgtcaactcttcatatgggggtgactccaaggtttgggcattgatagctgccacgttttctgctgatgcttttggtctggccattgctgtagaaactgttatcataatatgggatccaaagaagattgtccaagtggcttgtcggctgcttatgcacttactaagcttggttacagtaatgtaaatttgtgggttgatgtggggattagagatgaggtttctcagaatttgtcatttcagagtatgtacactaaggggaggtcgaggagcatggaagatgtttgaagaaatgccaatgagaaggaatgtagttttccagtctataatgataaaagtgtatgggaaacaaggaacaaacatgagttcatttgtctctgaacagaatggagaatgtgttgatgagaaatcagaaagaaaacatgttgttggtcatcgttttggtggatcacttcctcatgaggagtaacccgcaactaccattcatgaacctgaaaggggagtgcagtccaatgagtgtaaaaaaaaaaggagttgaagtggacggaacaaaagagcaacatagttgattatatatactgggtggtagtctaaccatttaatcatcaattatctatggcaggaaatcactggagccttc

SEQ ID NO: 10719 - DNA, 4958 bp, Vitis vinifera
  Intron number 1 from transcript GSVIVT01021362001 (locus G SVIVG01021362001) derived from phytozome v7.0 (chr-ID chr1 0; pos 4441309 to 4446266 reverse strand)
tgcactacgcttgcaaagagtggggtttcttccaggtatggaaccaatttacttgtataaaatcacgaccaaactgcacacttaaaagcaaagatgttgagagttatgccttagtagctgctgagggaaaggctgaaatcgtcaaccacatgcaattgaagtcaacaagattactagaatgctgaagctatttttatgtttttgtttttgctgttgctatttttatgttttttgcttttaagttaaattctgatgctattttgtaggaggtagttgtttgttcaacaagtagcttaatttgatgctttttttgaggtcatatctgttacacaatctgtataaattcagccttatgatcaaataaaaagatcagatcagtagcagcatatctctgttctctgttgcttggtgtgttaacctcccctgtttccaacagtttggtatcagagcatttttgtcttgagggaccagtgaggtgtgtgagcctaaacactgtatatcaaacctgtatctgaaaaccttctgaaaaccttgcagaaatggaagaagcaagcttcatagcagcaccaccagtcttcaatagagaaaattaccaaacttgggctatcaggatgactgttcatctacaggctcttgatgtctgggaagcaatagaggaagattatgaaatttctccacttggagccaatccaactgtggcacagatgaaaaaccataaggagaaaaagacgaggaaggccaaggccaaggcttgcttattttctgcagtctcaccattaattctcaccagaatcatgcaacttgaatctgctgcagaaatctagaagcatctacgggaagaatatcaaggcaatgaaagagtcagaaatatgcaggtgatgaatctaattcgagaatttgaaatggtgaggatgaaggagtctcaaaccataaaagattatgcagaacaacttcttaccatagcaaacaaggtgaggttgctaggtaaagagttttctgatgaaagagttgttcaaaaattttttgtcacacttcctgaaaaatatgaagctacaatttcttttttggaaaacacaaaagatttgtcaagtatcaccttggcagaactactaaatgctttacaagctttggaacaaagaagactcatgaggtaaggaagttctgtagaaggagcttttcaagcaaagacacagaccaatgaaggcaacacaagaaggatgaagaacaaaaagaacaacaataagctaagcaacaacaacaataaaaaaactggaacctatccaccccgtccttattgcaagaaaacaaatcatcctcaacaaaaatgttggtggagaccagatgtgaaatgcaacaaatgtggtagacagggacacatataaaggatctgtagaattcaacagcagcagggagaaaccaatgtagcagctgaacaataccaggaggagcaactattttcagcaacatgttttgcaaacagaagcacctctgaaagctggctcgtggatagtggttgcacaaaccacatgacatatgatcaagatctctttagggagattgataggacagctatttccaaagtcagaattggaaatggtgagtatattccagtaaaaggtaaaggaacagtagctattgaaagcctaacaggtttaaagctcatttctgatgttttgtttgtgcctgacattgaccaaaatctgctaagtgttggacagcttgttgagaagggtttaaagtttgttttgaagacaaaaattgcataatcaaggatgctgaaggcagagaggtgttcaacataaaaatgaaaggcaaaagttttgccttgaatatgttagaagatgagcaaattgctgctgcacaacatgagaacaatacaatgctttggcataaaagattagggcatttccaccacaatgccgtgctctacatgaagaagaatcagattgtagaaggactccctgatttggaagaagaacttcctatatgtgcagcctgtcaatatgggaagcaaacaagacttccttttcctcaaaaagcagcatggaaatcaacacagaaactacaattggttcacacagatgttagtggacctcaaaagacaccatatttgaaagtgagtaagtactatattgcatttattaatgacttcacaagattttgttggatttattttctcacttacaaatctgaggttgctgatgtgtttttgagatataaagccatggttgaaaatcaaagtgaatacagaatcaaggttataaggtcggataatggtacagaatatacttcagaaaaattcaacaaattttgtgaagatgcaggcatagatcaccagctcactacaccatacaccccacaacaaaatggggtggtggaaagaaaaaatagaacaataatggagatgacaagatgtcttttgcatgagaaagagctgccaaaaagtttctgggctgaagctgcaaatacaacagtatttttgctaaatagactaccaacaaaagcattgcaaaaacagacaccttttgaggcctggtttggttataagcctatgctaatgaatttaaagacctttggttgctagtgtttatcttatgttccttaggtgaaaagagacaagttagataaaaagtcagaaccaggaattttcattggatacagcagcacctcaaaagcttacagaatctacttgccacaaaataataaaattgtggtaagtagagatgttaagtttttggaaacggagaaatggagctgggatgagcagaatcagctatatattgatgaagatgttgatgaacttccagttagaggtttcaggacactttttgatatttatcaaaggtgtaatatagctgttcttgaacctgcagggttttttgaaactgctgaaaataaaagatggagggttgcaatgtaggaggagctaaatatgattgacaagaacaacacttgggagctagtagatagaccttcacacaaaaaacctattggggttaagtgggtttacagaaccaaactcaactctgatggttctataaacaagcataaagcaaggctggttgtcaaagggtatgcacaaatgtttggtgttgacttttcggaaacctttgcaccagtagctcgtttggatacaatcaggatgttgttggctcttgcagctcaaagaaaatggaagatttatcaactagatgtgaagtcagcatttttgaatggctacctggaggaagagatttttgtcgaacaactagaaggttttgctatcaaaggaaaagaagaaaaagtataccttcttaagaaggccttgtatgggttaagacaagcccctagagcctggtacagcaggattgacactcacctgctaactttaggctttcacaagagcttaagtgaatttacactctacattaagaagattgaagaagatatattaattgtttctctatatgttgatgatttgcttgtaacaggaagtaatgcagggtttgtgaacaaattcaaggctgaaatgaagcaggtctttgagatgacagacctaggtgagatgtcttacttcttgggaatggaagtacaccagaagcagaatgagattttcatctgccaacaaaaatatgccaaagaaattctgaagaaattcaaaatggaggaatgcaaatctacatctacccctatgaaccagaaagagaagttctgtaaggaggatggtgctgaaaaggtagatgaaggactttatcgaagcatgattggatgcttaatgtacttgactgcaacaagacccgatataatgcatgttgtaagtctactttcgagatacatgcattgtgctagtgaaattcatttccaagcagcaaagcgtgtgataagatatgttaaaggcattgtggattatggcattaagttcagtcaagttcaaagtttcaattttcatggattttctgatagtgattgggctggttgtgttgacgatatgagaagtactttaggctattgttttagctttggttctggtgttttttcatggagttcaaggaagcaagaagtcgtggctcattccacagctgaggcagagtatattgttgctgttgcagctgtaaatcaagccttatggcttagaaagttgttgacagatttagatatgaagcaagaagtaagtacaaaggtgtttgtagacaaccaggccactatatctattgcaaatgatccagtttttcatggtaaaacaaagcacttcaagattaaattgtattttctgagggaagtacagaaagaaggagatatacagctagtctactgcaatacagaaagtcagaatgcagatattctgactaaagctcttccgaaaataagatttgagtttctacgagaaagacttggagtttgcagctcctaagtcaaggaggagtgttgagagttatgccttagtagctgctgagggaaaggctgaaatcgtcaaccacatgcagttgaagtcaacaagattactagaatgctgaagctatttttatgtttttgtttttgctgttgctatttttatgttttttgcttttaagttaaattctgatgctattttgtaggaggtagttgtttgttcaacaagtagcttaatttgatgctttttttgaggtcatatctgttacacaatctgtataaattcagccttatgatcaaataaaaagatcagatcagtagcagcatatctctgttctctgttgcttggtgtgttaacctcccctgtttccaacaaaagaaaaaaaactggagaaggggggatggtggtatgcactttagagtactgcatgaaggaacaaattttacataattaaataataagacattagataattctatgaatttataattgtttattctcatttgctttaagtatataattaattcaaaagatcataataactttaagtaaataataacataaatgtattcattgcagttgacaaatc

SEQ ID NO: 10720 - DNA, 5168 bp, Vitis vinifera
  Intron number 1 from transcript GSVIVT01031523001 (locus G SVIVG01031523001) derived from phytozome v7.0 (chr-ID chr6 ; pos 17682118 to 17687285)
agggctttccgatttggcttcgtcttcttcttttggtaaatcttttgatttcagctgaggcttctccttcaccttgtcatcttctttttcttttcaaaagtttagaagctaacagttttgttcagtggaataaatcaagagaactttgagtttttaccccaattttgggtttttgttgatttcgccccacaattttggatgagttaattaagttttgataattttatgtttaattctgttaattctttggctgcatttttgggtttgcgttttgtgggtgtgtattatttgctttctgtgtttggtggctgagaaaacgtgggaaaaagataatcagtactttgaatcttacactttgtagttggaaaatgtacttgcctatctcaaagtattgtaataggcacagttcagtcgaacgttcttgttttcagtttttctttttctttttctttttcttttttttttcttttcctacaagttctagtagccaaacagagcacaattgattgttgggatccatttgttttttggtaattctaatgaagtgtaggagttgtctctttcaaggccctggttggatgttggtaaaaaaattagggaaaggaaaacaaatttcaaaactaaggcactgttttctctggaacaaaaaaacaagaaaatgtgattagcaaccagaaaattgaaaatcttaaaaaatggaaaacatagcgtttatagggaatatattttagttgttttcgcttgttttgtaagagctgttttaaaaaataattctacaaatatgaagaatgattaacaataaagcactgcatagaaaggttattctaaaaatagatttaaaaacataaaaaatggttttaaaatatttcaggttctcaaacagacatttgttttacaaaatgttagagaagagttttaaaagattgtttcaaaaaactgtttaaaaaaatagttatcaaatagggcctaagttgttttacaggattttcccccatgttcgtgtttatgttatagatagaaagttcagttcttaaaattctcatattgttgtgtttgatgatttaagaactagtggtggaatgtaaaatagatttaaatggaaacccaaatgcagaaatgatgggagaaagttgtggaactgaagtgataaataataatgacaaagagatcctttaatatatagaatataaagaacataaagaatataaaaaaattatattgttcttttgcctattaaaaagaaaaaaaagaatatgaagaattttggaaaaataactgtctattcattgatttgaaatagaagagttcatcattttgacaaatgcataatcaaattgtattaattgactcatcttactaacatattaaaggtcttatgggcaaaattgcacatataaaaaataaaattaaatgacatcaagtataattcgtctaaatatgatggtacttgtctttctttaacattggagtagtcatttttttactggctgaaccaatatccttacttgggtccataggtgtctagagatatgccttttgtctcacctaataagccatacccaatatttagattgggttaacttcattttcttccatgctttttgattactcattaagtttagatgtcttcagcacagcaactacagggaataattggccccattgaataaaaaggagcttgatcagtgtaagcataaatagaggcaaccttgaagtgagtcaggttaccaaggtgacaaaaatttttattacacaaactttttttttttgataggtaaataaagcaaatatgcctatcaaaactattaactagcattagtttaatgatctataaaactattctgtgttgatgcatatgtttcttgcttccaaaaggaaagtagggtgggaatagaatttagtataagtgaataatatttatatattatgaatgatattatgtgaagttgaatattgttgttttatttataataatatttatattttacaaataatgctatagtataagtgaatattgttatgttttgaatattgttattttgtttataataatatttatattttataaataatactataatgtaagttaaaattgttcttgataggtaaatttttgtccccattgggacttgaatttggaaccacccacaaacccttcccatcccttgagtataatataagttaatattgttatgttaaacattaaacttgttctccagttagttgcttagattatctcttttccttgactagtttctcctattatgtttacttcttcttacccttgatattattacatgtcaactatataagtaatgcatggatgaaaccttaatctcccattcaagtatctttgcatgacaagtgtgtccgatcatatgctaaagataggtaagttgtaaatttgtgaaaatggttttctcattaggccaaattcaagttgacaacttatgtgtatagtatgtgatcggtgacttgtttgcacattatgtttgaattgtcagtttggacattttaggaattccgactaccatctctataaagttatttgcttgtactttgtccatatagagaaattttgaaaattgttcctcttgttcaatgggtgcttatttagacaaggtgacatattgttagttatttagttaagctaactaatagagtgtttatgtctcggtcaagttgtatacttggagaattatgggaaaatgctgctagaggtttttgaaaacaaagctaagcaccagcaattaactcttttaagtgttatgtacttctaaatgagatgggaaccaccacttgatttaaggcagaaggcatagcatacacattataggctgacatccacatttgttctattgtgattcaagggcatggttggctaggaactaatccaaaaaaaaccaatttatctaataaataagagttgaatatgacaatgaagttttggagtccttaaaaattgccttcaaccatgtactgtgtaaagatgagactttcatgttcttataagtttgggagagcagcttcccttgcattttttggacaatttggaaggaaagaaaccagagaatgtttgaaaataaggagcagttggttctagccctaaaacacttatttcttagcaattgtgttttgtgggttagcttgtagattgaaaagggctcaatctctcttttttattttgtagattgggtgggttttggttgagggagaacagattgtttttttttgttgctgtttctctgattggtagtgccttctgggcctgtatgctagggggttatagcatttattttttgttatttataatgttcgccttcttacttatcaaaaaatcttaaaacattcttaaaaaaaatgaaaattacaagatatatatatatatatatatataattaggtagacttaatttttttttttaaataatcttttatcatacataacattatttaaacaatgataaaagtatgtgtttagattgatatattataatattaaaataaaaaaaaatcttttatttaattactttgtgctaaatttaattaattatgctttttttttaaaaaattaatcattacttttgatttaaggttgacatgagtaattactaatttcctaatatctccatttcatccttgcatagaagattgaacacaacaaagaattagccatggatctagctgtagcaaaccatgtgcattgctcatctccttcaaatcttctccattttcattctctctctccctaactccattgcccttctctctacatcaccccctttttcatcattaggatgcttaggcttaaagtcatctcagggtcatcacatgaattgtcctaaaatcacttttttatctccaagttttttcacaaaaatattgagctcaattctttgtatcgtaatggtgatgaccgggatggatgcaacttaatctagtcacaccaatctcagtcaagattttaaaccttggatgtaggtaaaacttatagtacttcaacaaaaaaaaaaaaaattaaaaaaaaaaatcatatgcattcaacaatattataagcaatcaaaaatttccttgcatatgcaaatcttttggggtggagtactaagaggcgacttgcttgtcatttgcaacaaggatacttgcttgtgtcgattacaaaatggtaacaaatagtattacattgatcacctatcaaaaaaaaacaaatagtattacattgatcgttgtcaatttttcccaattgatcacatgattcgacctgataacagattcttcaatggtaatgaggaacataaagtagcatcagaacaattgtttaggaatgacattgaattagttagaatggatgagctctctaggaaagaaatcaagagctgtgatctctagaaaagaaatcaagggcttatatatcaataaacaagaaaaagggagatgtcatacatcagaacaactagaagaagagtattttctttcaattgccatatcagaatgctctcattgtgcatcacagtttgaatgaaatgcatattgaaaagaatgtgtgtgacaatattgttggtgccctattgacattgagggccaaacaaagataaccaaaatggttgttttgacttacaagctatggttatagaaaccaatttcatccaatgcaaagtgggaatagagtttcccttctgctaatgctaatcattacttcaaatgagaaaaaagaatcatgcaactttttgaatgaggtaagaggtcctaaatgattatgcttctaacatctccgctgtaggctagggaatgcatgattgtcatgttctcagtaacaattcttacttacaattttgtagagctatgcctagaaatggatatgcactttagttgtgcagttttttgtggcatttgcactcaaagttgttgagaatagatcagttagagtgctttgagaatgataatagtcacattttgcaatttggaaaggatattctccatcattcttcgatattgtgttgcatttacttgttcatcttgttactcaagcaaaggttactggaccaatgcaatgcgaatgaactgatccttttgagcagtttgttctcattttgtaaatctcatgtctattggcttaaatgtggttcataatttatgtcttggtttgtatatggttgataataggtacctggc

SEQ ID NO: 10721 - DNA, 15660 bp, Vitis vinifera
  Intron number 3 from transcript GSVIVT01029394001 (locus G SVIVG01029394001) derived from phytozome v7.0 (chr-ID chr1 7; pos 16181446 to 16197105)
gaaaggtatgtaattggtacttctatcatgaaaaaacttatgcataacatgatcatgtccaaatgatggtctctccctagtgggatcttgggtgggtgagatggatactgtaccctggcatttttgcatgaagtggttactcttccctaaatttgtaaattaggcatggagggtaaggtttagaaactgagtaatcttttttttgagccaggatcaaactctctctctcattttattttatttttatttatttatttatttattttgttttcattttttctccaagtagaattgaaccctgcaatggtagaacttggtgaactgggtatacatctgaagggatatatatattatttatgaatgtaccaatttgatcaaagaaaactacaaacaactagatcaacaacctggtgccaattaagggaggtgtggaccttgctcctctctttttttggagtctcttgggtttttccgcattcggttaaggaaactctaataggttggagaggttccttaatgggcaagaagaggaaggtgacgtggcttttgggaccgttatgcttgttttaggtcatttggaaggctagaaattcaattgcttttgaggacggggtgctatctatacaaaagctgaaaatttcctttgtgtatttgctatggtcggaaaccaaagtgtggataaaagatggtccttcgaccttattagattttatagattgggtgtgcatgtattaaggaagaggagggttttttgtgctttcatagaggggtgggttcttttgtaagggggtgagtcgttttttctatactgtaactatttgagtcgcttctttagcgtctctttttcaatacatatatcacttactgataaaaaaaaaaacaacctggtgccaattaacaggcccatcctacctattgtcgctaataagggtgtttagggtggtgtaaaatcagctagttgagcaagcagcatgacccctggttctactttactaagtcctgtgcttgtacaatgaggaagccggtaccaccaaaatcttggaatttgcaaagttgcatatatgaaactagtggaaattaggtaaggttccttatttcagtgatacctaagtttgatagacaatagatggataaggtttaattagtcttgtaatgtagagaaagtggagaaggatgaaatcttagggaagagcttttcttaaatgggcaccatatatacctttatttatttgtttatttattctgttcttgaaataaaaataattccctatccatgagtatatgccataaatgaaggtaaagcaatatgagatagaacaaatgcttagactttatttctccataaagccaaagaacaataacacttagcagctactgctgtttagctttataccagcaaaagagactgttctatagacaacaatggactgggcctctctaaagtgagacatgtcagaacatcaaaaagcaaccaaatcttgatttgagccacagtgtcaaccaaagacagctccacactctgaaaattccttttgtttccctccttcccgacaaaccataaaacaggaaataggaaacatgacaacttccaattgaatattaccttttatttccgaagttataaaaacccatctattcattaattctgataatgaccttagcattatccttcacaccacaaacgcaggaatgatcttgcctagacggtagaagagaaggaaaaatggggatgaagatgactgtaagcctacattggtttgaaaaatttcactttctagaaaccaagttctctgctcctagagtcttgcctgacatgcatccatatagaaaaggccacctttgaggggattgggttttccattaaaatctaggtgggaggatgttccagaaaatatgacgaattcacttaactgagaatgaccacaatttttaagaatatgtcatgggatagatgaaataaatcctcaagatcccaaattcctctatcaccaatgctggaaaaagaggctcaactaagctgctagaatggtaaggactttgaaggtttctgtggagaggaagtccttctgggttaggttcgagggtgaggtcggaggaaaatggtgttcgctaacagagcacagtaaaggctctgttttcgtcttaggttttgagaaggaagaggttagttggttgatagaacaattgacaaaggccattgagatgaagatttttatgggtttcaacaaaaaatttagaggaaagaccagagtccatctattggaggtttgcttcaatgttcatggcaggtttataagattatcagagttcgccttcaactggaagtcacctttcttggtaatacctgagggagacaatggcaggggatgggaacatttaaagtctgcgttgtattcaatattggtggtcccctcctcgggttttgatgaaaagggaaggcagagtagggaagaagggattttgcacaaatatgcgggtcccttgcaacggtccttcgcgaatgtagtcagagaagaaggtccgaggagaggcggccttgttccagtagggagatgggcgaggaccatggtgtgcgaatgtcatgttggttctgttaactgggctgaggttggccgggctatggcgagaaggctagggcataaaggcgtggtgacaatcgtcccattcgccggaggaaaaggattgttttttgtagaaaccttagaggaagctgtctcactacacgattcaaggttcatcaggattaagggtggaataacaatcttgttgagaagatggtcaccaaaggaaaattcagaagtagaggggaaattcaaggaaggttggatagatttaaggggtttaccatttcatttatggtctgaggttcacttgaagaaaattatggagcagtgggggacggtgatagagattgattggcgaacattgaaactttttgatctaagcaaagctagggtgagagttgtaatgaaagaaagatcggttctccctgccttgattgaggtgttagatgggggttgggatttcacagtttcagtcgcagtggctgggaaggaagatggtaggcaagttagagagatgggtgagtcaactcggcaaatggctgaggctcacatggggatagttggcagaaagagggaagaggaagatagatcaacggctggaaaggggtcttcggctggggcagttggcagaacaatggagtggagaggtggtcaaaaggctgagaatgctcctgggaggacacgtggaatgaataggacgacagtgggaaacaactgacctctaatgtcttttagttcaaattcaaaaatccaaagagcaggatctgctgggccaaggtaggctggaggggtcaaagcccagtcaaatttcgaggatgggattcgggcctccaaacatttgacaagggtccattcttttagtaagcccagctcacagtctgaaattgatgtgggctggaagagggaagtccctgggaaaggcccgattcagttgctgggccaagagatgggaggcaagcaagacacatattcgaagggcccgttacacaaggctattctttttgcaaaggggaagtcgaaggtaggctacgaggagtctgaaaatcaacggaggggctctgcagtgaagtacggttcaaagaagctgtggaatgttctgcttccttcaagctctgcatgccgacaaggggttcgatgccgaagtgagccactcacgactgagagatcgctgccagttagcgatactcttccattggaagacgtctccgaagcgggaacatagttggttcaagggtattccgaggaaggaacgacgtcgacgaagggaaacgtggagcaaaggaatcttcttagggctccttttctgtcaaaagggaaggagaaaatgcgcaatattgctaaaggagaagacggagtaggttttaagggttttgtgggatgttctcatagtggatcttcagtcatggatcatccttcttatcccgcaaccagagaaaaagggctcaactttgaggggtactgtggaatgagggaagtggaaattttcgaggtatctcctcatcatttttctcagccttctctgccttttcattctcctttctctggcgtggctcctccataccagtgtccttctgttcctaatctctccatttcagcctttcaatcccagtttcctgtgaaaaatcgagtgttaattgaaattttttcaaaaaaaaaaaatgacgttggggattattgtcttgggtctgttagcaatcctcagcgtgttgatgtggtgtcctagctggctagattgaatattttgtctgagagctttaattatgttaagaccaaacccagctcacctcatggggcccttattttgggtacagttagccagggagacacaaagttctcccagatgggtgggttccaaataaaaggtctttcccctagcaaaatggctaaagtttgtgaggtcttaagctccttggatattaaggtgtattcaagacgaaagaatagaattgccacagacatttgagctttgttggcgttgggttggaggtatagggtcagtgaggtgtttttatgaagatcataagttggaatataagggggttgggatttaggaaaaagaggagggtggttaaggattttttgcgacttcagaatttggaaataatgatgtttcaggaaacaaaaagagaggtgtgcgacagaaggtttgtaggtagtgtctggtcggttaggaacaaggagtgggctgctctcccggcgtgcggggcttcaggatggattttgatcatttgggactcaaagaaaatgagtggtgaggaggtggtaataggatctttttctatctcagtcaagttcttgttggatggatgcggaccattgtggttgtctgcagtttatggtccaaacaatccctcaactaggaaggatttttgggtggagctgttagacctttttggtcttacttttccttcatggtgtgtgggaggtgacttcaatgttataaggagaagatcagaaaaactgggtggctttggattcacttctagcatgagggattttgatggttttataagagaatgtgaatgacatgatcccctattacggaatgcgtcttttacttggtcaaacatgcaagagtcaccgatgtgtaagagattggatcggttcctctattcaaatgagtgggagctttcctatccttaaagccttcaagaagttcttcctagatggacatcggatcattggccgattgttttggataccaatcctttcaagtgaggcccaacaccttttaggttcgagaatatgtggttgcaacatcatagtttcaaagagtgctttagcagttggtggagagaatttgaaggaaatggttgggaaggtcacaagttcacgaggaagttataatttgttaaggcaaaattgaaagattggaataagaatacttttggaatgcttaaggaaaggaaaaaaatcatcttggatgaaatagctaacattgatgccaatgaacaagaaggggctctctcttctgatcttgctgctcaaagagttgtaagaaaaggggagctagaggaaataattttgagggaagaaattcattggagacaaaaagctaaggtaaaatgggttaaggacggggattacaactcaaagctgtttcacaaagtggctaacgggagacgaaacaggaatttcatcaaattcttggagaatgaaagaggtttggtgttggataatttcgagagcatcatagaggagatattactttatttcaaaaagctctactcgagtcctcctggtgagtcttggagagtagaaggtattgattagtcccctatatcagaagagagtgcttctaggctggattcccctttcgccgaagaagagatctttaatgccatttttcagttagatagggataagacgccggggcctgatggtttcaccattgcagtgtttcaggattgttgggatgtgatcaaggaagacttagtgagggtgtttgcggagtttcacaatagcgggattattaatcaaaacaccaatgcttcatagttcttttgcccaaaaagagttagtcaaagaagatttcggattttagacctatcggcctgatcacttgtctctataaggtaatagcaaaagtcttgtcagggcgactaagatgagtactacacgagaccatccactccactcaaggtgcttttgttcaagggagacaaattctggatgcagttcttatagccaatgagattgtggacgagaaaaggcgatcaggggaggagggagttgtattcaagatagactttgaaaaggcttatgactatgtgaaatgggattttttggatcatgtgttggagaagaagggatttagttctaaatggaggagttggatgagaggttgtctgtcgtcggtctcttatgctattctagtgaatggtaatgctaaagggtgggtcaaggcatctagaggtctaagacaaggtgaccctttatcccatttcctgttcactattgttgtagatgtgttgagtagaatgttgttgaaagctgatgaaagaagtttgctggagggtttcagggtaggtaaaaatggatgtagggtgtcccatctgcaattcgcagacgataccatcctctttgctaactctagtaaggaagaactgcaaactcttaagagtttattgttagtgtttggtcaagtttctgggcttaaggtcaatcttgacaagagcaatctttttggcattaaccttgatcagaatcatctctctaggttaaccttgatgcttgactgcaaggcttcagattggcctatactttatctaggccttcctttgggagggaatccaactgcttgtggattctgagatccagtgattgagagaatctctaggagattagacggatgacaaaaggcttagttatctttaggtggtaggataactctcctacactcatgcctttcccatatccctaactactttctttctctgtttaagattccagtttcagtggctgcaaaagtcgagaggatgcaaagggactttctttggtcaggggtgggggaaggcaaaagagacatcttgttagttgggatgcagtgtgtaagccgagggtaaaagggggtttggggattgggaagattcctttaaggaatcgcactcttttagggaaatggttgtggaggtttcctagggagtgtacaactctgtggcatcaggtcattcttagcatctacgggacacactcaaatggttgggatgccaacactctagtcagatggtcacatcgttgtccttggaaggccattgcataagtcttttaggatttttccaagtatacttggtttatcgtaggagatggggaaagaattcgcttttgggaagatttgtggtggggggaccagatcttcaaagaccaatatccaagactatttagagtagtaatggataaaaatattcctatatcttcaattctcggttcggctcgccctttctcatggaactttaatttcggtcgtaatttaaccgattatgagatagaagatctagaacgcctcatgcactctcttgattgtatgaatttatccacttccgcttcagacgtgagatcttggtccttattgtcttaagaattgtttacagtcaagtctttctttacaaccttgttccaaatgactgattcatctccatttttccccactaagtttgtatggaaatctcaagtccctttcaaagttaaggcctttgtctggcttgtggcacacaagaaggtaaataccaatgacttgctacaattgaggagaccccacaaagctctgagccctgacatttgcaagttgtgtatggagcaaggagaatcagcaaatcatctcttccttcattgttttgtgatgttggggttgtggcataaactatttcagctagccaagatggattgtgttcctccgaaaagcatttcagacatgatgttcatcaattataaaggttttggcaagtctaagagagggttagttctgtggcaaaacgtgtgcatagctttaatttgggttgtgtggtgggaaagaaatgttaggatatttgaggacaaagttaggaattcagagaatctttgggactccattcatttccttgcttcttattgggctttttgttccgtgggttttaagggcatcccctttaacgtattacaacttgattggctagcagtgtgtagttccaatgggacggtctagtgtcttgttattttttcgtgttgtttagttttacttttggcgggaggattcctcatcctccttttgtacttctttttctatcaatatattcatgcgtggtttcctataaaaaaaaaaaaaatggatgaaataaatcaaaaaaggattatcccacctcctaatgtttttctctgaagcaagtagcatggagcaacccttatgtatgcattgtctcaatttttaaatcttgatagttcctcccaaaaggattcttaagactcccaccatgtgattgagatagttgctactttttattgcatgcatgtatgagtaaaaaaatctgataggcctcctatacgttatgtgtataatagaaaagggaagaggaatatactgccagctggcagttatttgtaacaactttagtggaggttaggtcacagttggatacgggctgaggggaaggtttaaataagaaaggagggggaattacagggggagaaaataatgtggatctggtagggatttgagggccagttgggactcttgttcttgaaattcttgaaattcaataataattctccattagatacctatcaatttggtattagagcatcgatccagatggctcagaaaaggaatgaaggtcgcgtggattgtctagagaaggaagttggagaaatcagagaggagatgcagcgcttaccaggaatggaaaagacggtgatggaccttgctcagaatgtaatgcgagttctgcagttgctggaagagacacagaaggcagtggcggcgttgtcattagggcggaacacgacgactgctgctcaacgagaagatcgggcaggatggatccctggagttggggaacccagtgggggggggatggtgtcggatgagatgaggcgaggtggaaatagagaatggtgcggcagccgacgggtggagatgcctgtatttacaggagagaacccggacggttggatcttccgggccgatcgatacttcgcaacgtacggactcacagaagaagagaaattagtcgccgacgcgatgagtttagatggggacgcactctcttggtaccagtggactgattcgagggaggtgtttgggagttgggaaaatttgaagaggcggctattgcttcgctttcgtccgacttaagaagggagcctttgtgagcagtttctggcggtgcgacaacaagggacagtggcagcatactggcgggaattcgagattctggcgactccattgaaagggatttcggaggaggtaatggaaagcacgtttatgaatgggttgcttcctgagatccgggctgagctacgtctactgcaaccatatgggctgggctacttgatggaaatggcccaacgagttgaagacaggaatttagccatgagagcagcccgtgaaccaaatggcccaaatggcccaaagagctccaaaatgttgtcatctgcaaatcgaggtgagtggaagattggggaaaattttcagactagggcaatggctgtcggcgagaagacgatgagccaacgacgtgagattccgataaagagactgacggaatcggagcttcaagcccgtagagagaaggagctctattttaagtgtggagaaaagttctcccctagtcatcgctgtaagaaagaattacgggttttattggtgcacgaagatgaggaggaagacgataaccagtttgacgacagagcaaccgaagaacttgcactcatcgaggtgaaagacgctgtggaattatctctaaattccgtggtcggtttaactatgccgggaactatgaagattaagggaacgatcgggtcaaaagaggtaatcatccttgtagatagtggggctacccacaattttttatcccttgaattggttcaacaattagcacttccattaactacaacaacgagttacggggtgatgatgggaaccgggatatccgtgaaagggaagggcatttgtagaggagtttgtatttcaatgcaggggctcaccgtagtggaagattttcttccacttgaattaggcaacactgatgtgatcctaggaatgccttggttggggaccttaggagacgtgaaggtaaactggaagatgctaacgatgaagatcaaaatggggaaggcagtgatagtgttaaagggagacccgagacttagtcggattgaggtatctcttaaagcaatggctagagcactgcagcaccatagccaaggggtttgggtggaactctgtcagacttccaccacttcggatttgagtgaaggagtacaagaggtcccgaaaacagttaaagaagtattagctcaacatcagtaaatttttgggccaataacagggttaccaccaagttgtgatattgatcatgccattcaattaattccgggagcatctctggttaatgtccgaccctaccggtatccagatattctaaagaatgaaatagagagattggtgcaagagatgcttgaggcaggaattgttcggcctagcttaagcccattttctagtccagtgttgttggtgaaaaaaaaagatggaggatggaggttttgtatagattaccgcgccctcaacaaagttacagtcctggatcggttccccattccggtgattgatgagttacttgacgaacttcatggcgcgaccattttttccaaactagatctcaaatcgggctaccaccagattagagtccggcaacaagacatccccaaaacggcatttcgcacccatgaaggtcactacgagttcttggtgatgccttttgggctaaccaatgcactaatgactttccaatcactaatgaaccgtatatttcggccataccttcggaaatttgtgctcgtattttttgatgacatattggtctacagcaaagacttgaaggagcattgtgaccatttgcaaagtgtgctgtccattctggcaaaccaccaactgcacgtcaatggaaagaaatgtctctttgctaaaccacaattggaatacctgggccatttggtttctgccaagggggttgctgctgatcccaacaagatttcaaccatggtagagtggcccacacccaaatcccttaaagaattatgaggatttctcggattgactgggtactaccgtcgatttgtagaggaatatggagctatttcttggcctctcactcagcaactcaaaaaagatgcttttaattggaacctagaggctgaggtagccttccaaaaattgaaaacagctatgacaacaatacctgttttggctttgcccaacttcagtcaactcttcattgtagagacggatgcctcggggtatggtttgggtgccgttttgatgcaaagtcatagaccaatagcttattttagccaagtcctcacaacaagggaatgacaaaagtccatatatgaaagaaagttaatggttattgttttagcagttcagaagtggcgtcattacctgcttggtcgccactttattgtgcgaacggatcaaagtagcttgaagtttctactagagcaaagaatagtgaatgggtcgtaccaaaagtgggttgcaaagctgtttgggtatgattttgaaattcagtttaggccgggaatggagaataaagcagctgatgccttatctcgcatccccatttctatggagttagctaccctcatggttcccagtcgcatagacacttcgttgatcagttcacaagttgaagctgactcgcaccttgctaagattaaatagaggctgctggatgatccggatgcttatcctaggtattccttggaccatggcattctcctttacaaggggcgcctagtccttcccaaggcctcaccccttgttccagcacttcttcaagagggccatgctagcgtggttggagggcattccgggttcctgcggacttacaaacgactcacaagagatttcttttgggttgacatgaaaaatgatatcaaagagtttgtggagaagtgtccagtatgtcaacaaaataagaccctaactttgtcgcctgctgggttactacaaccactgcctattccagacaaaatatgggacgatgtgacgatggactttattgaggggcttcctaagtctgagggttatagctccattttagttgttgtggatcgattgagcaaatatgctcacttctcactgctcaagcatcccttcacagctcaaacggtggctgctatctttgttcgggatgttgtcaaattacatggatttccccgttccattattagtgatcgtgacagagtatttcttagctgattttggactgagctatttcggttgcagggtacttctctccgccatagtaccgcatatcatccgcaaacggatggacaaacggaagtggtcaactgttgtgtggagacataccttcgatgtttttcatataacaagcctagacgttggtctacatggctttcatgggcagaatactggtataataccacattccactcctccactaatacaacaccgtttcgagcagtttacgggcgagacccaccaccgttgatacgttttggatcagattccacctctgttctagcagtggatcagttattgcaagagcatgatctaattttaaatgaattaaaggatcatctctgttgtgcccaatccaaaatgaggtcatctgcagatgctcatcgtcgggcagtccaatttgaagttggggattttgtctatataaagctttgtccgtatcgtcttcgttcccttgccaagcgaccaaatgagaagctctccccacgatattttggcccttacaaagtagtgcagcaaattggtccagtggcgtacaggttagagcttccttcttcaacaactattcatccagtgtttcatgtttcccagctcaagcgggctcttggttcagctgttttgtgtcagccactttcccctattcttgctgaggatttggaatggcttgtggagcctgaccaggtcttagatattcgcaaatcttccaataacaatcagcttagtattgaagtacttattcagtggaaaggacttcctcagtttgaagcttcatgggaatcagttgacacaattaaagagcactttcctgacttccaccttgaggacaaggtgtctctcattgggggggggggggtaatgataggcctcctatacgttatgtgtataatagaaaagggaagaggaatatactgccagctggcagttagttgtaacagctttagtggaggttaggtcacagttggatacgggctgaggggaaggtttaaataggaaaggagggggaattacagggggagaaaataatgtggatctggtagggatttgagggccagttgggactcttgttcttgaaattcttgaaattcaataataattctccattagatacctatcaaaatcctatttcaatatattccactgattcaatatatgccacactaggacaaatacagaatctaatttcaagcaaaatagataaatatactctgagcatagaaaacaatgcacaggaacacttgtttcatcccaaaggcaatggaattgtttattatcttagaaaggttccctggtaagctgagtgcactaaagtctttaaatgtccatagctgtaggccttttgatataagatcaataaagtggcatctacattgcatcaaatcccttttttaaagaaaacatgttaacaaacatagttagcaaaaagggaattgcataaagaggaaaaaagaaagacaagctaacttttactaaaaagcaagaactgggcaaaagcagaacaacctgcaaccaaaataaatggttgaaccaacagatgctccatctagataacccaaatagccacaaacaaagcaaaagccatctattgctatccttccaagaatgggtaattaatttctacagaaatttggactgaagtcatccaactcatgtccattcaatcaaagagtctctggcgtatgtttggacaccctggtgttagcaatataggaagagataatccttggtctcctcaattttctctcataatacacacatctagagatctgcaaattttaggtttgagatttgttgtttttgactgctaattttttattggcctctcttaattagatgtaaggtttcctttttcgcatggtgatctcgaaaaagaagtgtatatcagacacatgacacctagtagattcaaagcttgaggaagtgttaagaggataatatatattgcgaacccaaattccaatatcttaaacttttaagaaaattggtaattcaacatggtattagagctctagttaattagagttccctggttccagttctgtgatttgtttgctcctaatgcatataggacagttcaagcttaacgtgaagtgaaagtagagcttttaggaaaattattgatgactcaacaagaagtgaaagtaaagtgtgttgcttgaagaaacagtggggattaagggcctgtttggccagagtcttcaaaaaattgcttttgaaaacaattttgaaagtagttctcaattgtcttcaagagcaaaattcattttgggactttaaataagaaaaaatagttttttcagcttattatctgtaaaggtacaatggactaatgtataatggaaaagtttctaaagtgtttttcatattttcaattgtttcttaggatactttacaagaaacacttgaaaacccctcacaattgttctaaaaaataacttattttcagaacatattcttaaaaaaattgttttatgttagaaaagtgatttctattctaaagaacagaaaactgttttcaagagtagtttccaaacagaccataagagttcacaaagaatggttcaagaggtttagtagagccttttcaaggattgggttatctgaagttgggaaagtcattctcagcattttaaatataaggatgagaggctgataatttttttcctgtttatatatggtactgcatctacaggaagttcaaatagaatatgaagtcaagcaagcttggtaagggtggcaccattcttatagatttgacaatgtaccagggattgctcctgaagttgactcattgccttcacttaacaagattgttattggtgtctcactcattcccatcccaacaagtaatgaaatatagacattgacgatcatgctaagtttctgaaaatctggagatcactagagatattgatcaaatatggaaattggtcaggtagaagtaaaaaatttacttataaaacatgaaatttagatgaagttttgagaaagatatgttgactcctgtgtcaggttccccgtatgtctcatccagataaagtgtgtagactgttaagatgatgagttatcctgttaagtgatactgaacaagcatggaccatatgcatttgtactgaatgtatatgttgtttcagtttttgg

SEQ ID NO: 10722 - DNA, 2743 bp, Vitis vinifera
  Intron number 1 from transcript GSVIVT01025857001 (locus G SVIVG01025857001) derived from phytozome v7.0 (chr-ID chr8 ; pos 11127359 to 11130101)
aacaatttttctctacccaggtgctcctttctgtgttccagattttaccctttctcgttcgttccacagattttttttttttgtttttttttttaagatgatgtgcttgttctgtttggttgctcagaatccgtggataaagattatctaacatcttgagccctattttttttttctttcttgaaaaataaggatagctgcagttggaaagtctgagcgtgattgtgtagttggaaatgtgcatgggtttaagcttgttattttattttggcgatttgtgattttggtggcttgtttgatcgtattgggaggttccatggcctgatgttgaagtttggtttcctggatgagggttttggcttttgctcgatttttgttctgtttgtttgtgcacttattgtttaggaatggagtggctttgtttgttttacatagcatttgataatcgtagttgttatggcagctgatagtatggtatggggtggtgggttttgcaattgattgaaacagggttgtttaatttttttcagtatactgggcgcagttcaatttaggccgggcatttaaatggggccttcttgtcttatttatcggtattaataggtagttgcacttagagaaaatggacgtgatcatatgactgttaaagctagctacttcggaaggattggatctggagattgaattggtccctaattcctggacaataggagaatctgttgttacactctattcagattccttattcatagcgttgttaatattgtcctctatggtgcttgctatttggattgaagtgaaatgatctatagaagctattagtggaaagagtaaatgccatagtcagatccaatgtacaaaaaatttatgctgaaaatagggtgcaaaataggcatagttaattattattatttttttttttgatagataataggcatagttaattattatattgatgtatctaagaacatgatatctactgcaactaggtgcagattttgtagtctaaagctgtttggatcaaagcgcaatatatttgttgatacaaaggtggtgttgtttgtttaaagtatggtatatggtttcatgtggtcaaaataagtgaggaaaatcctccaaacaggcagctaagctctttagctaagggaaggtttctacttggagggcctttagagatcattattaacatctttgtgcatgagtttgggtttttctttgtttccctgtggcttttgtttgtttgtttttatttttatttttattttttattatcctttcagttgtgaatcgctctttttctattaataagtattgtctatttaaaaaataagtgtttgcatcttttttttaatgagaccagttacccatgtaacagcccccaaaacaaacaaatatttaggaaatagaattttgtgcatgaataactacttgactgttttgataaatcgttaaacagattgtaagcatctaatcagcattcttatgctatttttagatattgtctgtttagaaaatttgttaactgcatcttttttggtcataaaatcttttactcatgtgatatccttctaaagcaaacaaatgtataataaataacatttcaggtgtgaataaccaaatacctgttgtgatgaatgcttaaacaaatcacagtcatctaatcagcctcaactgtaggaaaagcaaaccttgggtgatatgggcctgcctttctaccctacaccacttaaataccaaggagacttaaaaacacaagacctttggtttgttgcctgagggcactacaactcagctacacccttgggggagggggagggggagggggttgggttgttattttatttttttcttgcctgattttctttcacatggaaaggaatgaatgaggaggcctggagcagccaccatttgaacgctcatttcttgccatcatccatagaagacaataccgatccagtttgttgcatcccgcatggctataaggtgtatgacaatgcaaaatcaaaagaaaataaaatatggcatcaattttactccataaatggtgtccggtgcacatatatgctagtttgtcctacatcagcaataggaacaaactagaatcttccccaacattactgtatatccatttctattgtagaggactattttattttattctcttgcttgcaaatctttaaacccagcatagaagcaaaactctgattgggaattaggttggttgcttattatgaactgaaattctgatagggtgactagttaactgctcgttcttaacaagttgctcagaggatgaaatatcattaactggtgtggaaagctgtactttagaagtttgcaggggttgttgatttccatttttaccctggttttaaatagcaatgcatatgcgtatacattggcgtgcttattttattttgtttcttatagagacatattgtttgtgtcaagccttgaaaggtcattcttttttaaggcctttgttggtatattacattctgtttcttcaattatcttattcactttgtttgggcgctatgagtattcctgctgtcactacttgaccaaaatcagattttcttataacatagatgatagaacagaaccgatactaatggtgttttgtgtttcacacctatttggaatatgtttcacaagcttaagcctcttatagatgcctaaattttatgtacagtataataattgaaatttaatttcacctttttttttggtcacaggatcg

SEQ ID NO: 10723 - DNA, 19496 bp, Vitis vinifera
  Intron number 1 from transcript GSVIVT01022856001 (locus G SVIVG01022856001) derived from phytozome v7.0 (chr-ID chr1 2; pos 18701068 to 18720563)
aaaattcgagtttttttaacttctaaagctactttgagaaaaaaaatttaaaagatggtagttacaaaactaatgacaaatcgatgacactttttgtcgtatcgaatgtgtctctccaaaagacattttccataattttcatatgaatgacacttgataaaaaaaaaattaaatttacattgaagatgtctcttcaagagatattttccataattttataaaattaaatttatatttaagagacacttttttacaatttttttaaattagacatatacattaaaaaaattgaatatttattaaaagtgtattttgaagagacatctttcacaatttcataaaattgaattcatattaaaagtgtctctttaagaaacactttttcacttctttttttttttttttatcaatcatacatattaaaaaaaatttgaatttttactctcataattccacaaaatcgaatttatactaaaagtatctcttccaaaattttcatattagtcacacagtgaagaaaatgaatttatactaaatgactttttaggtgacacattccacaattcgacaaaactaaatttataattaagatgtcttttgaaaagacatcttccatgattttcataccagtcacacaataaagaaaattagatttatactaaaggtgtttgttcaagagattaaaaactaagttcgaaaattttggatctgcaaagaaaattttaggaatggggatctaaagggaccaaagaaatggaacttggtttctatgccaacaaagttataatcaaaaggttttggagcggttaattgatgtcaaataagttataatcaaaaggttttggagaggttaattaaggtgatcaaattgtgaaggctagctctctgtccctggaagacagcagcaaagacatatacttaggctaatctacttcatggaacattttaattactccacttctctttcatgacctttcattcacttggactagttcatctcttgcagccaatgcctatctccttatatttgtcaaaatcagcttctcttgtctagccgacattgttgaagataagcaacttggactaattcatctcttgtagccaatgcctttctccacttgcatgcacattaaattagacatgacttaattaccaggtctgttgaagataagcaacttgccttcccttaacaattattataggccgacctaccttcatccaccacccccactttccatttatatgcctttgctttcatattcttaccccatgagattaagattaagagcatgtggcctggtaaacaatggtgacgtacagggtctaccacgaaaatttggaattcaaagttcctttttggccgaatccagaaggaaagggaaggagaattatgctataggtgtctatttgttgataatgggttaaaagtccttaataacttgtataattcataaggaggatgtaaaatatggagagatcaaaatacccattaaagtagtcatcttggttaacatataaaatggaaagtgattgtaggaaaaatttgtggtctgctgtaccaaaattagatttttggccattggatttacatatttaatcatgaccattgatttgaattggaaaacacttgctaatggtttcttattataggatcgaattttagaggatacaaatttagtaataattaagtaatgggattttatattatcaaaatatataatttataataaataaaaataatgtattatctaattttatcttcttttttatttttatatcaatattatttaaaaatatataataataagggagaattgtgttttgaggtgaattgaggctgataattgacccaagatccttatatcacccatgtttgaactcaaaacctattggtggaatagaaattaagaaggatgttacttttcaaaaatacccttgattgtcaaattaaaaaattaacttgcgactctcacctctctctctttctctctctttatttagctcccctatttttttaaaaattttagaacttttttatttcatagttaaccaatttataaaataaagattcttgttgttaaataattttattgcaaaatttatcttttaaaattaaatttaaataattttatagtgaaatttatctttttaaattaaattttttatccttatttatttcatgtagtaaacaaatattttaaataaaaaaatctacttcaatttatttatgagaattacattaaatgaaaatgcatttttaattgatggatattgaaattgacttttcttatattttatttatttaatataataaatttagaattcaaaataaaaccaacttccttcattcataagaaataattttttattaaatggttgataaaaaattaaaaactattattatatatttttataaccattcgtttctatcatcctatgccttggaaaattagttatttgtaaaaaaagataaaataataacttcttttattagaaagaaattttataattcatttttataatggtaaaaaagattttcttaattatttctgaatccaaccaacgactcttttgagattgtctagattttaagaattttgataaattcaactattagaaaaaaaatttcaaaatttttatacaagtatatttttaaaatttaggtaaataaattataaattaaaaataaataaatttaataatttaaattctttaatgatttaaaaaaaattaataatagttttgaattcaaaaaattgatataattaattgcttattaaataaaaacattttagaatattatattagtaattcggtagtaattgtatataacaaatgaaaaactttacttatttacatgctagaaaagttaaactttattcattattcattctaaataaaatattattaaaaattattattatttatttttaagcaagaaaattaagaagatgttaatattcttatatttctaacatagactaaaataataatttttttataaaaaatataatttatgattttattataatttatttgtaattacaaaactattttcattttaagatttgaattaaattaaatttaatctatattgtataaattgaatttgcaatgtttttacgaacccaaaacaaaaaaaattatttttaaaaataacttattcaaacaagtttttcatttttcatttttaaaaacttgtcaagtgtcgttattttataaaacactaggggtatgtttgacaactatttttaagaatagtattctgttttccaaaaaaaaataaaaattaggtaaatatattttgacaaccaaaaaactattttttgttttcagagaatgtcttttatttgttttcacttgttttataaaatatttcaaatgattaaaataaagcactaaatataataattatttttaaaacatttcaagttcctaaaaagacttttgttctacaaaacaccacaaaatagtttgcaaaaactgttcttaaaaattatttttcaaaattatttttaaaaattattaaataagatcttaaaaactgcttttttttttctttatcttcaaaataatttttagaaaccaatttaagaaaacattgtaaaatagatatatgtttcccaaacaaaaaagttaatgaaataattgataaatgggaaatttgaaaatctttcaagcaattttttttcccataggatcaaagtagaaactctccccttatcaaaacttggatcaaacaagtggacggaaaatgaaccttgaactttataaaaaaataattatttaaacttgagaaataaattaaaagacctttataaaataattacaccatatacaatatacatttttctagttatctaccaaataaattaaacattcttaatttatttttattttttggaatatttatgaattttccttttgtttttttttctttgataaaatttaaactatgtttctaggagagaaaaaaaaatgttaaagttacctaaaatataagttgagagacttgcaaaacactttcatcggattaaaatatcatcttatttgacctccaaaacgtacctgtcccaagccttaatccaattcttcattttttttctttatttttaaaaaaggggacaaaccaatgagggtgaatgataggttgctcacccagtgcccgacgactcctgcatcagcaaacatcgtactagtcaccattgccagcctggctcgtgctaccctagactttcttcgcttttcaatgttttagaaataattttaagttagaagataaatgggaaggaaaggtacgaggaagaaaggggaagaaaaggaagggctaagtcgataagggtttggagaagtggatggatgggtaaaaaaggagggtattatgggtaatagacttgtaaattttattaattgcaacatttccctcgacttagccagtagagaactttttagggcttagaggggtgctacctcttagaggtaccttcccaataggtaacttgatccctggaccaagacttctgttttcgaaggcacgcttttccaaaactatgaggtcacttctttagggttttctttcttattttattttcccttttaaaataaaataaaataaatggcgactccaatttttccaaaactaatttttcaccaataaaaatgagtctcgtcattgagtggggacgcacgtgaaaaatgcggatccacaacagtatgttcacacaaccagcgagtaaagagagacgatgcaaggggtagtcgtccaagcccttgcatctccggtaactcctaaagctgtcattaactacatacacgaaggtccaatagatgacaagcaagcgacaaagacgaaggttgttccgcaaggcttctataagagaacggattaactccgtccagtgcacctttgtagaaggaagtgcacgtccagttaacgacacaatcatcttcccttcagtagatgttaatccgatgttgcaaccatatgaagatgccttgatcctaacactgggggtaggcggatttgatgtgaggagaatcctagttgacttaggtagttcaatcgacctcttacaaatgtcgacctataagcaaatgagctactcatcatccgccctagagaacacaggacgtttgttgtctgaattcaatggagctacaacaacttcacttggcgatgttttgttgcccatccaagttgggtcgatcacattgaaagtgcgattctcagtggtcaatgatttgtcttcatacaatgccattatggaacgtgcatgacttcacaaaatgaaagtcattccttccacataccatcaaatgatgagctacctcacaaaagaaggacaagtcgatctccttggcaatcggctagttgtgcgccaatgctatcaagtgacattagaatccggacatccaaccagcaaagagacgcatttggagtcatcgaatgtaagagagtaatagcaattactgagcctggcaaagaaagattcatatacgactgatccgctccaaccattgtgcttctcacatgacgcagatccaatcatctacactaattccctgcttacgcaagatgagctggagctgctaaggaatatgcttcagcgcaataaggacatcttctccgaaactcactcggatatgctaggaattcattagtcatggctttccataagctcaacgtctcacccacctcacagcctatccggaaaaaggtttggcattttcatttggataaacaaaaaaaatcattcaaatggaaattaacaaactattggaagttggattcacatgttctggattggttggtgaacgtggtggtagtctcgaagaaagatgggaggtgacgagtttgtgttaactacaccaacctgaatgacgtctgcccaaaggatagtttttccttgccccaaatagattgatagtcgatgccactatcaagcatgggatgctctcatttctagactattttttcagataccaccagatctctatgtactagccaaatgaggagaagacaacctttatcacaccataagggtcgtactattacaaagtcatgtcgttaaacttaagaaagttggtgctacttaccagaggctaatgacaaagatcttcaagcccttgatcggttgaactatggaagtttacattgacgacattattgtaaagagtgaaacccaagctaagcacgtccatcacttggaagaagcattttatctaatgcggacatataacatgaagctcaatctagccaagtgtgcctttggcgtcagttcagggaagtttctagggtttatggtaacccaaagaggaattgaagttaatccggctcaagtgaaatccatcctcgaaatgcctgctccaaacaatgaaaaggaattgcaacgcctcacaggaattgaagttaattcgcttcatagctcatttcatagacaaactaagacctttcttcctcacacttaagaagtcaagcacattcggttggacaaacgagtgtaagcaatcatttgaagcagtcaagtactacctcactaaaccgcctattctgagcaactccaagtctagtgaaaaactttatatgtatctagctatatctaattatgctatcaatgtcgtcctacttcggcatatagaagacaaagaatagagatctgtctattgtgtgagcaaagcaatggtagatgttgagacttggtattcccaagtagagtagactactttgacacaaaaaaaatgccgcttgaaagctccgcccatacttctaggctcatcaagtgaccatacttacaaaccaaccgctcagaattaccttgcacaagttggacctatccaaactaatgttgaaatagtcaatcgaattcagcgagtatggaatcaagtatcagccacgaattattcttaaaagggcaggttttggttgactttatagctgaactcttcccaaaacaaacacatatgaccgaccaccttgaagagcaatggtggacacttcatgtagacggagcatccagagcgtttagatccggagtaggtttggtcttgtagtcactaattgggaaactaatagagcaagttatccgtctcaacttatcgacctctaacaacgagaccgaatatgaagttgtgctagttatgctagacctcgctctaatattatcctcaaccaagttggaaatcaggagcgactctcaactaattatcggataggttcaacgagagtacgaagcaaaggatgaacgtatggcttgatacctcgccatgatggaagaatgcctgaaaaagctagatgagtacaatgagaagagaatggaaaggtagacacactagtcgaaataactgccactctccctataaatgagatagtaatgctacctatctacctcaaagtcgagctttcaatcacacctgagccagtgtgcaatactagttaaacagactcaagttggattctcgacatcatgaaatacctccaaacaggaagtaccagaaaatgggaagcaagcacaaaaacttcatatacaagcagcacgcttcactttaattaatgatcaactctatagacgatcatttggaggttcatacctaaagtgtttgagtgagctagaagccaaatatgtcctggccaaactccataagggcatatgcgacaatcacccaagcggacgaactttggcacaccgcacctacacgcaaagatactattgacccaccatgaagcgagacactaaaagttatgttaaaagatgtgatcggtgtaaaaaacatgctcctattcatcgtctacctttagaagctcttaacccagtaacaagtttttagccatttgcatagtggggaatggacatagtcggcctgttgcccattagagtaacacaaaagaagtttttgctcattgcaaccgaccacttcaacaagtgggtaaaggcagaagtctatgccaacatcaaagacaaagatgtctccaagttcatttagaaaaacatcgtatgtcgattcagaattctacgagcaattgttacagataataggccacggtttgatagtgtcatcttttgaaaattttctcgaagttaaatatcaagaatttatactcaacaccctactatccacaaatcaaagggcaagcgaatgcgacaagtaagatcatattgaatgcactgaaaaaaagattggaatgagcaaaagaaaaatgggtggatgggttgctcagaaccttatgagcctaccaaacaacatttagacgtccaatgagagccactccttttgtccttgcttatgcgatggaagccatcattccaatcgcaattggcatgtctattgccaaaacaaccatgcaaattaaagggacaatgatgaagaactcataacacaactggattgggtagatgaaaagaggagatgcaactatctggataacttcttaccatcaaaggataatcactcaatacaacaaaagggcacgaccacaatttttctggccaagatctttagtccttagaagaatatttgagaacacaactaaagtaggagccaaaaagttactagctaattgggaatagttttatgttgtaattaaggcaagagactcaggggtgtaccatctccagacactagatggtgtacccatgctccgcccataaaatgtcaccaacttgaagcaacattatcaacaaaagtttcttatcaaaataatatagcaagaacaaacgggtaaaacaaacacttaaaaaaaatgtaatggcattgaggaaaaaaacttaaaagagcagtcattgtatttacacgtctaaaagtcaaagccacagccaactaaagaaaagaaattaaaaaaagatcaagtcctcttgctaggggaatcgtccctaatagaaggtccaactccttgggtagagcaacctaaaaactcgtcctcatcatcaaaaggaaagttgggagtatcatgggcaatgccatgcttcttcatacaacatcgataaccatagaagaacatgtcatccacctaattttggtagtctgcctctaagtcttcattttgagaggcaaaccttgccagaagattttacaactcccgccttaaccggacagttttttcttcagttttctccttttcggttgtcataatcgtcttctcctcaactagttggaaaacctcagcttaaggcaccttcttctcctcctcgcccttcttcagtagacaagaaccttcctcaaccagtttctaggcagcagcagccttgcttttcgttgtctccaagctggcaagaagatcctcacttccatccatgttatgggcaatgtatcttctcatggttttgactacttttagtcactggagaatgtgcgcttgttgtcacaagaggttatgaactccgggtaccacctggggataatagagattattatgagacgagagactaaaggaaaaacgagaaaagtcacaagcaaaaccacttttgctatctcaaaagttgtgtagtccttcatatgaaggatgcaatcaatggatgcatatggagtaccggacgaaagccatgccatgaaagattagatagaattctcatccaccttgaccaggattcgttgcatagctgggaagagaacccccatgttcgatactagaagctcactttcggtgaaagaagagatacaacttagaagcttggatatctcctcccgattggggacataggttgtctttggacagagaggagaagtattcagacactcgaatgagtcctcactgatttctcctaggatgataaaaggtttccttattttgtgataagaaatgtcatcaacaaaggaaggtttctcatccatttccgaaatgacagctacaatagtagtccatggtgctgacttggatggaggattgggggcaggtttcgggtaggctttctttgaaggagagagattgatagcaatggatttggataggtgcttatgttgcctctcgtggaattcaaccctcaagttggaggccatctcctcctcctgtttctcctcttcacaaataataaggggcactagtcgctaacccctgtttttgcttcgtcattggaagacgaagatgacagagatggtgaagaggatgaagctgacgatgacgacggcaagacagaagatggagttctcgccttttagacgggatgagcagtaggcctcttcttcttttgagtaggaggatggatagcggtactggaagatggacgaccaatagctggagtttgcctcaatgtcccattttggcattttttttttctcccattcctctagacgagcctagtatgcctcaaaattcgcatagaaatacaaatccttcaacacgaagcgttcgtcgggtaccaaatacgcaggagctagttgagtaaacacaaggatgataaacgacttaggatttttgatcaacgctagtaggttcttgtccgataagaaagcgctgtgagcccgttcaacaacgtctattttgaacaacttgttaagtcgggcgaatgaagccttttccacccactttacaaggcgttcccatattttcttacttgtattaaacgaacataaagattgtgaatagattcacaacaatgaggaaataacaataagatataaagaaagtgatagaagcatggcctacttggaatctccaatgaacactatggagaaaaaactccatttggacccttagatgaaccactccaaggtccggatgccaaaacatgccccttggcccagcctttgcatgaatctagaagaccaatcaccaattggagggaaggagggcagataagttaaacctttccttttggctcattttgacagtatagatgaataagacttccaatagggaaatatccaactggaaaaacatgtccaatacactacaccctatcaatatctgaataatatttaaatgaagaaaagtttgagcgatttgtgtgaaatggataaattttttgaagatggaaggaatggaaagacataacctagcagcgaattgatccgtggtaaaatacatcatgttattcggaaggttaataaatgataaagcctcgttgtctgttagctgaatttagaatagtatcaggaatatgaaaacgagctcggaattctcgctcagacaggacaccaattagacgttccagtcagagacgcccgactctagtatttttttcgtccaccctactgaggctttccgttggtagaagtaattcctcttctctctattaaactaagtggacctgggccatgtggaaacctgcacgaattaacgcagttatcaaaaccaaccacctgacccatctgtctttcggtgttgcctcagtaatatataaataaacctagatggactaatagtctgagtctagatggacttggctgtggaaacttgtagagcaagtttcttcgctaatggcaaaggaaaattcgcgcacatcgcaccatcccgatgataacgaaaatagtaagttgatgacatgggcatagtgacaacaccaaagcaagagaggagactaaaaagcgctaaatctggacatcaacatgtccatatcttccccaaacaaaccataaaagcgagtagagaaactgagaaaccctaaatctggacaacgatatgttcattttctttctagactagcaaaatcaaaacaattcaaggaacaatcacaagcgcaacaaaggaatgaacatgtagtagaaaagttaccaaaatcaagactgaaaactctttttagtggagaagagatcctccaacaacaaaccagccgacagtgacaatgaaagcaaaggagagcaatataaacacaatggtggcgaaagagcaaggtaggcaaaaggactttaaggaggaaaatgccaaaaggtgagccaaatgtgtggaaccttaatatttatagggataaaaaacctaggcaacctaaaaaacatgcggcctggcaacacttgctaaagcccacgagggacacgtcgcttgacagcctccctcggtcgatgttgacccctcattgaaggcccaaataacatgcaatccttggcgcttaaaaacttgaaaaaacaaataacccattctatctcaactcgtcagctactttgttaaacatggggaaacggattaaggggcattgtgggaggcttccttccgcatgcgctccccaaactcaagaccgtttggtcgtccaaggtaaacatataatccgtccaagattgatccatttggaccaagataagtttcgtatggcacaaagggcaagatatttccttcttcttcaatgccagatataatggacaaacccatcgagcttaagtctctagacattgaatgaatggttaatcacacttgatgcctgagcgatggactagacgacatttacattcaaaaaccagtgtcaattagtcattacacgcaattagcgacattgacaagcgcaaatgcacaatcaactatatggtccgagatttttgcacgataaccaacaaatgacaccagttgatagctcttgcttggtatgattgcccaatccacgctaaggtaaaggtgttgactgccttattagtaatccgccctgatggcaatcatcatcgtaagaaagacatgaatgcacaatcagcattgtgatgatggtgtcatctactctataaaaacccctctaaaagcatgaaaaaaagtatgcgcgtacatagtcattcaaaatagttggattcatccttgttaattcctaacttaagcttcagaggggcatgcttggaccacctgtccgaacatcctttcattgtagggaagaggtttgtctgaatccaatgaagttagacagatctgtatctaattaacacaacaccaacaaatattattcatttatttttaaaaaaaaaaaaaaaaacaggtggatggttagagaatttaggtggtagcaattaaaacttcttgtttcttgtttctctctttatcttttgtttgttgtggtaatgttaataatatatgtcagcaactagggcccaccatcagagatttttttttaaaatattttaattaaattttagactaagaaattatatacacaacccttggaaaaataattgctcatatgataaagtttttattttaatttatttaattataaaaaatttaaatttttataaaaatatttttcccactaaacaaagttgatgaattctgtattaaaatgagtctgatcagattacaagtcaattttcattgagtattcaaggtgccaatttcaaactatttcttcaactcgtttttccttcatcttttattttgtgggtgggcggtttggaaacgaagtcagcacctggggtctaccatcttctccaatccaataactcattcaagcattggaatccaaagttgcttaattttgaccaaaccagatttgaaccagcttcactaccaacaagttattggattttctcaatacaaatcaatcttttccagatgggtggtttgattgtggatcaactttctaccaactctcttgacccctttaatcttaaccaatgcttttttgatggagagaaaaaccggcatctctattctaggtagaggaaggactagttttaaatatacctattatcttactttccatcaaagtggacaattagttatcaaaattttctcataaaaatttattaaatcataattgatatttaaaacttaaatggcatgtcagtcctttcataaaaaaattaatgttaacacccaacaagtcctttttttttttattacacatataacactttaccaaagatactattaaacaattttaaaaaaaataaaaaatctcacactaagggtctatttggccattacatttaaaacggttttctatttttaaaagttttaaaattcatatcattgttaggtcattattctattgaacggtttttaaaaacaaagtgaaatagaattctttttagagaataaataaaaattgtttttattagtttttaaaaataaaaggaaaatacaaagaaataaaaaataaaaaaataaagtcataaaaagaaaataaggtaaaatacaaaatattttttctttcattcaatcttcaaatatgatttgtttttaatttttatttcatttttcttaaattcttttaaattttcatcaggcaaatagattttaaattaaataatattttatacataaaattcattaatttttaaaaataatttgaaacttgaaaacttatataattgctactagaaaatcatggaactcaaaatccatctaatcaatactagaacttcacaaactaaacttcattttgaatgactttgttagtatattcttcacatataatcatatttttgttctagtttttaccagacaaataaactttaaattaaacaagatttaatgcattagattcattaatgagtctcatattttttaaaaatatttaaaactccaatagtgatctaattaatacaaaaaatttatgaattaaattgatctaaaataactccattctcttttacatagaattgtattttttcgatttttttcattagacaaatatacttcaaatcttgtttaatacatcagatttattaaaaaaaaaatgtagtatttttaaaaataatttaaaactcaaatattaattcaattaacataagaaagttatggatacaaattattcaaattgactattgtttcttttctacatagaatcatattttccaatttcttttcttgatcaatagaatactctaaatcaaacaagttaatgtgtcacatttattagcaagtctagtaagttttaaaaataattcaagactcaaatagtactccaattaatataaaaaatttatggacaaaaattggtctaaaataaatatattgttttttttttttgcacataattattatttttttataatttttcttactagagaaatgaacttcaaatcaaacaagaccttgcattgaatttatcaatgagtttaataatttttaaaaataatttgaaattcaaaatatatatctaatgactataaaataataatagaccaaaactaatgcattatgagtcataacttaactattttcctataaaaatgactatatttttagaatttttcgctaagtaaatgaattctaaattaagtgagacataactagtactttaaattatttaataaatcttctaatttttaagaataatttggaattcaaaaaagtaatctaattaattacatacaaaatcaaaagtatgcatactttgtctataataaatatgcttttatgaagatattaagatttatatttttatagcatgtattagcatagcatattttttgtatgaacagtgaagggtagccttaaggggcactgaagacggttttgaaattgataagctttgatctaattaaggtgatcaaattgtgaaggctagctctctgtccctggaagacagcaacaaagacatatacttaggctaatctacttcatggaacattttaattacctttcattggcttggactagttcatctcttgcagccaatgcctatctccttatatttgccaaaatcagcttctctcgtctagccggcattgttaaagataagcaacttggactaattcatctcttgcagttgcagccaatgcttttctccacttgcatgcacattaaattagagacgacttaattcccaggtctgttgaagataagcaacttgccttcccttaacaattattataggccgacctaccttcatccaccacccccactttccatttatttgcctttactttcatattcttaccccataagattaagattaagagcatgtggcctggtaaacaatggtgacgtacagggtctaccatgaaaatttggaattcaaagttcctttttgctgcatccagaaggaaagggagggagaattatgctttaggagtctatttgttgataatgggttaaaagtccttaataacttgtataattgataagaaggatgtaaaatatggagagaccaaaatacccattaaagtaatcatcttggttaacattttatattgtaggaaaaatttgtggtctgctgtaccaaaattagatttttgaccattggatttacatatttaatcatgaccattgatttgaattggaaaacatttgctaccggtttcttattggaggatccaattttagaggatacaaatttagtaataattaagtaattgcattttagattattaaaatatataacttataataaataaaaataatgtattatctaattttatcttcctttttatttttatatcaatattatttaaaatatataataataagggagaattgtgttttgaggtaagttgagactgataattaaccaagatcctcacatcacccgtatatgaactcaaaacctaatgatggaatagaaattgaggagaaggatgtcgttactttccaaaaatcctcaaaatacccttgactgtcaaattaaaaaaattaacgtgctactctcacctctctctcattctctctctctctttctctctctttatttagctcccctattttttaaaaaatttagaacttttttatttcatatttaaccaatttataaaataaagattcttgttgttaaataattttattgcaaaatttatcttttaaacaaatattttaaataaaaaaagtctacttcaatttatttatgagaattacattaaatcaaaatgcatttttaattgatggatattgaaattcatttttcttaaattttattttttaaatataataaatttagaattcaaaataaaaccaacttccttaattcataagaaataattttttattaaatggttgataaaagattaaaaactattattatatatttttataaccattggtttcgatcatcctttgccttggaaaattagttatttgtacaaaaagataaaataataacttattttattagaaagaaattttataattcatttttataacggtaaaaaagattttcttaattatttctgaatccaaccaacgaactcttttgagattctctagattttaagaattttgatacattcaactattagaaaaagaatttcaaaatttttataaaaatatattttttaaatttaggtaaataaattataaattaagaaagatataatcaataatttaaattctttaatgatttaaaaagatattaataatagttttgaattcaaaaaattgatataattaatttttattaaatcaaaatattttagaatattatattagtaattcgttactaaatgcatattgcaaatgaaaaactttacttatttacatgttaaaaaagttgaactttattcattattcattctaaataaaatattattaaaaattattattatttatttttgagcaagacaattaagaagatgttaatattcttatatttctaacatagactaaaataataattttttttataaacaatataatttatgattttattataatttatttgtaattataaaactattttcattttaaaatttgaattaaattaaatttaatctatattatataaattgaaattgcaatgtttttacaaaaccaaaacaaaaaacatatttttaaaaataacttattcaaacaagtttttcatttttcatttttaaaaacttgtcaagcatagttgttttataaaacattaggggtttgattgacaactatttttaagaatagtattctgttttccaaaacaaaccaaaaaaatcaaaaatatatattttgactaccaaaaaactattttttgtttttagagaatgtcttttagctgttttcacttgttttataaaatatgtcgcatgattaaaaataaatcactaaatataaaaatgatttttaaaacacatttaaaacatgtcaagttcctaaaaagacttttgttctacaaaatcttatagaacattttgcaaaaactgttcttaaaaattatttttcataactattttaaaaaattactaaatatgatctaaaaaacaatgttttttttctttatcttcaaaataatttttagaaaccaatttaagacaacatggtaaaacaaatatatgtttcccaaacaaaaaagttgatgaagtaattgataaatgggaaatttgaaaatctttcaagcaatttttctttttccataggatcaaagtaaaaactcttcccttatcagaacttggatcacacaagttgatggaaaatgaaccttgaactttataaaaaaataattatttaaacttgagaaagaaattaaaagacctttataaaataattacaccatatacaatatacatttttctagttgtctgtcaaataaaattaacattcttaatttatttttattttttgaaatatttatgaattttccttttgtttttttttctttgataaaatttaaactatgttcctaggagagaaaaaaattgttaaagttacataaaatataagttgagacacttgtaaaacactttcatcggattaaaatatcatcttctttgacctccaaaacgtacctgtctcaagccttaatccaattcttcttttttttttctttttttttttaaatgggacaaaccaatgagggtgaatgataggttgctcacccaatgcccgacgactcctgcatcaataggcgtcgtaacaatcaccattgccagcctagtcctggcaatggtgacaagggtttggagaagtggatggatgggtagaaaaggaaggtattatgggtattagacttataaattttatttatttatttaaaaaaaaaaaacaggtggatgattacagaatttgtgtggtcgcaattaaaactaggacccaccatcatttcattctccataccttggagaagggtgctgcccttaatctttcaattaaattttagactgagaaattatatacagaatcttggaaaataattgctcatatgaaaaaaaaattattttaactaattagtttaataataaaaaaaatatttaaagttttataaaattatttttcctactaaacaaagttgatgaatgtatagaaatgagtctgatgtttataatcaattttcatagattattcaaggggccaattgccaactaattcttctaaatgtaagtaaattatatgtttattttctacccgttttttctccttctattactttgtgggtgggtgggtggtcactggtttgtaaacaaagtcagcacctgggctcaaccatcttctctaataattcattctagcgttggaatccagacttgcttttggccaaaccagaactgagccagcttcgctaccaagaaattattgcattttctcaatacaaaccaatcttttccactttggtggtttgattttggatcgcttaccttcatttttccttgattcatcactcacttttctctacaaaccaacagacatggctggggctttagttgggggagctttcctctccgcttctcttcaagttctatttgac

SEQ ID NO: 10724 - DNA, 6118 bp, Vitis vinifera
  Intron number 7 from transcript GSVIVT01031709001 (locus G SVIVG01031709001) derived from phytozome v7.0 (chr-ID chr3 ; pos 3618639 to 3624756)
acggtcaagcgccacctgctattattcctcctcaagtaatccttttctcttgacatttgcatccttaacatttttggttcctttattggatatattataaaagttcatagcattctttggatcatttaaatgagcattcttatctgaaagttctgtttggttaaggagtttgggtagatgctttcctctgtttcatagagctcatccattgagaagctgtggtgccatatatcaatttcttgtttgtgcatgtagtttgagataaatgccaagcgttgcttattaatggtgatttgatgacattattttccagaagaagggaattaacactgagtttttgtatgacagtacagttctaatctgacgtttgaaaaaatgcattgattttactttgcttgagcacttctgttggttggttagggagtgaatcactgtgttaagctgaaatctctgattaccttgtgaaacaggggtctgggtatatagatggttaaggtggctttttcttttatattatcagttcttaaccactcctccaactggcctgtagtagctctctctgtcagttgtgcacttcccatcctgctgaaagggtttagaccagtgttttgaaaagcattgctgaggtgtgccttgaagcgcgctctaaggtgaggcgtccagaaaacgccttgaggcgttgaaaaaaaaaaaggcagcacatgaaaggcgcacgcgttttggcctaaggcccttttgagacgcactctgcatatgccttttactcctcatagttagatgcgtgagccttttggttgttgaggtggccaacccaaaaaacaagaacttttgaagaaaacctatcatttaacccctaaatcctcaaactctcaaagagaaaacagaatagagaaagaaattgagagaaacctaaccctaactctccgcgtcattggctgattgaagatccaacttttcttcgacaatctccttgctaagacggaacagcctactccatcctcactctgcgacatcaccccatgatgatgttttgtggcagagcttcttccttatctcgaaaggtgttgtcttctttttctgcggagcttctcctctcagtctcacttctctctctctcacttcacccaacaatctcaccacaccacttacactcggaactcttttttaatatttatattgttttatattcctcaccccacgaccacacatttgagtatattatttttgtttctttccactcttttaatttttttgtcttgcctcaccacacactgaatttttttactcttttttctcaaatcaccacttctcactttctgccctcacgcccacagtccacactccacagaaacatgttttcattattattgttattatttttgttgcttttttgaacgacaaattaaaattaaataaaataaaattattttgatttattgaattattagattgctgtacaatatggttacttttataattctaatggattatttttcatgttttttattgatgcaattttatttaaaatatttattaattacaaaaaatgagggtctcaaaaggcttatgcctcaacactttgaggcttacgcctcgcctcatggacacaaaaatgccttgccttatgcttttacctttgaaaactttgatttagactcctccatgtgttaacctttgactaatgaaacatttggcttgtaagcttagattaattgtaggttatgtggtgtttgctaatcaaaatgcaatttttggggcaagcaaaccaacttgcctaaaagatatggacctacaatgtatatcttattaatatctccctcgctcatgtgctgtaattttagataagttgatgcgaaatatggttagagaggcttgaactagagacttccagttaattataactatgataccatcttaagcagctaatagacaaaaataaatagatagggaaagactcaaactcaagacctccaagtaactagaactttgatatcgtgtcaagtgattaacattcctagaagctttagctatcatgatatgagcccacgatgtatactagattaatattatcaatctacaaaaaaaaaaaagggaaaaaacaattagttttttggccttgtgggagggaggattaaagtaactttatttttattttttttataagtaaagagagtttattaataaacgctaaaagcacacaagagtacatgagtcctatacaaagagcaccaaacaaaaacaagaaagagggtacacaaatactctcttcctcatccaagacccaaccgatctatagaatcaaccaaatgagtataacttctgcctatatacaccctaacccatagagaaattgttaagggaaatattttagccttttttttttttgatcagaaacgaagagaaatatattaatagaaggaaagaagggaaatattttagcctttgatctaacaattcctcacattcaaagaatctcttatttgtttccttccagattgtccagaaaatacgaagagcaactctccaagccttactacgccttctgtttacaaaagagtcatgccaacctaggagagtctccctaagtgactcatatataacccaccaaatataaaaaatgaagaacaccagctgccataagattctcgccttgtcactatgaaggaggatatgatcaatagagtcatgactcctctttacacaatgcacacctatttgtcaatgtccactctcttctttgaagctaatccaatgtcaatacctttccctagcaagcctctcaagtgaagaaactcaccttcgaaggaatccacgaggtccatattatctttaaagagaaaaggatggtataatttgtctccaacataaagtaaagccctcttacaaggaagacccctttgttatctcccttccaaactactccatcctcctcctccctcttcattgtttgtccttggactttagatgggaatcgttccatgacacctaactccgaatcattctagttcctaacaaaatggaagttttgatttcctctttctccatgttgcttccaaaaatcagctacccatgccttcttcaaatcaaatggggtcaatatctttccttagcaagcctctcaagtgaagaaactcaccttaaaaggaatccacgagttccatattatctttaaagagaaaaggatggtataatttgtctccaacataaagtaaagccctcttacaaggaagacccctttgttatctcccttccaaactactccatcctcctcctccctcttcattgtttgtccttagactttagatgggaattgttccatgacacctaactccgaatcattctagttcctaacaaaatggaagtttcgatttcctctttctccatgttgcttccaaaaatcagctacccatgccttcttcaaatcaaatagggcaaacaaggacgggaaagtctcacataagggctcctcactgcacatctttccaaaacttcaccctactcccattacccaccgcaaaggaaatcttcgttttaaaaaattttcaccgcttcccaatctctttccaaaacccaaccccataggaatctctcaccgctattgacccaaacctcctttttcctccccaaactttccccttatgattttcttccacaatgaatgtttttcactaaagggatcaccaacaccattgcaaagaatggccatattgatcaaaggaagagaatgaacacctagtccttctttcaatttttctttacaaatggttgactacttggctaagtgtattttattctctaaggtccctcctcataaaaaatccctttgaatcttctctaatctcacccttacaattcttgggatggtaaagtaaccttttttgggattgtagctttgcttcttagaatttatatgcacaagacacttgtttcttttatcttgggttgtggtggagtggattagatgattagatctttcaggggtgctttgatatggttgaaataactttactgtaaagataaatttggacaaacaagatggcataagttagagaagttgttattgccatcgagttggtagttgggattagggttgtaatatttgatatttggtgcctttgcatcttatcttaggctatcgagttctctttcaatggaaaaggtggtttggtaggtggtgagttatacggtgggaggaattagtcaatgcaaaagtgatttaagggggtaatttaaacttgatttaaagcacaatcctgctttaggcccaacttactttatgccccttttttaaggtcttgatcattagcaaccattaggatggaattactagaaagaggtttcatttcatttggagttgggaaagtctaccttgttctatgtttattttagacattatggaagtaaagaaataggagggtttttgaaggcgtagaagaataggatcaagcgaatgtgttactttggagggggctagagtgtatatagatgatctttttatgaccataatatgctttagggattggttgagctccaacaaaggagagggagattgtttttttgtttgctctctaccttgtgttggcttgatttatatacattgtgtgctttggtgtgccttttttaggcacttttaatatattctctcatttatatatatatatatattatttattaattaatttatttttatttaaataagcaaatgagaatatattaaaagtggcaatgaaaaaaatggggcacacaccttatacacaagtatgcatataaaaagtaaaaaagaaacaatcgacaaccacaagcttaatttaatacttagggcacaaccacttattgaagtctatcaaggatggggaatcagcttgaatatcatcttaaagagacccgcaagaccacatgtataggctggaaataaggcaatccttaagagaatggaaagtgccattaccccatagatgaggagatggttaaccgattctttttcactttttaaacatataataataactcaccaaaaaccatcttggtctttggttaggatccttctccatgccacttcccttgcaaagaaatctactttggttggagcccatgagccccatgctatccttgaggggaatggcacttctctctccacctccaaggtagagtagaaagatttcactgagaattctctaatatataatatttgtaattgttatattacaaaattaggcagcaatttctggagtatctaaccatggttgtcatgcaaggacttcaatgtttaagtttctaagtcattctgatgttgatggatcagtcaactatgtggagagtagaatatgttgtataatgtttgaagcatttttgttcttctaaagggttttgttcatgcactgatttatccagtcttttcactgtttttatttattcacaaaagattattggaaatattatttaaagccatggataattgtttttgttgttaatggggtctttaatgtgtttagttatttatagttggacacattcgtcttttgtttgtgattctttgttgtgttttctctgtattcatatctcattcttgtatctaatgagacaatgatttaaaagtatatattcttaactgaactcatggtcctaaatggcatgggatctggcatcaagtagtagttataaggcatgcaaaacaatggtggtgcctctcaagaaaagaaaagtggtgctaggatgagataattctctaggttcagaaatttagttatggatagagagtagcactctgatgttgttgaaagggattcagaacattacatttgaaattatgtctcaaatagttagcataagtatctgataaaaaaaaaaaagcgtaaggagaatagtaacttagagttaacaagcttttttatttatttatttttaaaaaaaattccactccttttggatcttctggattgatatgacctataagtttttctccttttcaaataaatgaaaatttctccattcatactttttccttgaaatgatccaagtgctggataagacgatgccaatattttagtaacaagtttggtttctatgggcttatgttttttcagcctggatttgggtatcaacaacagcttgttcctgg

SEQ ID NO: 10725 - DNA, 13362 bp, Vitis vinifera
  Intron number 1 from transcript GSVIVT01015414001 (locus G SVIVG01015414001) derived from phytozome v7.0 (chr-ID chr1 1; pos 3399861 to 3413222)
acccacaacccgacccaacccagaagtactggatttgaaaggtccctatatccgaactagcttgcaatataaaccaagggcgaaaggcaattaattatctatgggaacttataacatttctatacatttataaatcataatttaaccatctctaattttatattattttcataagcatctttttctattttgctttctctgacgttaagatgtgtgactttcaaagccctcggcatacgttaacccttaatcttgctttcacatcgacgaaggataaaaacaagtttgatatttaaggttatatttgatttccaaaaagtatttagaaaaaaaaagtaagaaatataattttgcatatttgattttaccatgaaaaatacaaaaaaaaaaaaaaagtctaatataattaaaattagtaagaaacttatatgttttaaaattatttgatctttatataagataattaaataaatgaaacgagtttgaagtaggaatgaaaataactcatttgattttaaatcttttttttttttaattttctttccctttttctttccttctacattccttcctatttttagttcctttatattttctctcaaactttccaagaagactatatttggtttttgaaaagtgttaggaaaaaaaaaatgctaagaaaatttatttttctatatttggttttactaagaaaaatgcaaaaaaaagtcaaatataattaaaattattatgaaatttatatatttttaaatcatttaatctttaaatataagaattaaataagtaaaataatatataaaaataatttatggactttaaatttattttttatttttcttccattctaatttccttttctatttttttcccttacattttcttttaaactttctgaaaaccaaacatagtctaaaattatatttggttctaaaaaagtattaaagaaagaaaaaatgatattaaggaaaattattttttcatatttgattttattataaaaatatacaagaaaaagtcaaataaaattaaaattaataattctttataaaaaaaagagagttaaataaataaaatgagtttgaaatatgatataaaaataatttattaactttaaatatattattcattttcctttacttctcattttctacgactttttcgttctttttttttcctcacattttccctcttaactttccaaaatcaaatataaccttataatataataacaatctattatttataagaatcatttataagaatcatttcaaaccctagcgcataagttaaccctcatttttttgctttcacattggtgaaaagcaaatatgatattttaaggttatgtttagttctaaaatgtattaagtaaagaaagaacattaagaaaattgatttttttttcatatttgattttattataaaatatatagaaaaaaagttaaatacaattaaaattaataaaaaaacttatatatttttaaattatttaatctttgtataaaaaattaaataaatttaaaataaaatataaaaaattatttattgactttaattttattttatttttcgcattttcccacaattttttctaaacacatgaatatacacttgaagcaaccacctaaggtggcacttctgtttcagtttcattcatacggtcaagcatctcctctcccacttaagactcctcttcacaaaaacacacttgattttatataagaatatgagaaacatcacgtatctttaggaccatacaattggtgtctaaataggaagctgctactaactttctcatgtattattgaagtagtggcgctttcacttgtgacagaaccattgggcacgacctccaaagggcccatgagaaataaagtcaaaaccatgatcctgtgaagtggttcttgctcaaaatctgaagaactttcattttttttcttcctcagaaccatgatcctgagcattgactccccgtgtactaaaagcctgtaatagtaagtgacagtaaaggtcgtctctggaaggtcatatagcccttgtatgagctgaaaatctgcgtggaaattggctgttgatagggtggatagatcttttccatcagtccatgtcagtatagatcatgtttggatggtaatggaggccaagtaggtttccacccgaagaacacacctgcggactagaggcattggcatcacctgggcattatttttcttggatagctggaatttgacttgcatggtgttactgttttgcgggagaaaattgtcgggaaagatctcgagggaagggcacttgagagagaggtttgactttaaccagtacggaaggaatgtgggaatgggataagggaaatccttgtggagaaaaggagtgaactttgatgaaagaatattacatccaatgaatcatcgggaataaggaagcttttcgtgggtttgattgttcattgagaaatgagtcaatgaattatgttgatttattttcatcatcaaaatatagtttattggcattaacctttgatcttaactagcataataaaatttgatataatttgtcaatagaattcaagtataatacgaatttcttgaatttgaattgaatataatcaagaataaggaaactttttgtcgatttgattgttcattgagaaacgactcaatgacttaggttgatttgtttccatcatcaaaatatagcgcattggcattaacctttgaccttaacgggcataacaaaatttgatataatttgtccatagaattcaaatctaacacgaatttcttgaatttgaattgaatataatcgtatttgaattaaattcatatatatatatatatatatatatataatttatttaataaatagatagtttttaggttaatttatataatataaatttaatttgaatcaactcatttaatattcatattgagtaacctaattagaattttagattatttaactcatatttgattcatattaattttgattttaaataaataagttaattaagtcataaatttatctaattgagatcttgatcttatacattcatgtaagagagaatatttgataaaatttaatacttattacttaataagttaagttgattttaagttaaattatatttaaattgttgacttaaaatttattacttaattattatttaagtattaaggttatttgataaaattaacttaaaatttattctaaattattaaattgatatatttatccttataaattataattagaaacaaaaaagattaaataatactgaaggtcgtaaagtaacaaaagaaattatgaaggtaattaagacaaataatgataaaaatgtaaaataaagatgtggagttaaaaataaattaattgtttttacttattatttaaacttgtttttttttattattttaagttatatcattaaattgttttaccaaacatacttaatttacttaataacttaaattaagttattacgtcaatctgagttattattttggtttatcaaacaccctctaaacctaattattaaatagaattatcttattattaaattgattaaaggagttatactatgtattacctatttaataattagctcctatataaatttatgatttttatttaaattattattggtgtcgtatttagattgacctatttaataaaatatctaaattttaacatgaatcgtcacatctaacctctatcattactggatagaatgttaaactaagtattttctaatgggtgtgtttaaaaaaaaaaacaaaattcactatgaattttggctctatgcctaagcttgcaagatttcagtgtgaacctaatgcccatttctataaaggattcatttaactttttagcctgattgtctccctagaactctattggaaactcaggataattatggcctgaagcacatccttggcactcaatacaatgataccaaaaagttgcgtgtgatatcctccacatgcatttacgtgtcatacttgcaacaaacatctctaatctgatgtgttaattactcactagtcactaccacattttccgaagtcagaagccactagccacccttcatggccgactacgggaggccttatttgctagtgaagacacacactctaatatgaaagcttctctgcttgtttggctgagaggaaaaggatcattgcagtagccaattccctttcaattgattccgccctttgacttaaatttttgtctgctcattctttcattctttcccccgtcagcaaggatgcattttgccattttgatgaaattagtgattaatgaagtccgatcatatgtgtatttaggtttcattgctttatatttttcatgttttgtaccttaatcttatctatttatatttttatttattatatcattctttgtaccttaatcttatttatttatatgttaattatattttttaaataaacatgagatggttaaaatggaggtattccatctcaaatcattgtattatcatccctatttaagataagttatttaatttgttttattgatagatctaatctataatgatgaacttaacaaattataaaggacaattaaagatcaaatctatagcaatgaacctaacaaattatatgaacaattaaaactaatattaatgctttcatatagaggtttttattgtcaatgcaattaagcagatttttagatgagtattaattaaaatacatcgttttgttttgttttgcttgatcaagtaagagattaaatttataatatttggaaagagattttaatgtttgtatggatctgtatttttcacatgcttgtctatttgaacgacatgaaatttttattttttatttttattttaaaaaaatgttggagtcataacttattttagtttttttaaagctaaaataaaacaagaaaaaaaacgatatgtgactctgtatttggaaaaaatatatctacaaaaatcaaatctagattcgaaattaggttacttattaagaaagtacggtcataagttatagtactctctaagcacatatacaaaaattaagaatacaaatcaatgttgagaaaaataataataataacatattataagggtgtacaagagaattatgtaaattaatttattaaactgattttaaaaaagatattttaaaaattacttttttaagaaattccaaaggattttattattaataattttaatttatttatttacaaaaaaaaaacacttaacgggtgtttggtatgctagaatagggaatgagaatatatattttgttttcaaccctattttttattgaatggaatgaatttaatgattcaatttctattgtttggataaacttaggaatctaaggttgaaatgattatctatttcattccgatatttgtaataataaaaatagaaatgaaaaataaataaattaaaaataatatccttgcatataatttaaataattttcttattttaaaagaataaatttttgagagttttttgttactaaattaaagaatatccctcaaaatattagaggccataaggatccggaccaaccaaagaaactcttaagatgcaataacttagctcgaaagaaagatagagaagatagagacatcagatcttgattaatgaaattcaatgataaaatatttttagactattttataacacataagataaatgaatcaaaatatcacctacttatgatgaattgaaatcttattgataagtggaatttgatttctaccggaattattttttatttcattcttacctttataaaagttatacaaacatgaaaatgagagagagaatggacatcttattcattctctggtaccaaacaccccctcattatttttaaaagaatttattgaaaatttcaaatttactttgtttataataaaaaaatatttttatttattttattgaaaaaaaggatgaatttttacaactttattaaaaaaaatatttttatttgattttatttataaaagaattaatttctttgtaaactttatttacaaaaatattttcaatccaattttattaagaaaatgatttatacaactttaatttacaaaaaagactcttatcttatttatatatatatataacctatatttataaaaatgatttttaatctcattttaattctatttaaaaacctttaaaccaaattttttgacaatttttattaaacaaatatggactcttattattaaaaacttttttttttaattttcattaagaaaactttcttttattaaaaaaaatattatctgaactattatttttattaaagggaaaggtggataatctcaaaaattttaaattagtattatctttatttatttaaaaataatttgaaatataaatattttttaataaatcatccagttatactcaaaaatacttttttacttatcatgttattcaaatcaattgacaattactttgccatgtagatgtttccaccccttttagatttattaatatgattattattattttattttattattttattatttgagatttttttctctagaaacattataaagtaagaatttgaaaaaaagaagaagtttattctagtattaataagttaaaaataaattcatattcttaataataaataaaccaataataaatttttatttattatataatattaataattgtttaatataatagataataaaatttgttgtaagtgttttcttatataaaatgttttataatatggttgtactttgacatagtataaaaataaataaataaataattattgtatattaaataaactaatcataattaaaataattatatattattaaatttattatttattatttaataaacaactttattactttttgaatttgtaattatgattaaataggatttatttgacaatatttccttttaaattttaggaaataaaaaaaatattaatcatatttaaataattagatgactcattaaaagtacatatatttcaaattatttttaaatagatgaagattatactaattttaaaaatttaaggttcttttttctatatttcatattagtgaatcaaatctcacttttcccaattttataaaataaaataaaaaaaaccccaaattagcaaacataatccatcaaaaatattccgccctagtccaagatttctaaattaattaccaaaatataagcaaagctcaaatacactatcaaaccaaagcccaaatataccacaattgtcttatgcccaaattaaataaacctaaatataccatcaaaaccaagcccaaatacaccacaactatctcaagcccaaatcaaataaacataacaacactatcaaaaccaagcccaaatataccacaaccatctttgtgaaaccaaaatttggttaatctcagttttgatgataacaaaacaaaatttagaactaatgaatatatttcaactgtgattagacaaaaagatttccaaaatggcaattacaaaaacaaaatcaagttaaaagagaaatcaataagaaaaaaagacctcaaaaataagtgtttttcaagacttaagtttcataggatctctttgtaaaattgttggtgtactaggtttttcatgcattacattttttatttatgcaccaaaatcatcaaagagttattttgttttaaatcctttaaaattggatgatttcatgtttttaactataatcttatgtcaaatgctttccaattttgtttaaaagattttaagttgaaaatgatagttgttgagccaaaaatagctcaactggttgaactagtcaacttgttcaactcaacctgtcaaacggtgcaaaaacctctctctctctctttcagaatgcttgttcaactggtcaaggttgaatttcaatcgatcgaggttcaacggtcacttgtcaagcattaaatataatgtttttagaacttagcctatcattgaatcagaaaaagttatcagttcatagtttaatggtcaaacttgtagtcgaaccccgattgaaccgacgacgtcataaatttataatttatatattattaaaattaaaaataatattttttttaaaatatataaataaattaaaattttaacaatatttattttttatctttgatattgtcaaatataaatataaatatattaatattttaaactttattaaatggaatatgtataatatttaaatgtggatgtattcaaaatgaaagaaaatttaattatttaattttaactaattttataatttcagaaaatattatattattttatccaatattataaatctttttagaaatagatagatttttttttattttccaatcttagtataaaattgtgttgtagccaagtggtgctttataatttttgcttagttgaggtttagggttcgaatccctaaaatggatgttatatatattgatttttctttaaactgaaaatagcaatcatcccacatcggctacagatgagaataagggtgcccttattaacataacttattcaatccatttgtgaaattaatgggctcaaaggtgtagcccactaaggttattaaaaagtcgggtttttgccgaaaagccattaaaatgcaagggttaggctaattgggctttcacttggactcgaagggaaaggttgggtggtgtttctatgaaagaaaatagagaaagactgggttcgaattgagccattcataaagaaccgttcggtcgacttgtggctagttccaccacccaacaatttaatggagaagatcgagaaagaccatgattggactggccggtctagttcgattttcaaaacaattattaaatgctaacgactaattaatcgatcaaatcggggtcgacgggacaaaccctcaacaactagtttgattataaaaatgctcaaatcttcgttattttataagcttaacgttcctagacatttattaaatatatttgagccttgggatagtgttttttagtacaccattattttaaaacttacatatcattaatacacctttcaatcctagtttttcttatatcatttgagtctaaagttttgtattatgattttgtgaaattatttgcaaattttttagaagaataatctaagtatgaggtattacttaaggattctcaagtgtgaggtatcctttaaggggttattcaagagtagggatggcaacggggcggggttgggaggggggcggggcgggcgggtatgctacattcccatacccgccccgtttaactttttatttaattttaattttaatttttttaaaaaattacttttaaatttttttaattatattaaaataaatatattttataaataattaaataattatattttttataacttattttattaaaaataattttttattatctatatattaaaaataataaaataaaaattaaattaaattaattttaaatttttaattaaatttaattttaattttaattttatatataatcggggcggggcggggcggggtggggcaatacccgaacccgccccgaacctgctccgggtttcaaaaaaaatctcaaacccgtcccatacccgtttagaaaaataatatcccaccccattaggggcggggcggggcgggtacccgaaatgacccgccccattgccatccctattcaagagtgaggtatctcttgaaaccaaaagttcaagataatgaattagaaccataatctaattgtattgcttgaagaattggtttggaagctagagaagagtggacgtggactgggttgtaccgaactactataaaaatcttgtgtttgcattctctattccctactcttttaccttatatgcaattgtttttataatattttattatatatttacatataattgtctcttatattcatataatttaaatttgtaaaaaaaaatactatcaccctattcacctctcctctagagtgattatcttatgttggattagcctaatttttctaacacgtttcatacccagatcaaataaatctaaatacactatcaaaaccaagcccaaaagcccaaatataccacaactatcttatgcttgaatcaaataatttaaatgaacaaagctcatatcagatacaaccaatctaacaaatttcaccaataacaaattgactcaagtttcatattaaataacaacctcaaatttcataaacaattataagaaaaaaaaaattaaaataaaataaagaaatgcataaataaacttacacatttttttggataacatggaaggaaggttgcgagtggagtatgtaagaaaataaaacaaaataaaataaataaaataaaaatgaataagaatgaaagtaaaaaagagataaaatggtgagatgagagatgaagggaatgagaggtggttgtcgattgtcggacgtggtgttgccggttagctgatggcgattgtgggataattggctgataggtggtgtggtgtagtgggtttgggtggagagaaagaaaaaaaatggagaaaaataagagaagagggagatggtgtcgtgccagaggtggagtgtggctacaagtgtgggtaagttggaggaagaagaagaaggaagaaaaataaagtgaagagaaaaatgaaaaaaatgaaaatgttaaaaaaataaaatggggaatgtctcctaacatagggtacgtatgagagggagtatggaagacaaaagaacgagggagtgagtggagtggggtggggaggaaaggaaagaagaaaaagaaagaaaataatataaaacataaaaaatagaaataaaacatgataataaagttttaaatttaaaatatattggtgtattaaaatattgaaatgttaactgggcttaaaatttaaggataaaattgagttcaatattaatataaaaataatttaggataaattttagagcctatttagaaataaataattaatcatatataaaatatattggagctaagctaaaatggtgcataaaagactatggaaaaaattaacttttggacaaactttgggatttatatattgccttttgtttcatttgtagacaaaaaataatttaaattgcatcaattgtgatgcaaaactttataattttataaataaggattccaatgagtggaatctccaatccatttcctcaattgtccctcaatgtcctagtagatattacttagaatttttttggcatttccaagatagtaattctctcataaattagcaacatgggcaacgaggaagcaccttagagccaaataatttttgtattgaatttgaaaatgatattttacattaaaaataaacaactaaaactgggaaaagtgggttttcactcactaatttgaaaaaatatagaaaaaagaatttcaactttttatattagttttatattcgtctatttaaaaatattttaagacatatgcattttttcaggaaataaatatgtgacttataaaaaaatgtatgtattttaaaatatttttaaattgataaatataaaactgatttataaaagttggtgcttttatatattcttttaaattagtaaatcaaaatccatttttcctaataaaattatagttagaaaaattgagattacaaacatctatgcccttttatttgaggaatttgggatcccattaaatccatttatcttacccttttagcaaatgaaggtcaattttcatcttggcttgaaatggtctataaaagttacaaaaaagattttccgtcatcctctagggaaaattttcattatcatgtgaaacataggaattcagaggtacggtagcgttccaaaaaggaccatttcaaccattttttagaaagttaccttttaactttctaattaaatattcagaaaatatttaattcaccatattatttagaatgaaagacatgatattcttcaagtgattaaaaaatgactttgatggattcctactatcaataggaaatttaaactaaattttgatggatcaaagatagagaataaaattgccttaggtcaaatattagaggttctaatagaataataaaaatattttccggtcaacatttagataatgattcaatagagatggtataataaccactaatggggaataatcgattcgtgaatttatagattgaaaaagactaaacaatagtaatggattctcgtgataaaaagaataagctcttacttcaattagataattaatgaaggatgtttgaaacttattcaaaatcaaatatttataaatttcatcgtatttacatgtaaacaaataaaatagtaatagattatttaattaaaaaatgtatttatgatataaaatattatacatatataaatttttttttaacttatccataattaaaaaaacatttggtgaaacgtggatattaaaaaaatctttgagtaataaaatgaaagtacaagttcaatggtaataagattcacacaaaataaggattttgttggttaattatacttcgatgtaactcgtaaacctgttcttatagggtttccttatccctttgaaattatcgtacatctttaacaatttttttttttcttctcttcttccgattaaaaaagattaagagtagttattataccaaataatctgtcgcctcaagtctatacatgggtggttacccaatatgacatatgagatgtatccacgttttatctgtttttaggaaaaataatatttaaatacaaaagaaaattattttatttttaaaatagaaaccgtttctaacagtgaaaccatccatgactacaagtggtgtaacaactccatatctgttttcttgctttgcaatttgcatgcccatcacccttttccaagtggaaatatattatcatgacagcgtcatcgaataggtgagattatgaatgtaaaacatatagcagccgattcagaatatttaaaaataataataataataataataataataataataataaaatataattttttggatttatccaagtttccaaaagaaaacaaagttttaataaccggatacaactaaataaattaaattaaataaagaatcataatattttttataataaaaaataattcatagcattttgggttgatccaacgtggcaatatttgaatgcaaacttgcagaagatacggcagctttccagctccatggtgagacgaaggagagtagccgcaatcgcaggcagctgcttttgagacgactgattcttttatcccttaagtaaagtaagatgaaggacttactatttgactatgtttatccgtttatccattgaggtaacattattggaatttttctctatataaaccac

SEQ ID NO: 10726 - DNA, 11698 bp, Vitis vinifera
  Intron number 6 from transcript GSVIVT01034276001 (locus G SVIVG01034276001) derived from phytozome v7.0 (chr-ID chr9 ; pos 13933261 to 13944958 reverse strand)
cagcaacaatattgagggattttttccttttgaaggtattgcttattcttttaatatccttagtaactactctactataatttttttttcaattttattttttttcttgaatcatcttacaaaattatctatttttggaaactttatggcattggatttaagtcagaatgaacttaatggctccctatcaatccaaggtaaattctaattagaattatcattatatctaggacatataataaagtaattaaattattttatatattatcattacttggttatttggattttcttgatattgtttagcattttatataggaaaatgaaatggaaaaaatcaacccatatttagtgtttaagcattgggctagtagtatatttgtcttcccaatttaatcaaagagaaaagtcataaataacataatttaactcataccttatattgattgaagagattggactagttttggatttaatggtcaatatttggtcaaaagaacttcaatttgaattaccataaactacataaagttgtgactagcgtaattaaactcttttattaatagatgttcatagactagtattataatcccccacacacacaaataatcaaattttgaaattggtcatcaaataactatgcaatatacaaaactacaaaatgagtggtaggtcataattaattaaattcatactatattcaatgatggtcaacacatgtcaaggaaaatttttggcctaagtgtaagggctcacttgctcctatatagatgttattcactttgggtcaaggcctactttaaaatatctctatacatttatgagaagtctactaaatataaagtcatagaaacttttcttcttaggtgatgtggaatttcacattaggaccaacatttgatatattttgaaaacataatttaattaacattctagaactaattattagttatccatttataatcctagaggaaattccttttacctatgcaaattatatacctctagtaattacgtttaatttctcatttacaacttcctaaaataatataaaaaatgacaaggtgtacaatatcagccaatatgggtggaatatacagtgagacccacaatgctcaatataatactagtatctatgtcatctaatagcaatgaaagtactaagtaataaaaacaattgttttgggtacttcatgcaattagtctggtaaaaaaacaaatctaaggaagttagactcatttactagccatttaacatatgagtagaacctattgaataatttgcaatagcacttactttagtcatgtccaaacttattgcacattgtgcaaaaaaaggtggtgctagaggatgcttccacataagaaataccctacttattgtttcaaaggttgttttcccatttgtgggagtcttaaccttgctaatatattctatgtcatgtttatcatatacaaatttttctttactaaacatttctttaatgatcttggacctaagattaaataattcattagtattgttcatgtcgttcctcagcttttcaacttttagagttaaatctttatctttatcattgatagtgttatgtttagtccttagaaactacaccttattaacaatatgttcatttaatatgttgacatttttatttttcaaagaatcatagagctcattaattttaatgtctttttattcacttttatgctttcaacctttgtttttagttctcctatataataatgcatcatagaccccatgtacatcattaaaataaaactcatttttttcattaggattcaactaacccaatggatcataatcaaaataagctacatatgaacaaaagcaataagattatcatttgtacatttttactttcatttgagttcttagccctacaatcatcaaacatggaattactccaagtcacccacatagccttcatacctaatgtttttaaggcatggacaatcaacaaccatgtgtctcattcccccacaattaaagcactcaattttctttcccttttgctctttagagtctaatttggtgaaatatcttttgtgaggttctatggcattttaattttttttaaagaaaaatgaaagctcaacatatgttaaacattggtcattatgttctttagattcattagtttctttcattcaagcttttaaggcttcatccttaggcttcatagaactaggtaagggcatcttgtaagtttgaagggattccataagtttattaactctaattgaatcactgtctttgcctttgttttcctctatgatagtttccttaggtacctataaggaagagagagatctaaggatttttttaactagcttagattcaagaatcttctcctctacattaagatcgagttgcaaatattactcaactcatcatagaatttagaaaatatttcatctttccacacattgtaataccctcaaacttaacatttaaaatttatattttcgacaaacttcacagcaaaaaatatctcatgcctttttaacatgttttgcatgttgtaatcctatgaaattcattagaactagcatcattaaagatgctatagagggccctcgcttttcctcatggcctttgttatcgaatttatcctattcatgttttgcctttagttcaatagtagatttactatttccatcaaatattaatggaggttctcaactaaattgaactaccttttgaacatgttctttttacattatatatatatatatatataaaatcatatgatctttccaatgaaagtagttattttcatcaaagtaaggtgggaattgaaccaaattcaactacattttgaacatgctcttcttacatcttttaaaaagagtacatatgagctttcaaataggaataattatttttatcaaagtaaggtggattatgaatgatcatcgcactctatgtagttctatgaatcaagatcaataggggaaggtgaatatataatcttgtttttttcaccaaaaattttgattttttaaaactatttaaatcttctttgatcaatatccacaatgagcatgcaatgtatgtgaaaaaatcactataaagtctcccaaaaactctatagatgtaaaaattattgtcaattaaccttagagcaaattcattaattatgaaaggcctagtacatagttttactaaaccaatcactatcttctccaaagagtcttacactacctagagtctacactcattttcatatcggtcatgcaatacctacatgtttcctagtgaactattcaataacttgataggatgaaatcaatcaccatgaacaaaacacaatcaagcatagggctttgggagtattggcaatgggtaaagattaatgacaatataactctatggtattgtatcaaaatcaataacataagatatattcatatctaaaataccctaataagctaagtcaactatgggaaaaaactagaaaaaattaaataaataaataacacaaaatttactatgagcccttgaacactcttaggaaaggcttgagcacctccaacgcttgagtgtacttggagagtgcttatgcacttcttaattttttttttctcacccattaaaattcatgttatgcagtaaggcccaagatatacctttttatattatcattaaatgaacaaattaacctaaccccacttacgtaagtgaccatataaatagatttgtgattatcttaaaacttcaaagccaatgtaaaacctaggaggtatgtaggctagataaaaatataaaatgtttggaatagattggtaatctaaactagttagataagctgactaacaagacctttaatcaagtttaccaaatattaattttttgaatggcattcacctaaaaatatatgatttggacaattatagctaaaataacttcaataaggtcgaagaagaaaataattgaaataataagttgtgattgttttataaaaaagaaagaaatatttgttgaaaagtatattcaagtgaaaaaaaattattgtttttaccattggttagatagctttcaataataagaaaagagaaataaacaaaatatattatggagtaggtgcaaacgattggtggttatgccttattagtgtcaaacaatgaaagttttaagactagaatttaatttcttgtatttcattttcttgtgttgtatttctaatcaaccaaacaagtaatacatagagaccaattagttcttttggaaatacttcttatagatgagatttctaaaaggaaaatcctagatctctccatctcccaaacctagatcaggttaagaacatgtttaactatcctaggattttttaaatcctatgcacagtgaaaaaattgtatttttaaactttatatgaattaaaatatgctaatgaaaaccatacttgagattcagatgttcctaaatcgattcatgcgatgaagatgaatgaagtagtaggaagtctcgtaaacccggagtcttccgcccaatgactcgaaccttaatcttaatacactttcgatgggaatcgaagggaaggtggaggctatgactctccctctaaaggtggaagatggctatgactctctctttagaaaaagctatgaaaccctaacccctaagaaggtatttatagggttcctactagcttaagtgactttagcccactaaggatgtgggtcacttaatctaacccaaaataagttttaattgattaattaacccaacaaggcctaccaattaatcaattagctcattccaaagactttgtttacttacctttatgcaatcttgtgtaattaccaaaatgttcttatgcacaaaaataaacccagattcaattctacccttataacctatgccgacaaggtatatgagcttaaaggatgaactattgggacccataggagtactagctccctcagaatccaattctgaagttgattcaacatcccactacaaaaaatcaactacacgtgaataccatatgtaaataacaacaagacattgtgtgcttgggtccatgaccttctattgtatttagtctctcaatgaactagtgtctgtagtttaacaaggtgaaaactatcaacatttcaagactaactctacaattcttgagttacatatcctcttattgtgtgttcaaccgacatatcttagctttccaaaagcacaatgtcaagttccatttaaggaactactatgaccatagttatgatgaatacacctccttaggaacacccaaaaggacacattgtctcaatcctatgagatatcatgatgcctctgttgagaatacctattgctaccagttttcttcaatagtgactcaatcaataaggaatatatgatcaacttacgatctcacctataagtcaaaaccactactaactttagcacaaactcaatattttctaaaggttgagagacaatacaatgaagcagcttggtgaagtcataactacttgatagtcttaagtcatgactcatcgtagatcctgtccaatgtgtaactatagacactggtgccctcactatgggaaacttatcttgatagccaataccaaccattcctcttatgaggaggtgatgcactataacctctaatgagttgcttagacccacaaaccaattgtgaacaagtcatctatttgcaaggaacctatgatttggatcttcggtacaattcctaatatacccaattcatgtacaatgcaaaatatttagattagaatacttacaatatataatgcaaggaaatatgatagataaaagtgaactagaacttcattacataaataataaaaaaaaatccacatgtttattacatcatgtcatgcttttaagggatatatcctaacattttcatcctaaaaataaataaataaatcatctatccaaaatagagcaaataaagaataaatatgggtttgattatcacaaacctatattttcacatgcaagttcaatatcctaaaaataaaataaaataaaataaagagaaaatcaaacccaaaaacaaaggtggtaggttaagtattataaatcatagtatttttaaaagcacaagaaagagaaaaccaaacccaaaaaaggaaaagttttttttctctaaaatccccattttttcactctaaaatgttcaagaaaatcgagaatctctcatgtctctagtcataaaattcttagcttcatttctccttgaaacggatattgtttgctatttttgaattctcatgaaattaaattgggattgatagcaataacttaatgattaattggaatgtaatttagatctatgggcctagaagatgacccattgggtatcctttttacaataatgactctcttatctagtcatcgacttggaatattaatactttgggttgttttatttagtcttttaatatgttaatacaaatgttatatgtagtgaaattttctacaatatttataattaaacttcaccaaaatttcaagttttaataattcaaaaatataataataataatgatgatgatgatgacactccacaaaaaaaaaatgataaaatatcaactctatgaatcctttttaaaaaaaattctagaaatagtaattttaaggttgtcgaaattaaataaaaacatgttttcacaaattaaaaaaatttgaaaagaaaaaaagaagtgagaaatgatagtaattattgaggttcttaaaattaaaatctacatttgttccaaaatttgaggaaaataaaaatgaagaggaaaaatgaggaaaaaaaagtaaagaaaaattttatatatgaaaaatcttttgtttgattattcatataaaaaataaaaggtatttagaaacacgttttccaaaacttttctcacttatttctttggaaagtgctaaagaaaggaaaaatatgttctctgattgggatacccaaaaaaaaaaattctctctaaaaaatgttaagaaggaaaaggttgagaaaatttagataatttatatttttcaaacacttaattttatttgccttagtttttctattgacaaccaaataagacaaaaaatttatattttttctattcttatcgacattttttcttttattttttaattttccaagaaccaaatgtagtataaggaagacgagaggaaaatcttttagaaattttcctttttctttatctttttcttttgtatctatctcaaaattttcaagaaccaaacatagtctaagagagatgagaggaaagtattttagattttttttccttttttttttagatccttatttatcttctcttgtatcaatgtggtgtctagattatatatatatataatcaattttcaaatattttcttttccttcggttatgatttaaaaaaaaaaagaaggagaaatggtgcaaagaataacaaaaaaataaaaggaaaaataactttgaggggtaaatatatcaaaatttcactaataaaaacttcataaaaaatccttattgttatagcaaaatttgaataaaatttttccaatgacaataaaaggaaaggaaaaacatctctctctagatcatagtattaatcacttaaatcatctaaaaataaaaaatgtttaatgctaacattatatgggttttttttctggtgttgaaaattcaacaatttggagaaataagcttgatgttattattgttataatttattataattaattgattatgtgtattcattcctataagtgtaattaagtaatttcagcctattaagttttattatttaatgacaaaatagtacctcaaaatatgtctctatttgttttatatatacattagaggaaataagcattgcaactaaggctttttggcttttcccattccttttatggtggaatgtagatgatcataatgttaatggtcatgaaatgatttaaaccaatttatgaagaagttttcctctttgtctcttttttggaaacttcttagaaatagtttaggcattaagtgtttgattttattgattgattgaatttaaatccattgaattatgcaacagttcattgtaaatcatatgactaccaagtaatgttagattgataggtttgtaaatcaaaaaattaaattaatccaatagttcaattagattatacaatccttcccttcatttcacccacatttggatttaccttcaaatctctactacatacaacccatatatgattccctccaaacttggccttcatttcttgctaagtagttttaaaagttagcaattttactatcttttatccctccgttagatgaaaactattagaattgtctaatgttagttaacatttttgcaaatgcttttatttgatatatatatatattttttgttttgtttttaaaaataagtgttaatgaatattcacaatataaaataataaattacatctcaattagccttgagatactatttattttttgcaactcatttaagttatttctcaaatgtatttaaaaatacatcatatgatgcacctagttaataaaaaaaatactataattgcaactaaatatagaattcaagttttattatgcaaaaaatatataaaaagttttaaaattaaaagaaaaagagattttaataaataataagtagtttgaagcatttatttctagaagtagagaaagatgggggatcataaaagttgaaagaagaataatttggaagtcattaaattttggaaagaaaaaaaaattgtatggagattctaggaaataaaaaataaaaaataaaaaagttaatttttaagagaaaccaaaatttgagaagaaagcggaatagcataaaagtaaaattaaatttttaaagtgattggtaattattataaaggatattatagtaatatgtgcaaaaatgaaataaaaaaaagtgatttaagtaagaacaatttttagagtaaaaaataataatatgagaagtcatcattgtcaaatatattaatataggtaaaaatagtggttaataatatagatacttcaaagaaaagtagataaatgttcctatttataagaaataataatttttttttttttcattttggtatgaacccaacaaaaattatagatgttgaaatgaggtttaccaatttatggtatttcatttaaatcattttaattattttaagaacaatttcttcttttatactagttgttttgattttcttttgataaattttataattttaaccaatttagagatattggatttgagtggtaaagagagtttaaagaaagtgtatttttaaaatatttaattttctttctctcaagtttgctaagagcaccaaacaagagaatgattttatattttttttctaaattttttctttcattctctttttcccccctactttatttcctttttcttttccttaaactttcccaccagtaagcgtagcctaagaaaaataggaaagagaatcttttagtattttttttaaagtattttttcttacctttttgtattttatccaatataagaaaattattttctttactttttatttttcttcgtgctttttaggaatcaaacatacttaaaaagaaaattaatttttaattaggagttacaaagatttaaggaaaaacaaaaaaataaattaaggaaatttaatttttgagagtaagtataatgggattgcttcatttaatacaaaatttgaataaaaaaaattctttcaatgagaattcaaggaaaggaaaaaacatctttatctatagattataaatataaattacttaaaaaatctcctaacatcacatatattcatctttctttttatggattcgaaaaagtcaacaatttggagaaaacttgttcaagaaaaaacaatttttgcagtaaaattttattatttaagatcataaatactacggtcattatggaatatgataatggtaaaaatatttgttgggaatttagatacttttatagaaaagtagacatagtgctctagtttataagaacaatccatttacttagtttagtatgaaaaaatgtaaaatgataggttttgatcatttttaaacgtagcaaacattttatccccataaaaaatgctaaggaagaacaaggtgaagaaagtttaaagaaagtgtatttttcaaaaattgaattttctttcccttaaagttggtatggacaaccaaacagaaactgattttgtaattcttttttgacttttctctttcattctttttttttccctaccctaattcctttccctcaaactttctaggtagtaaacatagtctaagataaatagagaagaaaatattttagtatttatttatttatttagtatttttcttacctttttgtattttctccaattataagaaaactatttttctttatttttccttttccttgttgcttttcaagaagcaaaccatactttaaaagaaaattaaggtatgtatctatttattctatatacattagaggaaataagcattgcaattacggctttttggcttttcttgttccttttctaatgttaatagtcatctaataatttaaaccaatttatggagaaggtatcctctttctctttttctaggaaactttttaggaatagttgaggcgttaagtgtttgattttattatatgattgaatttaaatccattgaattatgcaacagtttagttgtaaatcatatgattgctaagtgatcttatattaataggtttgtaaatcaagacaataatccaacagttcaattggattataaaatcctccccttcattttgtccatatttggatctaccttcaaatctctactacatacaacccatatatgattcctctaaacttagccttcatttcttgctaagaggttttaaaggccaacaatttaatttactttcattctttagatagatgaaaactcttagatttatccaatgataagtaacatttttgcaaatgcttttatttgattttttaaattcttaaaaataagtgttaatgaagatccataatataaaataataaattacatctcaattgacctcaagatactatttacttctactgacttattttagtcatttcttaaatgaatttaaaaatatatcatatgatacacctagttagaaaagactataatgataattaaatataaaattcaagttttaattctacaaaatatatataaaggtttttaaaaagagattctgataaataataagtagattgaagcatttatttctagaagtagggaacgatggaggatcataaaagttgaaagaagaataatttggaaagaaaaataatataaaagcaaaaataaaattttaaagtgaataataattattataaaaataaatcacttaaaaaatctcctaacatcatttatgttcatatttctttttatggatttgaaaaactcaacaatttggagtaaaagtttactatttaagaagattataaatattatagtcaccattggatatgataatggtaaaaatatttgtttaatttggtataaaaacaatgaaatgataggtttcagtctttttttttaaagtagcaaatgtttgatttttttttgtatttaagaacaatgtcttttcttacactagttattttaattttcttctgacagattttgcaagcttaagcaatttggagatactagat

SEQ ID NO: 10727 - DNA, 9867 bp, Vitis vinifera
  Intron number 3 from transcript GSVIVT01024251001 (locus G SVIVG01024251001) derived from phytozome v7.0 (chr-ID chr1 6; pos 217004 to 226870)
atactctttctcaaacagtggaggctaaaggggttcatgtggaagaggaggcttctggctctgcagaacttctgcaaaaggtatggcttcttgacccagttatgtttatagaatgtttctgaaactcataaccttcaatttaatcttctgtacctgctagagaggttatgctataattgttggtccatttcctctcattatttcggaaaggcatggatacaatttccttgagttgggctgattttaatccttgattaaaataacttgttctaggatcagaacataatctaccaacttttgagttttgttgtggttggcacacctagcagttagtgtccttgaacagaatgattcttctttagattgtgagccacggtgaatacaatgaataagtcaataaactaatttaatatgctgcattttttgagctagtttagtcataaaatttacgaatgagatgcaaaattcaataagttagacattatgataattcataatttgatacatattttgatacattttcatttagatacacttcctattttttgtctttaaaaatagaaaatagtgataacttctaaataaaacagtgttgtcaaaagcaaaaggtgatgtttaggtgataagactccttttagcctaaggcgaaaggtgaaaaacaaggcgatagcctgattatgataagacaataaaaaatatacatatattcacttatttgatacttaaccaatataagcgttgtcttcaacaatcaatactatttatttttcatccatcatgatgccttataaaattaacaaaatagtaataattattcaaagtgttaaatattatatcccacatcataagaaacatcatattgtttagcgatattcatcctatctaaatggatattctaatttttccgacatctaaaaatcataataaaaagcgaaataagagaatgaacatcctagaaaagctttgggcatcatcatcagagtcatgattgaaattaaaattatcattacttccattaagactagattgataatcctccatttcattttctctatgatcgataatataatatttcatcttatagttgtttaatgcaatgctatattgaatgaaattataatcttaagtatgtttaatcttaactcatggtcaaaggcgatctcgcctctatgccttgtgccttatcccaaagcgattgtttaggcgttgcctctttgaagctaccttgccaaggtccttaagaggtgacttttatttgccttgcttagcctgatggcctaggtgacctaggtgattggcctttaataacgttgaaataaaatattagaactcttaaagacttaaattgaaaatgtaattgttgttaaaaactaattaaaaaaactaagttgtcaaaaaaattttattacttgaattttaaaatttttgaagaaatttttaaggacatttggtaagcttatacttttggtataaaagtttctattttaaaaacaaaaaaagaaggtgtatccaaataaagcctaaaattggctattctaattttttttattttttatttttcttaatttattgaaagataggttttttttttgataagtaaagcaaaatgtattaaagaagagacggaaagttacaaagtatacagggggtatacaaagcaactaccccctctcaaagcaaaaagaagaccaacaaagtctcaccatcccttagttggacgctaaccattccaagaaccctataagggacagacgctcctctccaatatacaatctagctcagctccacaaactacaaacaaaagaattcttaagcttttgaatatctaacactccccctctaaaagctagtctattcatttctttccaaactgtccaaaaaatacacaacggtatggatttccatatctttttcctttttatttttcccacaaaagggcccctccagctagttaagacctcctttacagtttctggaaagacccactgcacacctgataacccaaggacaatatcccatagaactctgaccactatacagtgaataagtatatgatttacagttttttcttcacaaccacacagaaagcaacaattaggaagctgccatcctcttttctggagcctatcaagagtgagcacccttccccatgtagcctcccaagcatagaatgcgaccttggttggaactgaatccacccaaatgcatcttgacggaaaaacaatatcattggatctgaccaccaatctatacgcttctttgaccctaaactttccattctttcttcccttccagcagactgaatcttcctccatagaaggcttgtaacccctcagagcatggagcaagtcccctatcatatccatctcccaatcattaaagtccttcaaaaatcttagattccaatccccttgaccgaaattctgatcccacatctcctccaccgtagcattcctatgggaagccatagcgaaaagatgagggaaattttgggacagccttgtaccattacaccaaacatcagtccaaaaattgattttgcttcctttcccaacaatgaaccccatgttgtcccagcaccattcagtttccttcaaaatttccttccacacccctactccgaacgccccataagccctctttgctctccaaccatgacctttttgcccatatttcgccgttatcacttgcttccatagattatctttatcataagcgaatctccagatccatttaccaagcaaggctttgttcaagagcactagcttcctttagcctagccctcccttgcttttgcccgtacaaatcacctctcacttaattagatgagctttcctttccacgcttccccctccctaaaggaagtctctttgaactttttctaatctcctagcaattgacttaggcatctggaacagggacatatgatagattggcatgctagccaaggtgctttttatgagagtgattctcccacctttggagatatattgtcgtttccaccgtgctagtctcctcctcactttctcttccaccccatcccaaacagaaggggctttgttaggagcccctactggcaagcccaagtattgagaaggcaacgagcccaccctacactctaattccactgccatctcctcaatctcctccaccacaccaactgggataatttcacttttgtccaaattaatccttaggcctgaaagctgcttcaaaccacaaaagaatccagcttaaatgtgttaggtgctctttattagcctcacagaacacaattgtatcatcaacaaagaaaagatgagatatttttagattgtgtctcctatcaccatgaatactgcattttgagaggtagcccccagcaaccgccctcctaattaaggcatctagaactttcattcccagaacaaagaggtaaggagataagagatccacttgacgaagccctttagaactcgggaaaaaaccagctggaaccccattaactagaactgaaaacttggctgaagatatacaactccacatccaacccagccattttgagccaaatcccattttgtgtaaggtcttcaacaaaaactgtcagttgatgctatcatacgctttctcaatatccaacttacatatgagccatttctcttttcttttctgccacgagtctatcacctcattcgcaattaagaaagcatcaaggatttgtcttcccatcacaaatgcattctgggttggggctaccactttgcttaacactctcttgagtctattagctaacactttagccagcaacttgtatagcccccctaagagactaattggtctaaaatccccaagatcggctgcaccccctttcataggaatcagaaccaggaaagtattattgagacttttgagaaaggagctttgctcatgaaactccttaaacatctccaagatctcccctttcacaaaatcccaacaactatgccaaaacgccatagtaaaatcattcggcccaggggctttatccccattcatctccatcaaggctgaatggatctcattttcagagaacggaatctcaagattctctgcttcttgctggctaatttgatctaattggatcctcccaatatccgccttccaccccgagtcttctgagagcatctgttgataaacattagcaatcccttcccttacttcctgctcctctaagagccaaaccccatcaattttaattctgtccaaggagttattgttacggtgggcatttgtcatccgatgaaaaaatcccgtatttttatcccctttcttaagccatatctcccttgagagttgtctccaatgactttcttccaagagaacccattttttatagttttcctttgcttcattttttaattctgtctcctccaaagacaatcttctttcactttccacacggtcccaataatccacttgctgcaaagctgaacttttattgctttctagatttccaaagacctctctattccaaacctttagtttctgtttgatctccttcatctttgctgccaatctatagctagcagtgcctcttacctcaatccccctccaccaattccggataaggtctaaaaaaccctcaacttttagccacatgtttttgaacttgaaaggagaaggacctctccttagcccgctccctactagaagaagggggaagtggtcagaaacaggacgaggcagtcttctttgaagcaccccattgaactgatctaaccaactaggagacaccaagaacctgtccaatctagcccaggactggttgttaaggcccccgctccaagtaaacactcctccttgcagcggaagatctaccggccctaggtcatcaataatagaagcaaacctcctcatggtctgggttattctcccttgtctgcttctttctctttgaaatagggtactattaaattcgccccctaagcaccaaggctcgtcccaaattcctcttacaaccccaatctctttccacaaacattctctttcctctttggtgaaaggaccatagactcccgtaaacatccatacaagcccatcttccacattcttgaatcaacgcgatagagagtattgaccctcctcccaatccacaatttccagcgaccttttatcccagcaaatcaacagacctcccgttgccccatctcatccaaagccctccaatctaagaatcttcccgagcctaaacttctcaccaccccctctgacattggctgaatttttgtctcctgaatacacagtaagtcaattttttgattccttatgcatgtcttgataattttcctcttggacctgtcatttgcccccctcacattccaacttcacaactttagcttcattaatctactgcaatctgatcccctttgtcctgtgaagggcctttttgcttataccccttctcataattaactgagcactccagcctcttcaattccctctcaaattttgacttctccatcaattctttgctatgaattctctcccgtctctttcttattttgataaaaaaaattcaaaatttccttttccagcccctctgtcgaaaaacccaaaaagtgactaaacttcgccaagctactttcctcccatctgtcctctttctcatttttgatctcttgagcttctgtcatctctgaattccactccaccttcctctagccaaattattgtccttagtgaattctgccaagtcccagtatccattgccatccactccgggtccaacttcatttatttcccctagcaccccagagtgatcgaaagactccccctccggagtctgatcaaaagaatacaggataagatgagaagacccataaccccttttcccctctattcttagtccagagtcatacctcatggcttcctctgccagagccttgtctgttgctgagagtatggatttctcccttttcttccttatttcctctgtctcccagataactaagtgctctccctctgaagaaactcccgttgctagcaattctgcattccaggagacattccttctccaggggtcttttaactttgttttgggccatggactcacctgatctgaccttttccaactcagacgttgggcctctcccatcatgagcccatcttttaggctggctagcctttggtccaacagagataaccaccatttcctttagctttaggcctatcgctgcattcggcccacatggacccttctctatgcccttaatcactggcgcctgggcccggtctgctattcctttccagcccaagttcctctcctgcaagcccaaccccttatctgaatgcgtcagcacctcgggccgttcgaagactaattcttgggccatgggcttaattggtctggccccatccagcatagagccatcctcgtcaaaagcccaactcttggacggcccagcctctggccctgcaccttcattcaccactccctttagctttaggcccgtaaattctctttgtgagctcggcccacaggccctcctctcagatcccatgggcgctgattcttgggcccgattagctgtcacctctcggcccataaccctctcctgcctccccgttccctcatctgacagcagcagctcctcgggcctttcaagggccgattccaactctacgcgcgagctggagtgtgagaggttgtcacccctgacctccccactttttcgactgtcaactctaatcttcttgactgacgacctaagctcccaccagaggataagggcgtaagcttcctcctcaaccccaatctctagcgtactcggcttggcttctccgtccatcttaaccaaaatcctagcccattggagttcttccaacttcgccgtctgcggatcgatggcaatgaagccaccatattcatcccccacctttctcaacacagtcgggttccataacgagactggtagcccaaagattctaacccaaacttcattgctttgttcctcctccttcctgcaaccagtttttggactccatttctcaaatctcagcctaagccctcccatcgttctctctcctgaaagaagagcacgttgagcttcatccaataattcaaattccaacaaaattctatttttctccaatttcgccaaccctaaccttcctttcaatccccaagagttcgccataaatttccccaatttctccaaatcttcttaatcgcctgacttagggttccagctcccaactacacaatattccaatttttccagatttctatggatttcctccctccataccttcaccttaattgagtttatatctctgcagatcggtttcttcaccactttcgcgaacgttctcttcatagccaagtttccaccgaccatttcttcttgcatattgtcctttctgccaattgatcttcgtagtagctgtagattttccgccattgaaacccatcccttttttcctcttctaccttttgggatgtagatacagtattgctttcgttccgagtcggttacccctagccggaagaagcatcccacttaattcgcgcttcgcagcagagagtaggatttcccctgttatttccattcccttacccatttgtcttctttctcgtcccttatacagtgatttaggccctccattaggagccctaaactctccattcccactttgacccaggacgagactccgcccttactttcctttatgaatatttggggttttcctcttctctctattaatgcaagctcgaacacctttgactctactacgaacctgctcccccttcgtcttcttcaaggcccctccttatctttagctccctcgccggcgtaatcttgctttcttccatcatcacgttcttgctcatcgtcgcgttcacgctctctctctcccattgtaataaacccttgtgaaaagataggtttttttattcattagaaatggtctcacaaaagccaaaaatgatcttttagacccttgttgagtggattttgaactataaaatcagaagtttatgatattagcaagggataagtgttttttttataggtaaagcaattgtattaaaagcacctaagtacccaaaatatacatgatgtatacaaggctaaaaaaatgagggatccaaaaaaaacaaacaacaacaacatcgtcaccccactttacaacacaaccaatttataaagtcaaataaagataacatgctagatcctaaaggtaccttaacctactccaaaaatgtgtacatcaaggagcataaaatagcatggtccgttaaatcaaaatctttaaatgctattcagtttttgtctttgcataagttctaaaataagcacaaaggaattgctttctaggccttttttcttttcttcctaacaaaggcatcccaccaactgaggagggcatccttgattgagaaaggcattacccattgtacataaaaaagagaaaaataagatgtcacaacatgattgccatagggcaatgaagaaggatatggtttgttgactcttcttcacccttacacaaataacatttgcttggaagacaccaacccttcatttttagtttgatttagagttagactttttcccaaactgcttcccaagtaaaaaaattgactctcatcggcatccaaggaatccatagtgcttgtgggaaatccttttggaaagcaacctgctaaggagtaaaaggatttgacaatgaaagtgcctccttttgacaaccacctaaccatgacatcctcaacacctcgtttgatcacttgttgcaaccttctaagcaactcttccacctcccccaattcccaatcatttattggtattgtgaatactggattccaacaacccacttccctaacctgttcccacatctagtctacccgaacttctttattaatggctattgaaacaactctaggaaagccacaacctagggctcctccccacaccacttatcctgccaaaatctcaccttcctgccatttcctaccctaaaaccaaccttcttgttgaacgccttccacttgctgctccacccgaagcaggggcaaggggcaaaccaacagcatatcttccatttcgagatggtgatttagatttggattgccttccaaaggcccaccccatagctttccctcaaagctttagaacacatctcccctctttttctctgtacttccctacaatcatttgtttccaaagagactcattctcaagagcaaatctccaacaccatttttgaagaagcaccttattaagaaaagacaactttctaacacccagactttctaacaactttctaaatttatctaaatcgatctatatcgagtggtttttgagcttcaaagccaaagattgtcgtgtaagtgtaggatattaaatctgagtttaatttaaaaatttatataaacatatggagactattaggaatctctattcaacattttgctattttgattctttttgagactatattttgtcaatctgtaataaattgtgcccatttatgcattatggcctaacaaaaccagagattttcagcctctatacgatatattgtaaacttgagactttctggccctagcatggtcattcctttggctcaggagttctcagcaagatattcaaatacggtacctttgcctaacagatgcaccatttatgctggaattctgtttcaattatgtctttctagtcgttcttattggtggctcaagagttttatatcccttgctacactatatttgtattacttatctcaatattcactcttataggtagaggagagcaatgattgcactagcaatgctcatgagatgaagcaaagggttttagtaacatctcagcaagtgtcaacttgcttggttgaccttgttgcttt

SEQ ID NO: 10728 - DNA, 2137 bp, Vitis vinifera
  Intron number 5 from transcript GSVIVT01008711001 (locus G SVIVG01008711001) derived from phytozome v7.0 (chr-ID chr1 8; pos 1390876 to 1393012 reverse strand)
gaaaggtaccaaactgtccacctgctgtgctctaatcttttatccaagcagtgtccatttgttatttgttgctgtaacagtagtaagtattcattcttattgtttgaaatgaggctgaaaaacaatgaccaggctgcattatatctattcagcaactatagttgttgatgtgaataacgttcaactttgaactctgacaccaaccttaactgaaatgtgagaatgttgcaaacaacaataatctgtttgttggaggttgtttggttatttgccttttagaagtttctgttgcagctggtgctacctatcaaaaaaaagaaaagtttctgttgcagctggtgctgacttaaatttaggaaacagctacaatctgtgctagataataagctttaacgtgctattttattcattttctttgttgaatttattatgtaactctacccctctgtgcaaaacctatcatggtaatgttatcctcacttctattgcttacttgtacttcctttattaattctttatatttttgtctaactttatttgtctgatggcgcttctttcttgtatactaaaacctatcaggcgcttttagtatatcctctccttctgcctatcaggaaaagaaaagaaaaaaaaaacttggtctaattggtttctaaatgtaacttcaataggccttttaatgattgggagatggaagaagtgggaagattgctttgttgcttggatgggaagatagttagggtggatgaggaggatagggtgaggtggatggattcaaaggatggggttttctcggtaaaatctttgtatagggctttgcagccggtgtctattgcttcattccctttgaagattatttggaattcttatgtgcagcccaagataagcttcttcacgtgggaggcttcttggggaagagttctaaccttggaccgtttacaaaagaggggttgggctttggcaaataagtgctttctgtgtcaaacgtgtggggagacgattgaccacctcctccttcattgtgaaagaacaagggaagtgtggacgttgttcctctctttttttggagtttcttaggtctctccttgtttggtaaaggaaacccttttaggatggaagagcttttttgtgggcaagaagaggaaggtggcataacaactgggaccgttatgcttgttttgggtcatttggaaggctaggaatacaattgcttttgaggacggtgtgttgtccattcaaaagctgaaagtttcttttgtgtatttactttggtcggaaaccaaattgtggataaaagatggtccttcgaccttaatagattttatagattgggtgtgtttacgataagggagaagttttttttgtgttttccttgttgtttgggtccttttgtaagagagtgagtttatttatactgtaattctgagagtcgcttctttagcgctctttgctatacaattttctgcttattgatcaaaaaaaaaaaaaatgcaacttcaacactattctagattttgtagtctctcttggtgggagcctagatctttttttcgtttgcctttgacactctttgtatacatcctatataattgttgcaccccctcttttttgttgggcatcctatataaatatttctttccctatcagaaaacagtatttgtgtttggttaccaggccataggaattttaagtattcttccaaaccaagtagtgtatttgtggaagtgtgttgtgagaaaaaatatgtttggtataataagcaagatctctactgcgtactcactggggttattgcaatttgcatgcaaaggcattgggaaattttttatctttaggcgatggttgatgacatttatcttcggttattaggtgcagttttgatgccgtaaaacaaacccagagatccatctagtaattcatgttccatgtatagcatcatataattaatgatattatttgaagtttcatatgaagcatatgcaggctttcaattcatgattagtcagccttcttgaaaaatggttatatgcatatttgtgtgcttgaatctacttctgtgtgcataactgcatattatcctcaactgttggatctggtcttctatcatttgacttaaattctcatattgctgtgcagt

SEQ ID NO: 10729 - DNA, 2250 bp, Vitis vinifera
  Intron number 4 from transcript GSVIVT01034328001 (locus G SVIVG01034328001) derived from phytozome v7.0 (chr-ID chr1 0; pos 18078866 to 18081115)
cgtcagttcggcacaatattgcgtcaggttaccaatgctttgcaagtgtttgtagtcattggatattgttttatgctatagttgcttaagtgtattcagttgatttaaatcttgaaatagctgagttctccctcagttcagtagatttctatgtctatttcatttagtctcaaaatctctgggtgaacttaagttttgttatcttacattcattttcttttgaaaagtatactcaattatgataagtggcctctaatgtgaggtttcatacctgattggaaattaactactaaaacaccatagaggttggtaagatgttatataattggaagatcaaagtttcttttggaagttatattcaagcctcagttcctgttcccttatgtaaaacgttacttcaatatctctgtttagatgaccaactagttaatataaaattatattgtcagttcaatatctctaatgtgaggtttcatatctgattggaaattaactactaaaacaccatagaggttggtaagatgttatataattggaagatcaaagtttcttttggaagtcatattcaagcctcagttcctgttcccttatgtaaaatgttacttcaatatctctgtttagatgaccaactagttaatataaaattacattgtcagttccatttcttgaacttcatattaaatgggcaaacagatacatggcacatctgtctcctatataagtattttaggagtatggaatctatcaatttctaatttgattgatgtgatatattgacatacattctactgatgctgatgactctattagtaaactgcaggctttagtggtgtaaaaaaaggtgttgtttgtttgttttttaggggaaaaattagctgaatcgatatggtcggtttatagttgaaccaaaactaaaccggccttttagtgatgaaaaaactgaaccaaaccaagcttgattaaggttggtttggttcagtttagatgattggttggatgcaagttaatttaggcttaatttgtttttaagattagttgaaaccaactttgatttgaaattcaaaatatatttaaattttttatcccaaactattttttttttttgatagataaaaaggaaaatttattaagaaaaggcacccaaactataattaatgcatttaaaaattaatttatccatagtccaagaacaatgaattactttaatggagtacaatataaaaaactcatcaaacattgaacagttatatataagtcttagaatgtctgtttggttaagcttttattggttaggagacaatgaaatcgaaaatcaaattaacaaagttagttttcaaaattctcagactgaatggacctttatagttattgaaagccgaatcaatttgatcagttttggttggtttggatcagttttgttggttttatgtacacccctagcaggctttatattattgaatgagtaacaatttgagataatccagataaactacatgtttttattattgttgccaattttgtttgaactttgacacataatgtgagaatcaaatatgggaatctgtaaatcaatgtccaaaccttcagtacttgcacgtaaattaagaagatgccaaaatgaaatcatttgaaatatcctttctaataagtaatgaaaaaattttgtattgtgcaaagtggtcacatgatgaaggatggaaaaggatttaatcatcctggtacaaggttgctttagtgacagaatttcttcagcaaaaaggtttttatggactagcaacctgtgagctatcatcttaaggaatactttcaaggccaaatattttcttgagccaaaaattatggagtatgagatttcaattgatggtgatttcttgctagaataattttgcctggtgtttgctctctttctagataatactcatcaatttaactatgtttccctttcatatacctatttgtttgaatgtgtggacatcattttctgatacttgactgcaatgctaaatttgaacacattgagcaggcttttacatctatcagaagcattttgatttgtcttttctttttaattttttttccagtgctgctttttcttccatgtgctaaacttgaacatatatgtggttttgcctttaaactgaatccttttgttggaatgaatcacttggatgtttaaggctaaaaggaagataacaaatcatggctctttggcatatttccctgatgtctctgaggttttactggcagatc

SEQ ID NO: 10730 - DNA, 2566 bp, Vitis vinifera
  Intron number 4 from transcript GSVIVT01023147001 (locus G SVIVG01023147001) derived from phytozome v7.0 (chr-ID chr1 2; pos 21988308 to 21990873)
gttagaagctattgaagaattgaaaacacagtcaggtaacaagcttatcttttgaatgtagagcaatatgttgtcacttgtcacatacatttccttgtttgtgatcccttctgaaatggaacatagcttgtggggtttaatcatcttgttgaaaaaacttctgttctagagcaacaaattgctaagaaagtgtacgttgtttctgctttgctgctttttgtcaaatttcatatgtttttgggtaaaatattgacttctgacatgcatgctctttagaagatttatttgttttttgatccaattggcagactgtcatttcctctacttgaatacagaagattataagagccttgtgttaataatagttagaccaccctaattggcattggtagacggaaaggatcttagattgctaccaaggcaatcaagaggttggaacctagctaaaaagggaccctggacttttgaagagttcagagttttttattatttatttaattaatgggtttactgttcttagaatgggtttcttgttcttggtttttgagtttgcttttgttttatcttttcatttttttatgttagcatgcttgtggcttgagctttgatccttgaagatttctcattgcgctattagcttttatgtaaagtcatttgtatcttattagaagaatagaaataaagctaccaataagcctaggtgacaaacattgggcctaagattctctgcaacttgatgttgttgaatcctccaaatagcatataaatgaacatgaaaaacccacaaagtcaggccctgtttggtaattgtttttgaaaatattttctattctccaaacaaaaaaaaaacaggaaagcacataacaatttttttatttttaaaaagaaagaataggatgttttcagagaacatctttaagtttttttcagttgttttaaaaataattatacatatatggggaatgactacaaataaaacactacatataatagttttttttttaaaccatatttgaaaacatagaaaataggtttcaaacatttttgatttccaaacaaacttttgttctataagacatcagagagcaatttttaaaactaatctaaaaaattattttctgaaactgttttcaaaaatacttaccagataagcccttagtattccatgtcttttcaccctaaactttaccctttatattattctgtccttttccttgtctctctctcactctttctttcttttccttttttattttattcatttatttatttttatagcagaaacaatatatatttgtttcattgaatgataaatacaaagaaggattaataatccttccaagatatacaaatgctgaccaaaaagtagaaatgtttactgcttcagaaaacttactcctatcttcatagattataagcagacaaagcaatgtacacacactgcaaaagctatacatattcaaggaggaagaaagtctccaacaaaaaaaaaaaaaaaaagcaaagtgttttgctccttagcagctaactggtctgcaacttgattggctgagcaaggaattgctttccttcactgaagatcacaagttgaatatctcttaactattacgcaaactagcacatgtttcaggctgtcacacatttgatgtattgttggatttattcaaaagaaaacaagaaggaaaaaaataaagaccaaaattcatttcttactcaaattggttaaaaaataccagagtaccacttaaatagaaaaaccttgaccctaggagactcctaaacttactgaattccaaaatgctagattaaaaaattctcaaaaccaaatttctttaactaatatatctattaagatttttattctctgtacaatttgaacaattcagaagctttttaatgactgctaataggcaaaagctgactactattcctaaaatatgtatttttttataggcaactagtaatcctaaaatatgcagaaaaatctggaaaaattgtacaaattatgcatccttttgactgcatcaatcatgtggctcatgatgctggaatgttttgactctgcttgttgaaatagaactcattctcaactttgatctatgttatatgtcccacttatagcttcattcttgcatgtgcattagataattggtattgctttcatcaattcttatccttttgtttataacctacttgatcttgatcttttttctcatcatggtcaaggcttggcagttgaatcctcatgtattggctctactaacttgattgttcccatcttttaggaatgaatacatattttgatgtccattctttctctggctacaaccattcaagcttgcagagttaataaatttctaagtcctatgtaattagtggtgttttgtcatgttaactatatttgattcatgaatcataatccacacagctttttgttgttcaatgttcttctttcaagtgtttgatatgccttcttaattgaatcactaaataataagttcccttctcatactgattagctgttttgctgaccttccagctgattctgggaaactggtagactcct

SEQ ID NO: 10731 - DNA, 1341 bp, Vitis vinifera
  Intron number 2 from transcript GSVIVT01010747001 (locus G SVIVG01010747001) derived from phytozome v7.0 (chr-ID chr5 ; pos 22092706 to 22094046)
gtaaccccaaaaactaccagatgtgagctgcagtatcaatacaactatgtcatttatattttccattctccctctccacatccccaccccctggctttgtgagggaacaaataaggagcttctacttgatgagagcttctcaaatgagatgttacaatcctgcaccaggtcaattgtttatagaaattattttgttaaatggattctgtgaaatccaaaccatagtttgtccttgaaagctagagatggtgatggtagaagtttaaaacactaaacatgctatcatggaggttactgctgaaatttcaatttagcttccattatgtctcatggatgcccttggaaattcatcacctgactttctacatctttctcagtgtggcttgaggtaccaataaaattccagtcttatttatggtcgatggatcatccattcaaggactctttctgtttctctttgtaatgccttcatgattccattagatacttaagtcatcattctagaactttagctttagaattttttttctctttcattattattgtatattaattgatccttttttatgaaagaactattctttgaatttgtttttccttctgttatctctacaaattccatctttgcacattttccatacatgcttgtttggtatgccaaagttctcgtcagctagtaacttgggctgttcttttaattgccccgagtcggctaacgatgctacagactatttagcaaaacgtgagctgagcagagggtttatttaataagggatttttgtatgcccttgagttgtatattctttctgaattttgtgcatgttcttgtttcatccttaatctgtatagctaccttgctactcttgtagttgtatggtatttctcccatttcttttttttttttctttttttaccatcctttgtatttttagaaggattattcatccttcacttgtatttgaaaatttatgtcaataaattgtttatttctggtaaaaaagttacttgcaacctttttcaagttagaaggatatatcaaaatggagttgtttggagttctctggttaaccgcttgcagccaactttcaagtcaattccaagtttttgtgtttttcagtctatttttactctcctcaatttacccaatggattgatcttggtgatagatatcgtaggcgttgtctggagttctctgtttaactgcttccggccaactttcaagtcgattcctagtttttgtgtttttcagtctatttttactctcccagtgtaccctatggattgatcttggtgatagatattgtaggcatcatcggcgctgggttgctgagaaattgggaa

SEQ ID NO: 10732 - DNA, 22416 bp, Vitis vinifera
  Intron number 4 from transcript GSVIVT01020836001 (locus G SVIVG01020836001) derived from phytozome v7.0 (chr-ID chr1 2; pos 1320113 to 1342528 reverse strand)
cacccaaagcactttttggattgattgaaggtataattactagtgtgctatgttgcaaagtgtaatgtagatgttatagaatcatataggccctttgcctcttcagtggcataagttttctccatattaacagctgtagcatgtgtttatgtatgtgcatacatacaatgttttgaaaagctaaagacggtcttgaggcattttgccaaaatgaggcaaggtgtaagccttgaagcaaacaaggcgtaagcctcaaattaagaaaataaataataaattatcaaataaatcagaaaaatactgattaaatcatatgaaaattgaataataaaaatgtataaacttcgtaatgataagagtaagtatcttgtcattgttaattgtttctgatttagttcctttttctttcttctaaaatttacctctttctctctcatatttttgtcatataattttcaatattattgttattatcactagtaggatcttctaaggaatataattgtatccatttgctatgttatcctcctcttcagtgttaacatcctcccattcttctttttctttgtctaccaattgaagtattttttttttcaaatttatggaatttaggataaataaatataaaagaaggatgaaaaatcttctaaaaaatacaacaaactaattagaaataatgtttgaggcctccaaagtactaagtaaacctatacaatagtaaaataacacatgggaatatgcaaaaaacaactcatagttctaatattagaataatttcctttcaagagatttctccttgctaactcacacctttcgatctacactgaaaaacaattgagttggaccacattaaggggaatgcccttaaatgttgtggtgctagaggcccaaaaggaagcaaagaaatgaatgatatcccatagagcctttgaagttgttgctttgtcctaaaaaatcctaacatttctttcccgacaaacaacctaaatcaaagcgacacaagtcattttccaaagaaccttgcctctaatggagcttcccaatctcttatatgagatgatcatcctatcgcaaatacttacaggaggaaccaagtccaaattgtagtggtatttttttcttatctatcaataataagataatgattgtatattagatcaactaataggatggtcaacaattcccttattttttcttcttaattgcccatttttccttccatttgaaaggttaattggaaggcaactaagctttgattccatataagctttctaaagttgggtgttttctcttttgctcagtttttgttttagtgggaaggacctctcatccttctcttgttttcttctttttctcttgtatcttttcttcttttaatataaatttcttcgtttctgataaaaaaaaaaaatgagctttaaccaagttgagacccaatacaaaactcatgaagtccatatcaaaagtccacaatagcatagatgatagaacacataataaaattgaatattaaggtttgatattcaaaagccttgtataaaatatatacccaaagtgcttataaaaaaatgaaataaataaaatatatatcaaaagcttataaaggcttaaaaccctttggatatttgaggtttaggccttaatagccttgaggatataccttaaagctataggcctcaggaggttgagacttaaacctcaattatcgaaattgaggctatgacttcaaggctaatttgtaaaggcgagcctcaaggcgttagcctcaatagctgtttaaaacactgtgcacatatatgtattaaaatgtcacaatcattggttggttataactataacataaattttgtgcccttgttccttgaggaatgctttgacgttgttctaattgctataacttctttgtgggactaatgatttatgtttttaatattgaactatggatcattatctttaaattggattgaatattaggatcttgtttaagagttgattcaaggaaatactattgggagaaaagaacttgaatttatcaaatgggacttactaatgaatgaataatattgatcatcttgatataatgtttgtttatgacatagtttaaaaagcacaaggcgcaccgaattcacaaaagtctcttaaggcttaggcacaaggtacattataaggtgagtatttgagcgaagtgaaacacgacataggatgcatatcaattctgtaaaatatgattcaaaatccagtcaaagtaacaaacatttaaaagatgcattcaacaaaaaggtaatgagattatataaatttcaatatacaattagaaaaacaaaaaggtaatgaaattatataaatttcaatatacaattagaaattttgaaaattgaagtgtttaaaaagaaaatgtaaaatagatgaggtatgccttttcaacaaggtgcatgccttggcaagtaaggtgctataactagggagtggttgttccttgggcctagccactctttaagcatgccattaacaactatggatgattgtcatttccattagattagttaggtgaatagttctaacaaggtaagttatgaaatagtttatgctctcaacctatgtaattaatcagacattaagctagagtaatgcttttaatggttatgatgattgttagaagtgggtgctgtatctaaattacaaaagggatattagaaatgatcattggcggagatcatatcattctcatttgttacaaaataacttttgattatgattttgtcatgatgatgattatattaattatgatttgtgaatataatgcaattatgattttgactttgatggaaatgatattctccattctccattatgaaagtgctgaaagggtaacatagccgaaagagaaatttacaaatggagaggaagacgttgaaggtcttggtggagaggaagactttcttgattaggttggaaggcgagcaaggaggcgagtggtgttcaatgacagagataagtagaggctttgttttttgcattaggttttgaaaaggaagcagttgggtggatggttgaatatttgacgaaagccatagcattgaagagtcacatgggtttcaacagaaaattcaggggaaaatgcagggtccatctgatggaagttggtttcaacaaccatggaaggttcataaggatctcggagtttgctaccaacaaaatcttccgttctgatcattcctgagggcgacaagggcagaggttgggagaatattaaaaaagcgctgtcttcaatgttggtggtcccctatccgaatgcagtagtaaaaggaaggaatattagagggggaaagctggcctcacaataacgtgggctctatgcatagatcctatgcgaaggcagtcagtgatgaaggaccaagaggaggtggtctagttccagttgggaggtgggcgcgagctgtggtacgtgaaagcaagtttgacagagagaattgggctgaggttggaagatcggtggcgagaagcttagggaagaaaggcgttgtaacgattgtacccattttagctggaaatggtgtattttttgttgaaacaattgaggaagctatatttctccatgatttgaggaatttaaaggttggggaaaggaacataatccagttgcgaagatggtcgctgaaggaaaatgcggaaatagatgggaagtttagagaaggctggatcgaattacgggggttgccatttcacctatggtcggaggtacacctgaagaagattgtggagcaatgagggacggtaaatgaaattgattggcgaacattgaaactgttcgatcttagtagggcgaggttaaagatcgcaatgaaggatagggcaatccttccagctctgttagaggtgactgatggggattgggtgtttatagtcgtcatcgtagtggtcggagatgaagaaagacgaagaggtagtgaaaagggtgagctgactcgggtggctatcgcttctcacttggggacaggtggaggaagacgaggggagagaggcagatcaacggcggggggaagatatcgtgtcggggaagatagcagacaaaggaaggagggagaaaggggtaaggctgtgcttacctcagtcgacaaacgtggcaagggctgccagctcccatcgcagtctcgtttgaattcaaataagacagcagatgggctagacgggattgaagaagtgggaggagattgggccggagaagacgaggccatcgccgatgtgggctgtcgggcctgtgagaggaagacccagtcactgtcaaagcctggtccaagagtagctataatgggctgcaagcttaaaggcctgctggggttgggcctaagcccagaagagtttatcccagttgagacagtggcgtcgttatgcaaggaagaagactcatctgcaaacgaaaaggggaaaacagctcctggactcctggaggttcagtcgagcaggtttgtgaagaagaaggtgttgtacggttcaaggaagctgtggtcaaccttctttcccccaagctctgagcacggacagggaatcgggtgttgcagcgagcccattttgcgccgaaagatcaaggcggacagcgaagaggacccaaaggcagaggcttcaggtgccgaatcttaggcaaaaagaggattaagtgcaagccctctcttttctcgtcgatttccaaggttttgtaagaagaatttaagggaaggggcttcgtcgccgagaaatgaagcggatctgaacaatttttcatccgacgaagacatggaaggatttttgggccgagtggggtctgatccttgtggctcaatagtcatggttatgccttctacgtcagaaaccagaggtaaagggcctagcttgttggagaattgtggttcgatggttgcggaaaatctggaggtaacgccatcactttttcaatctccccagccatatatatctccttctagtggcttcacttatttcctcatgaatccttctgtccccattctgagtccttctacccccatgcttcccagttcagtttctcaacctcaggttcctatgaaaaatcgagtaaattctgaattttttttcaaaaaagtcaacgatgcttatgtaggtcaaacttctgttgatatccctaatttagaaatggaggcgatccagccaacttgtccataccagatgttcgagagtgtcaaccctctttcatctaatctaagatcgcctatcaaggactccagtatggttgcagttaaccagggaggtattgcgggctctccttcgggcgagttccaaatagaaggactgtcccctaggaaaatggaaaaagtacgtgaggttttaaagactctggatatcaaggtatattccaggaggaagaacagatgctccacaggattgtgagactagttggatttggttcggagatcagggtcagtgagttttcacatgaagataatcagttggaatactaggggtttgggtttaaagaaaaagagaagggtggttaaagattttctgagatcagaaaaaccggatgtagtgatgattcaggaaacaaaaaaggcggagtgtgatagaaggttcgtgggtagtgtttggacaactagaaataaagatgggcagcccttctgaccagtggggcttcgggtgggattttgatcatatgggactctaaaaaattgcgtagggaggaggtagtgttaggttctttttcggtctcaatcaagttcgcactggacggatgcgaatcattatggctatctgcagtttatggcccaaacaactcagctctcaggaaggatttttgggtggagctttcagacattgttgggctttcttctcccgcgttggtgtgtgggcggcgattttaatgtcataaggagaagttcagaaaaattgggaggttttagattaaccccaagtatgaaggattttgatgatttcataagagattgcgaattgatagattcacctttaaggagcgcaccatttacttggtcaaacatgcaagagcatctagtatgcaagagattagatcgtttcctgtactcaaatgagtgggaacaagtatttcctcaaagtcttcaaggagttcttccaagatggacatcggatcattggctgattgtcttggaaaccaatccgttcaagtggggaccaacgccgttcaggtttgagaatatgtggttgcaacatcctagttttaaggagagttttggaagttggtggagagagtttcaaggaaatgggtgggaagggcacaagttcatgaggaaattacagttcgttaaagccaaattgaaagagtggaataaggcttcttttggagagctaagtaaaaggaaaaaagatatcttatctgatttagctaattttgataccttggagcaagaagggggcctatcccatgcacttttagtccagagagctttaaaaaaaggggagctagaggagttgattttgagggaagaaatacattggagacaaaaaactagggtgaaatgggtaaaagaaggggattgtaactcaaaattttttcataaagtggccattggcaggcaaaataggaaatttatcaaggagttggaaaatgaaagtggcctaatgttgaataattcagagagcatcaaagaggagatattaaggtatttcgaaaagctctacgcgagtccttctggagaaccttggagagtggaaggcttagattgttcccctatttctggtgagagtgcgtctaggttggaatccccctttactgaagaagagatttctaaggccatttttcagttggatagggataaggctccggggccggatggctttaccattgcagtgtttcaagattgttgggaagtgataaaggaggatctagtgagagtatttgcagaatttcataggagcggaattatcaatcaaagcaccaacgcttcctttatagttctgttacccaaaaaaggcatgtcaaagagaatctcagactatagacctattagcttgatcactagtctttacaagataatagccaaagtgttagcagggcgtctaagaggggtacttcatgaaaccatccattctactcaaggagccttcgttcaagggagacaaattttggatgcaattctcatagccaatgagatagtggatgagaaaagaagatcaggggaggaaggagttgtattcaaaattgactttgaaaaggcttatgaccacgtgagttgggattttttggatcatgtgttggagatgaaggggtttagtcctagatggaggaaatggatgagaggttgcttgtcctcgatttcttttgcagtcctagtgaacggtaatgcgaaagggtgggttaaggcatctagaggtttaagacaaggcgacccttcatccctttttttgttcactatagtggcagatgtattgagtaggatgttattgagagctgaggagagaaacgtcttggagggtttcagggtgggtaggaacagaataagggtatcccatttacaatttgcagatgataccattttcttttctagtactcgagaagaggatatgttgacccttaagaatgttttgctagtgtttgggcatatttccgggttgaaagttaatcttgacaaaagcaatatctatgacattaatcttgaacagaatcatctttctaggttggtcgagatgcttgactgcaaggcttctgggtggcctatactttacctgggtcttcctctgggagggaatcctaaggcgtgtggtttttgggatcctgtatagagaggatatcaaggagattagatgggtggcaaaagacgtatttatcttttggaggcaggataaccctcattcgatcttgtctcacccatatgctatgttactttctctccttgtttaagattcccgcctcagtggcagcaaaaattgagagattgcaaagagattttttatagtcaggcgtaggggaaggcaaaagagatcatttggttagttaggacgtaatgtgtaagccgaaatcgagaggaggattgggttttggaaagatttctgtaaggaatgtcgctctcttagggaagtggttgtggggatatcttagggagggttcagctctgtggcatcaggttattctaagcatttatggatcacactccaatggctgggatgtcaacaatatagttagatggtcacatcgttgtccttggaaggccattgcactggtcttccaagagttttccaagtttactcggtttgtggtaggtgatggggatagaattcggttctgggaagacttgtggtggggggatcaacctttgggagtccaatatccaagattacttagtgtagtcacggataaaaatgctcctatttcatcaatccttggatatacccgccctttctcttggaatttcaactttcgtggaaatctttctgattctgagatagaagatttagaaggccttatgtggtctcttgatcgtctacacatatcacctttggttccagataagagatcctggtctttatctccttcaggatttttcacagtcaaatcttttttttggccttatctcaatattctgagtcgcctccagttttccctaccaagtttgtctggaattctcaagtccccttcaaagtcaagtcctttgtctggttggtggctcacaagaaggttaatactaatgacttgctacaattgagaagaccccataaagcacttagtcccgacatatgtaaaatgtgcatgaagcatggagaaacagttgatcaccttttcctccattgctctttgacgatgggattgtggcacagattatttcatttagcaaagacggattgggttcccccaaagaacatatctgacatgttatctactaattttaatggttttggattttctaagagagggattgttttatggcaagacacgtgcatcgcgttaatgtgggtggtgtggcgggaaagaaatgcaaggatttttgaggataaagcaaagaattcagagtatctttggaattctattcgttttcttgtttctctttgggctttttattctaaggtttttaaggggatacttcttaacgtgttacaacttgattggttagcggtgtgtaactagagtgtttgcttgttctctctttgtattttcttatatttgattacttgtagtcttgtttttctttggtgggaggattccttatccttctattgtatctcatttttatcaatatattcctttgttgtttcctataaaaaaaaaaaaattatgaaagtgctgaattagaaggaataaaaagaatgaagttcttccttgattttcaatttgtataaacccacatatttatacccatattctaagaaaaaaaatggaaacctttttaacttaattataccaaatccccttgattacgggattgtcttgattgtctccttaattacaaaattatacagttataatctttcctaattacattcttccacacttccccttaagctggtgaataaatgtttttctttcccaacttggatacacttgcttgaaacactgtattgcttaaacctttggtgaacatatttgcaagttggtggtcagtagatatataaggagtataattcaatccattatctagtttctccttaatgaaatgcctttttatctctatgtgctttgtttgatcatgttgcattgaattatgtacaatatcgatcacggatttgttgtcgtagtaaagtctcattgagccatcctctttaatcttcaaattttccaaaatgatcttcaaccatagcagttcacaaattccttgagccattgtgcgaaattttgcttctgcactagatttagccaccgaactttgttttttacttctccatgtcactagattccgaccaaaaagggtacaatatccggtggttgatctttcgtcaaccacaaatccaatatgatttacgtttgtgtatgctttaagtacaagctctgagcttcgcttaaataggatgccttttcctgaatacccttcaagatactgtagccctctgttagtaacttgtagatgaaccttttttgaactgtgcatgaattgactaatcacacttataacatatgctatatttggttttgtgtgagagggataaatgagtctccctaccagatgttgatacatctatttatctacaacaacatctattggtgtgcttgttggcctacatgccaacttcctagtttccttgagaaaatctgttacatatttttgttgagaaatgaaaattccttgcttagaatgtgcaaccttgattcctaggaagtatttcaaccttcctaactctttaatctcaaattccttggtcaaacattgtcttaaagtttgtctcttcttttcattatttcctatcatgatgatgtcttctgcatacaccagaagagctgtaactcccccaaaatttgaatgctcaacgaacaatatatgatttccttgactttgtttgtatcccatgtttttcatcactctgacgaaccttccaaaccacacccttacagactatttcaacctgtatagagttgttgttgttttttttttttttttttttttcagtttatacaccttttggtgcttaagttacttccaaatttgggagggacttctatatagatctcttctttcaggtctctatttagaaatgtattttttatgtcgaattgttatagatcccaattataatttgttgccaatgataacaaaattctaactgtgtacatctttgaaattgggtaaatgcctctatataattcatgctatatgtctgagtgtatcatttggccaccaatctcattttgtacctttttaacgacccatccgctctatacttaacagtataaacccatttacatctcactagcttttttcctacaagcaaataccaactctcaagttttattcttctccaaggcctccatttttgcatttatgacttgtttctaattttcatttgatagagcctcagatagaatggtaggaatatgaatattgttcgaacttgtaagaaaacttttataggatggaaacgacttttcgaatgatacaacatgggaaagtggatacaaaggacgtttagtgcattccctcatgccctttttaataattagggggttatgatctatgggtttttcaaactaaagttttgattcagtttgtaaggatgagaaattgttaccttatttctagaagctggtttaaattcttggacatgtataagtttagggactacaacctttttccttgagtgcactttgccaatcatttgatccttaggagcaccagtcgttcgattttgaagagtaactatgagcttaatggatgacttgagttcagagaaggagggtatagatattggatcagatgctttgggaaggttaatgagaaagggatcaatgaaacaagaatcttgatctttattttcttgaatggaattctccccttgaagatacggagtgagaaaataagactcattttcattgaaagtaacatgggcaaagataaaaaattgtttggatggtggacgatatgcttatatcccttttgagttgaagaatatcccataaaattacatttgactactcttggatccaattttccattattttaactatgaacatgcaccaagaatgcacatccaaatattttaggaatgagatggtttgtggttctcatattaggataaaaggtcctaagacttttgaaagctatgattctggaaggtaattggtttatgagatctgtgacggttaggatgacttcccctaataagatttaggcacatgtttttgggataaaaatgcttgtgttgtatcaaggaggtgaccatttttcttcttagcaacttcattttattgtggggtgtttattcacgatgactcatgaattattacttcatgttgaaaatatggagttagaacttgattgaaataatcttatgtgttgtaaaattgaaacctcttgattttgacacaagattggttttttatcatgttgtggaaatttgggagaataaaactcacattggatttgtgtttaactaagaagacccaaaaaactctagtacaatcatcgatgaaagacacaaactagtgtgccctaaatatattagggacagtgaaaggaccctaaatatcattatgaactagatgaaaattgatctgaacttcttttattattagttttaaaggttgtacgcttgtgtttggctagttcgcatacatcacaatgaaaactctcaacacctaatctcctaaatagagtaggaaataagatcttaagagttctgaaggacggatgtctaagcctatggtaatgaagccaaattttttctttattgaaaaggtggtgctaaaaaagaaaagatatgaatgattcgcttggtgtcttaaggtagtatagtttgtttcgttccttttcaagtttgatcatctttcccaaatcttggtcttaaaatacataatgagtagggtaaaaaattacgttgcaacccaaatcttttgtaagcttttgtatagagacaacattaatagacaactttggaacataaaacacatttctaagtgtgagtgtaggattaatttggacatttcctatagttgctatgctggttaatgaaccatcaattgtagctattttcctattgcttggataagggttatagttattaattggtgtgatgaatgagtcatgtgatttgtgacacctaaatctataacctatgaattggtaaaggtttcatctgacacttttaatccaatggaaataagatacttacctgaaagtgccagtgagtaggtacctaaaggtttctaaagagttcctaacaaatttctccgtttttcaattttctcttgattgaatccgccttgttctggggatatttcttcaactggttgaacaagagacaagtgtgcttgcccattattcctttgctaccctccattgtgacctcgctctttgctagatgtggatggcttgccatggagtttccaccatcgctcttgtgaaaagagagaaaaagggagaatccctaattattgttattgaaaagttgtgaagaatacacattggacttgggtatatatatacatgttagtgggacccacaatacaataaggaaagaaaaggaaaaggaaaagtaaataacctaaataactgtacactatctaacactccccctcaagctggagcatatatgttatatgcaccaagcttgttacaaatgtatttaattctaggacctcggagagatttagtaaaaatatctgctagttgataatttgaattgacaaaactagtcgctacacatcctgatgcgatcttctctctaatgaagtgacagtcaacttcaatgtgtttggtcctttcatggaagactggattggatgcaatatgcaaagcggcttggttgtcacagatgagcttcatctgttcatcctttccaaatctcaactcccgaagaagatgtttcagccatatgagttcacatgttgccagagccatagctcgatactcgacttcagtactagatctggccactacatcttgtttcttactcttccaggatattaggttacctccaataaaaacacaatactcggaagtggaacgtctatctgtgggtgagccagcccaatctgcatctgtgtagccaacaacctgggcatgacctgtgttctcgtacaacacaccttggcttggtgtgtttttgatatatcgaagaatgcggattacaacatcccaatggctatcacatggtgattgcaggaattgactaacaacacttacaggaaaagaaatgtctgaatgagtaatggtgaggtagttcagtttacctacaagtcgccgatatctcccaggatctcctaaaggctccccctgtcctggtataagtttgacatttggatccataggagtgtctactggtttacagtctaacataccggtttcttccaagatgtttaaagcatatttcctttgggaaagaaccacaccagaactggattgagctatctcaatccctaagaaatacttgagtttccccaagtctttagtctgaaagtgggtgaaaaggtgttgctttagtttttgaataccattctgatcactgcctgtaatgacgatgtcgtccacataaactaccagataaatacactgcctcgaagagttatgatgatataaaacggaatggtctgctgtattgcagaacatgccaaactcctgaacaacagaactaaaacggctaaaccatgctcgaggagattgtttcaagccatatagagaacggcgtaacctgcacactaaaccagactccccctgagcaacaaaaccaggtggttgctgttgatggcaaaattcccctgctgcaatagtaatcaccagcaacggaatctcgatcaacgcgttacagtgattcctccttcctcctgcaaaaaagatgtccgaatgggttgtccggacacaccctccgatgattaagttagtcttttggaagttgttggaaaatagagttttcctttgggagtgttaccccgtgattttcgtcaaggatgcctcccttcctgtgggtctccttagagtttatatatgagtcagagagtatggcctcgctgtgctagcgggtcccatcgtcatgattgcgcctcatagggtagcgaagcaatcatgatgtttctggtgcgaggtggcggctgtgaggagggtattcaggcggcggttgtcgcctcaatttatgattttaggtatcggggatgcgtcaggcgatctgagaagatttgggaatattttgtcaagcgtatcttgcattaaagataagtgacagttcaggagacttggtcgtcaatattgtcggagtttgctttttgattgtgggcggaagcggatccggcgaatcgcgagtgtctgacgagccaagctgtccggggaatctgaatctttggctgcggatgttctccgggcaagcatgaccagaggattcggacatgtctgaccggggaagttgaatcgccctcctcttccatccggcggcaggcgccggctttgaaatacccggagacggtggaacgtcggccgtacagaatttccgtccgggtggaatgagcgatgccacttgtcgcaaggggggccgtctgcgtgtccaaggaagagggagccacgtggcactttttagggaggatcccacagttgctccatataaacttcctcagcaagatccccatgaaggaaaacatttttaatatctaactgataaagaggccaagaacgcatagcagccatggagagcaatagacgaacagaagctatcttggaaacaggagtgaaagtgtcaccataatcagaaccataaacctgagtatagcctttagcaactaagcgggccttaaggtgatcaacctgaccatcagggccaaccttaactgtgtagacccaacgacaaccaactgtagatttacctgagggtaaaacaacaagatcccaagtgccattggagtgtaaagcaaccatttcatttaccattgcctgtcgctagcctggatgggaaagagcctcaggggtgctcttgggaagagaaacagaagatatagcagaaacaaatgcagaatagggtgaagataatcgatggtaactcaaaaaattgtaaatgggatgaggattacgagtagatcgattacctttccgaagagcaatgggtaagtcagcagaaggaggcagagccggggcaggagaagctgaagggataggaagtgagtcagcaggtacctcggccaaagaaggaggaacagcgacacgatgacgacgatgataaacctgaagtgggcgagaaggcactgcatcaagtggggagataatgggaaggggtaagacttcagaaacaggaagagacttagaggtggagaagaacggtgagtccttaaagaaagtgacatcagcggagagaaagtagcgatgagtctcagaggaataacaacgataacccttttgaagtttgaaatatcccaagaagatgcattttgtggctctggcagaaagtttgtcctgtccaggagtgagaatatgaataaagcaagtacaaccaaaaacacgaggaggaaggaaataaagtggttggtcagggaaaagaagggaatgaggaatctgatcgtgtaatacagatgagggcatacgattaatcaaataacatgctgtaagaacaacatccccccaaaaacgaaaaggaacatgactatggagaaggagagtacgagctgtttcaacaagatgtcgattcttacgttcagctaccccattttgttgaggagtatgagcacaagaagactgatgaatgatcccatgttgggacataaatgaagtcaatggtgtagaaaaatattccctggcattgtcactacgcaacacacgaatagaaatattgaactgggtttggatttcaacataaaatttttggaaaatagagaataactcagctcgatttttcattaaaaataaccaagtacatcaagaatagtcatcaatgaaagtgacaaaatactgaaatcctaaagtagacgcggtccgacaaggaccccaaacatcagtgtggacaagttttaaagaagactttgcccgattattcaaacgctttgggaatgagacacgagtatgtttccctagctgacaggactcacaagcaagcgacgacaaagatgaaaaactagggaccattttctggaacttggatagactagggtggcccaggcgactgtggatgaggaggggagcatcagtggaaatgcaaattgcaggagttgaaggtgaggtgaggtgatagaggccttgagactcacgtcctatgccaatcgtcttccccgtacttcggtcctacaaggtcacaaatttatcagagaaagtgatagaacagttaagagtgcgagttattttgttgatggaaataagattaaaaggacactcaggggcataaaggacagaatggagaggatgagcgaaaccaaaacctttagccatagtttgggaaccattagctaaagtaacagtaggtaaggtagaggtagtagtaatagaagagaaaagatccttattaccagatatgtgatcagaagcgccagaatctagaatccaaggtccaaaagaagatgtgtgggtaagacaagcagaagcattaccagtctgggtaacagaagcaacagaagttgacttggtggcctgatagcggagatagtcatcatactcactgtcagtgagggaaataccctgagatgtggaggaactgggaggttgaggcggctgaggatcagatgactaggccacgtgggcagtgcggggaggccgcccatgtaactgataacaccgatcacgagtgtggccaagcttattgcaataggtgcaatgaggacgttggcctctacctcggttaccactgcgtcctcctcgagagttagtttgagaaactaacacagaagaatctgaagtattatcagatggcaaagtttgagtggaggagatatggaggaggcgagcaaacacatcatccaaagatggaatggaggaactgccaagaatctgatcgcggacggtctcgagatctggacgaaggccaataagcgtaagagccatgaagaacttgtcaatctgtgttcgttgatccccaacatcagtagtaagaggcatcacggtcaagaattcctccttaagagaggcaatctggccaatataagtagataaatccatgtcttgttgtctgacattgacaatagaagaagccaccttataaagacgttggatatcattcgtgtataacccttttgcctgattccaaaatttaaagcatgttttataggcccgaagatgaagcagaatcttaggatcaactgattgccataacacactacataactgtgcatctatcttcctccattgtattctgtcaacctcaggaatatccgcctcctgcgtaacaaggtgatcctcataaccttgacccataaaccaaagctccacagaggcagaccaggacaaataattttcactgctaaccaatttcttcgaagtaatcataggagatccagatatgacagaggaaaaagtggaacttttagtagccatatctacttatctggagaacgaaatttgtttggatcgaagagagccctaatacggcttcagattgcggctgaaagaagaaaaaccgaggatccgtggctgtgagagaccaaataataaagaaaaacaaatgtggtactactagaagggtagaagaacacttcctaagacacgtgcagggctcggggtggagaggaagtcaccggaggtcgccagaaagtctgtttagagggtcggcgcgtggctgtgattttccctccggtgctttgagaaaacttgaagatctcctccttgcgcacttgatggtatggtcggtgtcggaaaaggacttcgtcggaaataggtcaccggaaaagtcgcttgcggtgagggttttttgactgcggtgagggttttctgatggcgatacgattgatcggaaagctttaggagatgggaagggtgaccggaatgaaacacggccactgaaagatttcccagaatggattcatggataaatcggtaataattagggttttttttttctccctaagctttgatactatgtgaaaagagagaaaaagggagaatccctaattattgttattgaaaagttgtgaagaatacacattggacttgggtatatatatacatgttagtggtacccacaatacaataaggaaagaaaaggaaaaggaaaagtaaataacctaaataactatacactatctaacagctctcatgtatgtcttgccttctagcagtaagtgcattataagttatccctgttatcacaatttggaacccttgaccaaccaactcttttatgatccgtagtgcttactttttgattaattcccttgttggcaaccatagtcgagccttctaaattatgaggttgaagcatgacacttcacttgctttcttctgcttggataataaagataatttgattcaaagtctagaactctttgagaagtatttgaactttaacttggttaaactcaacattgagactgactaaaagaatcatagacttgatctttttcgattttattctttaggattgttgcatccttaggacattttgtctcaatgcatcgatattgattgagttcttgccatatatttttcagcatatcggcgtactctatgactgttttgtttccgtgttttgctgttttggtcttgacttttatttcataaacttgggctgcatctagtgcttttaagtatgtttggtgaattgcattctagatgtctttaacaattgttaggaacgtatgtgtcattgattttaggtgtcactgagtaccacaaccatgccataatcattgagtcttgctcgtcccatgcatcaaatcgagggtctcttctttgtggtccaattcttaagagatgacttaatttcccttttccctccagaaaagtacgaacaagttttgaccattttaaataattttttccattaagcttatatgtcacttgaatattctgcaattctcttatcgtgtgactagttattactgccttagactgggtggtgatagcaggagtttctgatacctcagacattttttttaatataaaagagcttatttgaaggtcaaataacccatcgtagaccacccgtagagctgaaagctatgttagaactcacgctggtgtcgatctgggatagcgatagccacaataattgtgttggaggttcgacactcttggtggtcgttggagcttgattttcgatgatatcatcgacgacataggaatgactgtggttgttgggtcgtctattcctctcatgatgtgttcacgatcttcgtttgcagcaacgacaagtatggcattcaatgtgaggtggagatgtcatgtatgaggattgtcatcgttggtagagacaatgacaatagtgatagtgatggtgtgatttttgtttcgtgatgagtttgcaagattggcggtgtgaaggtggtagggtgaggtagagagaaggccaatggcgaggaagatccaagggtgatggttaggctaagacaaacgggtgaaggcgaggggtttgctgaggtctttgactgctttcacaatcgggtttttctttgttagggtgaggctatctctgcaacaatgacacaattcaaacaagaggaaaaatcttaaggtcgataatgaaggtaaaaaattcttctcttcttgattcctagatttatgaacctaaggctctgataccatgtagaagatgaagaattggaaggaatataaataatgaatttcttcctttattttttagtttgtatagacccacatatttatacaaatattcctagggcaaaaaataaaaaccttcctaacctaattataatagattcccttgattacatgattgccttgattctctccttaattacaaaattgtacagttataatttttcctaattacattcttctacaaaattgatagccatgatgtgatgtggtgatgatgtgttgaagaggatagtggcaatgagtgataatcactgtcgttatgggaggttgctttagtcttaagcccttgttgccaaatcctaatcctacgcatatttaggaactttagttgaaatgaggaaaaggatcctaatagctaaataaaactaactaaacccaaataagaatggacaaaacttgatattagtcacctattaattgttgtcaccaacactcagaatcttgtgattagaaaaagtattccttaatagaaatttcaaatttctccaaatcagaagaggctaggaccaagtaggttttgttcatattccacaaaatgtactctatcatgtcatcctggttagcagtccctgtcagacttacagttataagggctgtttgactttttgaaaatccattgtgtgtcacaaacatggttcatgcaccagtttaggaaatcctaacctgattttcttccttgttcatttctactagcattatgcttcagtttgctataaaaaggattggagatgacagctagaggtacaagatatgatatgcctcgcatatgccctcagttgggggaaaaataaccaaggtggagttctttctaggcttcttatccttgtatggtaatttactgtccaggttgtcaatatttgtaaaaatatatgtagtaaactcacttctgatgcctattattctgttcctgttatgggatagttcaaaccttgaaacaaacatcatcaagggtttgctgcgttagaaacttggtaaacaccttgcaaatcagcctatctctaaaatatataattcatacagaactgaaatcttgaaagtttcttttcaagaatttattgtgagactgataattgttgaagaaattgatgatagctaatgttcttaatttcttcttggactttccatattctattcttatatttttcaatattcaattagtatactaacatcggatgcttctaagcttaggacaggccccatggaatggcaagaggctgcacctccacctcttgccagttcagaatatataactcccatgatatgctatacttatattctgcaaagaaacaaaaatggtggttcagactttttttcttttattgaaatatatttgttttgaccattcttccagtaaagcagattctttgaagaaatatataatatagtaacaattttatggtaaacaaaagtgcaaaagtgctctcctgaattctccagaatttgatgagggagtaatatgaaatgtggcaattttaggcaagttttacaatctacaggtaattgatgggttggtgagttttagagggttgaatacttgaatgtctattgaaactatatcataagctgcttagtaacatagaatatcatgaccaaatcttttctatattgatttcccaacgtttatgctcatttggtaatattctctgatagccaaaacctttttaaagtctaaatgcaatccgttttagcttctgatatcgggttatattttaggacattctcagcagtttcagttttcaattcctttcttgatagttgtttggtaatatgtttcttaatttttttctttacattgaattgaacctggaaccatctctactgctttttttcttctttcatgaggatcaaaggggtaatcgttgatgctttcctaacctaacccaacccaatccaaatcctttttccttgaaccaggcctcaggggctttttggttttatatttctggttctgcttttggatttaatgtttcacatgatgatgtaatttcaatggtgttaacgtgtaaacctacatatgcatgcagatattgaggtttctgctgaactgaaattcaagcac

SEQ ID NO: 10733 - DNA, 4079 bp, Vitis vinifera
  Intron number 1 from transcript GSVIVT01003936001 (locus G SVIVG01003936001) derived from phytozome v7.0 (chr-ID chr8 ; pos 8141757 to 8145835 reverse strand)
cccacacaccataacggaaaagatagacaaaaaatgtctaacaactccacctaaaaatcctccttaagcaagggactatttgggccataaactgcggacaaccatagaggtccacaaccatccaaagcaaacttgactgagaccgaaaaggatcctattaccacctcctcactgcgcaatttattaaagtcccaaataaccaaaatcccacctgaagccccgcacatcggaagagcagcccattccttatttctgaacgtccaaacactacccacaaaccttctatcacactccaccttttttgcttcttggatcatcactacatccggattctctaacctcataaaatctttaaccacccttcgctttttccttgatcccaaacctctggtattctaactaattattttcatggaaaaacaatgccgaccctaaacgcccaaccagttccaataggtctcacaaacctgtagagcgtctgctcttccttctagaataaaccttaatatccagagagcttaaaacttcatgcacttcagccattttcttgtgagacagaccttcaatttggaattcgcctgatggggagaccacaacatcaccctggctaactgtaaccaggttgaaaacctcactgggcaaattggatttagtcttaatggggttgaaactctcgggcaactgggttgaacaagcagactgggaccccaccacaacaaggttaggattgccaaaacagttttgacataaagtaccaacatcgtcttttttggaaaaaaattcagaaaatactcgattttccataggaaattgagactgaatgattgatttagggagatcgggagcagaagggctaaaaaatggaagtgccaacccagaagaagtgggaaaaaaagacaagggtgactgagaaagtgagggcgagtttacctccaagttttccgctaccaacattccacaattccccaaaaagttgagcccgttacctctgatttctggattagaaggcaaaaacgtgactgaaaaaccacgaagatcggaccccactcggcccaagaatctttttttgttttcttcaaaaaaaggtttgcgcacaacctctttgtctctagatgacgaagccccttcccccgaacaccgctttcaaatccttggcgatcagcaaaagaagataggactcgcactgaatcctcgttcccactgagctcccaccccgaaagcctcctcctttggaagctcttcactatctgacgaaggcttcctgagtaaaagaggctcgctgcgacttcgagaaccttgtcggcgattggaacttggaggaaatagggtagtccatagcttctttgaaccaaacttcacttccttcttcgcggattctctcgtctgaacatcatgatcgtctgaaactcctttcccttttccccctgcagcgacttcttctctttgtgacggaacctgcttttcagagggcttcttttctccttctccttgccccagcctcaatgggccttttaagttacaacccatttttgcaacatttagtgggctgaatttggggagagattgggcctctctctcaaaggctcgaccattctagttttaaaaggcctcatccccgccgatcgtagctacgcccgccatctttgtcccaataggcccaaagttcagtttttttgaattcaaattgaaccagctgttccccatagcctgaccactcttaccacgtgtccccactggaagaacttcagccgacctcctttctcctcccttcttctttctaccaacttccccaacacgaaaactacctctagctgttgatctaactctctcctcccgccttccaccacctgtccccaagtgagattcaaaaaccacccgagtcgactcacccattgctctgccttttcttgacctcttcgtctctgaccactgcaacagaaatagtgaacacccaatccctgtctatcacctctatcaaagctgggagaactgaccaatccttcattgcaagtcagagaatatatttgaaactcgaaataagcttccattcattctcacaactatacaagttgaaaaagagtaaaaaaggggttgtgtatgtaatacctctagacatgtccaaattgctatatgattttttaaatgttgtgcacacatgatttacatgatgaattgccaccaatgtcaagtgttcaacatgccactgatttgctgccaacttctcaattatctggcctcccagcatatcttatgaacccattggagcatgcagaactcaatatgcatgttaaggagttgcttttgtaggggtttatttgtgaaagtcttagtccataatccatatgctgtatcagctttgctcacagtaaaaaggattatagttggcatatatgtgtttataatcatgcaataagcaagattacacttaaatacaagtttttggtaccttgacttaatgatacgctaagacatgctggcaggttctacagtcttttcaaaaattgatttgaagagtcttcgttaccaagttagaacaagacccaagaataagtggaatatgactttcaagacaggctggttatctatcctgctcttggtgtgattgctaagaattttattttgttttattttattttttgagtctttcttgaccttttcatcttattctataactcaagaaacttctataatcctgaaaaatttaacagtcctgcatctgcactcaacgaacgatgtcttgaacatgcactccaaaatagatggcaaaatgtaggaggaagaatgagatcaatagattgtataatgtagcactatgctgtcaagacagttcttaaaccttctcatttctcatcatacctgatgttgaaaaaattcaaactctgtttgaatttgctttgagactagtttcaatatggtttgatcttgaggaatcaactcttgtccttgaaatgcttttagtagctagggcttggaatgaacttatgagggagaggaatgaagttgctttggctatcaagttagcagagagtttaatggactccaagggaaggggcagacaagaacaaaactcttaagagcaagaagttcagtgggaaaaatgatcatgaaacaacaatatccgaaggaaatgttgactttcaacagatacaaaatggctgcagaagtacatatatcattccaacttttataaaaattactcaaatttccagcaactgtagtccttaaacttctcaaaaactccacttggtaaccaatctacatgttagatcccttcattcatatcagcgaaatataatattgcatgtgcggagttggtggtagtcctttatggggttcattgaggagatactttttgtagttgaagctccattttaggatttcattctgtataattctgtcgtaattccttaaagatgcatgtgaacaccatcgtcttaggacttgttagatatgtatcttcgtatgtcacaaatcacccataaaatatgatttaaagatccttgttgaagctgagaattctggttaatgtaatatcatgatattttcatttaatgtagcaatactattattgatatggcttgttctgggctaagctctgtgtgtgtgtgtgtgtcttttgtgcatatgcaagaacattattgtaaaacaatccattctgctaatacaaaatttaggtcatctggataatgttgatttggttgattaatgctagtgtttatagttggtacattaggttttaacttgctctttcccacttgatttccttgattctctttttcaacctatttttctttgtcatttgcatacatgtgtatgtacagattgcttagttaaaaatctcagtgccatttgttgaaaatttactattttaggaaagacataaattgtatggttattacacatttaatttagctaatagttcattttttttttttaaatgttgttagacattgtgatgtcacaagaagttgattggaggcatttacattaccaaatggggctaattatgtgattatgtttcctatgtaatgtggtgacctgtgattccccacccacttaaactattgtttgcaggttta

SEQ ID NO: 10734 - DNA, 3617 bp, Vitis vinifera
  Intron number 16 from transcript GSVIVT01010139001 (locus GSVIVG01010139001) derived from phytozome v7.0 (chr-ID chr 1; pos 16157358 to 16160974 reverse strand)
aaaactctctctgatttgagcattgggaggcagcggtaagcttatctggattttttaattttcctctatcccaagaaagtatcttaaggcacccaagtctttgatttcaaattcctttgctttaagattctttagattcttcattttttccacatcattatttgttacaattctatcatccacattgatgataagttcagtagttttcttgtgtgaagagtgtttaatgaataaaatatgatccccttgactttgataatacacaaatttaagaatagacttaggaacctctcaaaccatgctctaggacatgtttttaacccatataaggatgttttttcgacttaaaaccttctcaccacttgagttgtcttcaaaaccaaatggtaaatccatgtaaacctccttggtgccatgcaaaacaacattcttaacagtaaaccactgtagtggccagtctaaatttttttccaaggataagagaatcctaacggaattaatatttgcaacaggtgcaaaggtttcttgttagtcaatcccataggtttacgtatatcccttttctactaatctcatctactgaataactttgtgcttaattgtgagaacctatttacaccccactattttttttcctctaagcaatttaacactgcccatgtatcattcttatacaaagatctcatttcttaaaaaatattgtctttccacttagggtcttttagcctcttgtacatttttttgggacatagtgtgaagctagatgagttgtataggcttcatacttggggttaagcctatggaaaggcaagaagtttgagagaggatgtctagagcaagttctcactccttttctgaaggaaatagggatatccaaatccatatcacttggatgaaaaggagagggaagaaagttacaatccccccttccacccctcaaccgcggcccccctcctcttcccccattatcaaattttaacatttgtaattttgtattgaattagttttcaatcatcctatgaaaatgtttgaaggtggaggcaactttagatttatcctgaaggaaaagacaacttacttttaaaggaccacaatcattactatgcaccattgtgcaaaggtacaagaagaagagggaacctcaaattttcatatcatttcatacaagaggtctagttgttccttggtgaaaataggctttctaaagtagtggcagtggctggtttttcctctgatgcagtctccatggaagctctttggtagtctttatgatttttattggcaggcttgtacatcttcgctccaaatcagggttttccatataacttttaacaagtgtccttagtgtgccttggcttgttgcaatgatcatacaaaaagtctctctatcttctttcttccttgatccaaatttttgtgatccaacaaaggagttttcttaaaaggtgtttagggtaaaattctcttgtgagaaaggccttatattgcccttctaccctcttcactatgaacctgagcatactcttctattaaagatggaaggagttccaaaccaaggatttaagccctaactcggtccaacttcgaattaaggcctgctagagactcaaatatcctttcttgctctatcaacttgtttagttttatggtgtctacagcagcttccatttcaaaatgttgataatggtcaagcccctgccttagaacccgaagcctattgaagtatgcagtcatagaatattccccttgctttttttcatgaatcctatttctcagatcataaatcggagcaatattccccacatttgagtatgtttaaatcactgtatcccaatgaagaggaacaatgaagttttctcatatcataaaactgagcaatattcttcacatttgaaaatggttgaatcactgtatcccaaagctctttagtcactaagaggaacaatgaagttttgctgattaccggttgcatagtattcaagaaccaaggaattatcatagtcttttacatcccatattcgaaatgaggattactgagtagataccccattttccctctcatttcaatgaacaactttatcgattagaactgcttaaggaacttttgaccatgaagttttccaattctaagttgaagagtacggttgtaaccatgaaccaaagttcgtgattgacctatagccttttcagagagactattttgagatacttttgacattgttttaaacaaagaatattcaatataaaaggaacaggtaatcaacaagaaagacaaaggcttagcaatgaaggaaaataagaatttagactaacaaaagtgggaaaaatcctagctctgttacatgttgaagagacaaaaattggagtaaaaacttttttgattaatgtcaggattatatgaatattatatactcttaattgaagcaaaaaaagaaagtaaattgtcaaagttacttattcctaagaacgattcctaatttatgctttcctaaacaaattcttgaactgttcttgcacatatatagaaatctctccctttctcttttcttttttctgatgatggaatcaggaataacggactgaggaaccatgtgttcagagctggtgtgttcggatgaggacaccacaagttacctttatctacctattagcaacctatttgggcatttacaaagaggtcaatctttctttacttcaaaaacttgtgacccaaatttattatgccttcctgttgctgaacatagtatgcccatattggaatgcaatgtccatgccccatttgctgactgccatttaacaatttcttcactgtccacctgcattgttaatattgcggttaccagttattaacacccatcatccttgcatacctagaatttaagtcgtgtttgacaatccaaacccatattggaatgcagttctcgtgtccatatttccttattatagtttggcagcttcttaaccacccgcattgttgaagttgtaattactggcttttaccaataggaagcttaaccagactcgtacattgtttgatgtcccaaaggtatggctgcagattttgccaggacatttgattttgtagagggatttcaggtactcctgaaaggatttaaagacaggatatggatcactcaaaatcctctcttcaaattccactatcatcactgctacctcatgctgcactctggagctagcaccaccaccaacctcatctgaacagcccccttcccagcctgctcccatcaccattgccccactgctgctggtgacactgccattgtgatatccagtgccatcccaatcaagcaatccattggcacctatactaaaccaaacataaaattttaaatttctgaagattttatatttttggatttatatataacctggtcctttttatcacttaggatcctgcctttcacaaggtagcatatattgagcttggattttgctaactaaaagtcatccattcaagaatagtgagtcatgtcaactcatcaatacaacctagggatacttgatttaattgccatatgcactcaagaagtttgtcacccctaataataatattgaagttttaagttgatatttttctctatgcttgtcaggccatt

SEQ ID NO: 10735 - DNA, 7237 bp, Vitis vinifera
  Intron number 2 from transcript GSVIVT01017345001 (locus G SVIVG01017345001) derived from phytozome v7.0 (chr-ID chr9 ; pos 6968150 to 6975386)
gatcccaagtaatgttttaataaatcttcagttttttatattttaatttgatttattgttgatgtttctattaatttagttatcagtttgattattgatgaaacaaaatagtttttattctgaaacggtaaataaagctttaattgttaaatctcaataatctactcggaattgtttaaatttagggaacagtgtaaaatctggtatctgtatggctagtttcaattaatatgatttttttttttgataggtagtttcaattaatatgatagtgtggttggttttagatgtgacagcatgatttggattgatgtttaacttaagttgaataatggggcagaaaaaaagtaggtagacacatctattagtttcagggctagtacaattgatgatatacttgatataagaatgtgatattagaacattaaatccagtgcaagcagaaacgctaactgatactgggtggatctatttgtccaagccactcaaccgtatctccaagatgttgatcagagtatgatgtccggcttctcttcatgaaagtactgaagaaagtacaccactatgggtgacactttatttacttatgattatgtttaggatgagatactttgatttgaaaatttttggataggtatttctttttaaaagagcagatattttgtgagcaaggactgttttagtagttttaagacgaattactgtaagtttattctgaaatgcatttatgtcattagtaatgcttgtacaaggtttacagcatggtgtaaaatggatgaagaattgtattaatatatttgtttctattgagaattcgtatcgcatgactcttagcttgtctagtgtttgttgttttagttcccatgtgttgtactcctttcaataggttcctataatatatctttctagttttcttttatagaaaaaaaaaataataaggctacttctggacaccacacgagaaatattcatgtgatttgaaaaggttgttgattgaactggagattcatctaggcaatattcttctaaatagacaacgcattttttttgtggaaacctcaaaatgtgtgaaaggacctctataagataggcataacatgggataagagtgtggatgtgtctgtcatgtccgttttttgacagacactcaaaatgattatccaagaaaggaacaccaggaatttattcccagttcagctacactggtagttgattaggttagctacttatccatcccttaatgtttataagtattctaaaatgaatgggacaccagtgtatgatactatatactgcctagaaacttcactttaccctagagcagtgatgatgatgatgatgcttttttagagggacacttttgaaaaagaatttcaatagtacaagttatgaatgggacactctaaaattgtagcaatactgctacacccaacaattgcattgcatctgagtccctttaacattggatgagataacattccatgaccttgtcaaatattgcactgaaacaaatacatccaaatacatgagttggtatgggtattttgagttcaggcttcatactcaggatccttttattttttgcttaattaattaatttacttatttttaagtttttgggttcacctacagatcattcataataaaaataggaatgagggtttgaaagatgagttatatggacctcttttttttcttttagtaatttatatttctcattagacatgatttccgtcatcccacccctgtgcacatcctactatttgcctaatgtaagtttggtggcatgaggctcatacccagattaactgtgtagtaggcaaggtgttttcttaaaatcttagactagtcattaatcaaatattccagtgagaagagatgattttttcatgtttgactgcaggaggaaagattgtattatttgacgttctagtactttagaggggcttctgatagaaacctatgtggttaacctcatggaagaaaatatcgcaatatgttggcgatatattgcgtatcggagggtatggatacgatattttgtggagaaatatcgttttggcgaaatttcgggagaaatggtaaaaaatcagcgatacatcggcggtatttcccgatacatgggcgatacggcgataaatcaccaatttttcgcgatatatcgaacagtcaacgcgggggtcaacgtgctatagtgcaactacagtgctcccccgctatagtgctgctatagtgcaccctcaaaaatgtcttttttttcttgctattgaagggactcgaaccccaaacaaaaggtttggggttcaactcatcttaccactgaggcaagtttgcccttgttaaatgtaatgcactaaaaatatatattcaaagtcatcatataaagaaaatttaaaagaatattttatagagcaaattaattataattattttataattaaatacaaaaatttcttttaattgattaccaaaaatataaaaattatcataataattttcttcataatgtttttaatatcattaataaattaattaaatattagaaaattgtacatatatcataatttattttatatcatttaatacaatttaatgaaataaatcataattttaatattaatatatattttaaaattagacatattataatcaaatatcataatattattatgaaataatatttgatgtaatttaataataaatatacacttataaaattcatatttttatcgatgcatgcgatattattatcaaatatgataaatcatattatacatatatcaaattctttaataaattaactttaaaatatctattatacttctaattacatttttatgaagttttttcttatatttttataaattttgatcaattttacgtctatcaatatttttttccaaaatatccgccgatatatctgatatatccataaaatcgaagtactgatatatccgtaatttccgatatttttatccttggttaacctatctctagatgtgatttggagtatgatttagttgttttctgtgcaaatgtctagttctctatttggtattacatatatcaaagctaacatccctgatgattaatcggaagaacaagtggagaaaggagggatatgtcccatcttttgtttgctgatgacatgctaatcttttgcgaggccaacagtgatcaattgagatatttgagttaagtgtttatgtggtttgaaacgctttctaggttaaagtgaatatgaataaaagcaaggttattcctttagggggagtagagactttggaggatgttgcttcgatgatggggtgtagaatagggaagttacctacttcttatttgggtcttcctttgggtgcctcttttaaatctcccagggtgtgagatgtagtggaagagagatttagaaaaaaattaataatgtggaagagacaatatatctccctaagggagggaggcttactatgatcaaaatcaccttatcaagtcttctgatttatttcgtttctccttttaatattcctagaaaggtgtgtttaaaactcgaaaagatccaaagggattttttatgaggcggtgatgccctagagaaaaggcctcatttggtgaattggaacttggtttgtgcagataagaaggggagaggcctaggaattcatagtcttgtaaccctaaacaaagccttgctcggaaagtggagttagagatttattgaagagggggagcccctttggaaacaaatcatcatcaagaagtttggagtagaggaaggagagcggtgaggagtgagaggaggctatggtgtgggggtgtggaaagccatcataaatgaataggagggcataagatgtagatcccgttttatagtagagaatgggagaagggttaagtttggaaagacttgtggtgcgaggaccaaaccttgaaagaaactttccctaacttatttcttttggcaatgaataaagacagtggggtgtcaaacgcatgagagggggcattgggtagttggagccctcgcttttcaagacatcttaataattgggagatgggagaagtggaggacattttgagctagagaggaagtaaggatgataaattttcagttagatccctttattgctcatacatgagggcttctagagatctttttctatggagtattatttggaggtcttgggctcccgtgagggtgagtttttttgctttggaagcatcttggagcagaattttaactcttgactagctgaaaaggaggggatggaatatcctgaataggtgctatttgtacaaagaagaggaggaaaccactgaccacctactcttgttttgtggcaaggcttagattgttgtcaaccttgatctactcccttttcagtgtggagtgggttatgcattcctcgattagaaggactctattaggttgacatggtttttttgttggtaaaaaaagggagaatgcatggagggttgccctcttatgtttgatgtggactttatgaaaggaaaggaatgaaagagtcttcaatgacatcaagcggtccaaccaagcaatcaaatcttttttcatgtatacttctgtgaatttggttagggtgtatatagaggatcacactttgtctatgattgattttatagattggttattcgtcaaataagggtaagcctttttttgtctccttattgcctagcttttttgggtgttgtttgaatactttgtgtactgttttcaccacttttaggcgtttctaatgcaatcccttttattacctaaaaaaaaaaccattcctagtgatagttgaagactcaaaacatgattggctatgcacatgacaactaattgagaccaaaataccacagactgagataacatcatagcccaatgaccaggctacatatattgtgaattctaatctttatcataaattataaattatttatttatttatctatttcattttgattggtagaactctctctctctctctctctctctctctctctctcagtactcattgggaccagaacctaaaacctcccacagccccgccccaacccattgcaacttgagcttggcctcaagggccataaattgtaaatttttaagaacagtgatcaagtggtagcaccatcctgattcctgatgggtctgaagtttgattaacaaatcattataaatgtttatggcacttcatgatttaaatgacctaaaagcatgccatcaaaacctaactcaactcaatatacaagtaattattgtacaaatagagagccaatagtggttgttccaaactgacagtgaacttgttttgagattggaagattaactcttcatgatacacaatgtaatcatgttattggtggaatctgattaaattgttgattattgcacactacctacaaagtccaccagtcattcagagagtcaaccagaatttgttacagaaaaggtgaaagttaattgagaattgtctttaattttcatttcacaaaatggatatcagaatgctgcctcaatctgcaacaattttgagaaatcaggtcatattctatacataagaatgtttacttgtaagattctggctgatggtttgttttactcaatttttctgtcatctgctatggtctgcaatgaattaaaagaagaaaatcactcttcttataatctgtgcaccataatcacttcaacttgataaaaaaaaaaaggttcctttgtttaattttattttttattttttatttttttccccttaaaacatttatggtgtcaacctcagaatgagaagaataatctgtagcatttttatatcccagttttgcttcctaacctaccctttggaagaccaaaagtgacaggaagcagagctactggaaattacttaaagtgggattccttttgcacgataattttagtgttttctttttctttcccttgttcatcataaaatcaaactgagcctaaaagagattgaaggtgaaagttggccttcaaggtggggtttgtctgtggtgagggttggtgcacacacaaaatgcttgtttggtttaatgataacacaatattggggtactatacagggggctaaaaaccctaaaaaaggtatctgagaatgctttttccaagtctgattctggctttgcaatttattctctctctacttgtctaccacgctaaataatgtaaattaagggtgttgtttacactttgtctttatttgcccaccataggctgctgctcggtgattccccccccttcttttgtataaatccatctccttgaaggttagccttcaagttagcatttgtctatggtgagggaaagtagaccccaaatgatgttttggcacaaaattaagactgtaaactggaatgccgagctccagcagagggttaaaatgccctccaaatacatttcactcttgagtatgcttttcctaaatcctgtttttgctttacaatatttcctacccactaaaccatacctagcagaagattgtggtttaaatctcatcttgattttcctgctctagaactaactggttggagattcttttcttgtgagttggtgcagctaaaacaaaagtgaagtagaaccttgtagttgaaaatggctgagtggttctgaattgccttctcaaagattttactgagcttgcccccctaccccaaaatggtgcctgtctagtcttatgagattagggcaaacagttggccttgtatagataagagtgacctggctgctgcaatgggattattctccttgtgctttttaatcccttctcactttagtggttgatatcttatgtcatgtacatggaaggtttactcacagagaattctctgaaaagccacctagaagctgctctttcaatgaattatgcaaaaaatgaggatttagcatattgtaaatgaacaaagaatatatatgtaaactagtgagcattagtggtaatgcctccttgcaaacacacccccaaatattgtccctgggactacttgagcctctcacaatattttactagttggatttttctagtaagctatagccatctcctaacttggtaatccatgcatataaatagttacaatattccattttcttcttaaagctaatatcaccatagtttttcttctctactacttagataccacttgtctttcccatagactggattccatttactgaagagatatatctgcagattgctattaaaaggttgaaggtctggagcaacaa

SEQ ID NO: 10736 - DNA, 5243 bp, Vitis vinifera
  Intron number 13 from transcript GSVIVT01035918001 (locus GSVIVG01035918001) derived from phytozome v7.0 (chr-ID chr 4; pos 5784152 to 5789394 reverse strand)
cctttacagatttgtattgataacagagtcaacaggtaaaaacatctttactgatttctggaagttgagaaagaaaatgcttttgttactattgcccttaatgtgctttgctgcttgtgttctagtgcttttttttagcagctttttcttgcatccacgttcggataagtagtatagcctttgtgtttatgagaaaagcacatgtactaaaactgtttattatgatgaaagtgaatgatataggaccattgaatttggttccagaacattttgttcatataagctaatgtcctaatctttaacctagggaaaagctctccttttgtcaaaatagttttggcaaaacaccattttgggttttcaatcaaattttttatgagcttgggaagtgctatcctaatctatgtaaggtcatatatttctttttgataggcaaccaaaaagatgtattgaatggagccagtcaaaaacaaccaaatagaaaaaggctaaagaaaaatcaaccaaaaaccactatcgacagtttgagttatcaatgaaatctaacaaagaaacatattccttccccaacaaggatctagaaaattccttgagagacagagaaaagatctctttcagcttttggtcagagagctcttcccattgaagatcctttggtttctttcacgctgcacaccagaacaagcaaagagaagccatactccacatcctcctccttcttttgtccataccctttaccttccaacccaaaaagatctctttcacagaatctggaaacacccacttcaactcaaaaatggctaaaaacatgtcccacaactttctggttgagtcacaatggatgaggatgtggtttgctagcatctgttggtaattcaccatcttcatctggttgaggacatcaatggttaggatctttccccacttagcatcccaaggaaaagaacttgttttcataggggcacaagtgccccaaatttctttggtaggggacaggacctaattctcatcatgtaaggagttgtagactgaaaagtccccttctcctcactccaaagtaaactgattcactcagctatacatccataggatctggaaacacccacttcaactcaaaaattgctaaatacatgtcccacaactttctggttgagtcacaatggacgaggatgtgcttagctagcatctattggtcattgaccattttcttctcatgaggacatcaatggttaggatctttccccacttagcctcccaagcaaaaaaacttgttctcataagggcacaagtgccccaaatttttttggtagggaatgatgcctaattctcatcagaaaagaagttatagaaagatttcaccagaaaagtccccttcttctctgcaccccaaagtaaaccattctcccttgcttcttgcactctcactttgtggatgagctccgtaaattgtatcacaactcccacctcccaatcttgaacatgtcttttgaaaagaagggataaggtgccttcttcctcccttgccatccacaagttggctactattgcattcctattggacgcaatcttgaacaacttagggaacacctctttcaggacactcacccacctatctatccaactagaatgtgattttgaggttattcccaaccaaaattgggcttctgaggctgaattcctcccatcctgttctaattaccttgccccttgctccttcctccctcctctccatattttctgtggattggcttcctcatgttattatattgaaggaggcatatttccacaatcattagcctaacaaggctttattaagaacatccaactttctaaatcccaatcctctattccccttatctttacaaattgttctccaattcactaggtgcatttttctctccttagaatgactcccccataagaaatctttatgatttatctaacttgctgctcactttcctaggcatcagaaaaagggacatgaaatatatgggaaggcttgtgagagtactctttatcagggggtcacttctcctcctttcgatgagtattatttcttccaaggggctcatcttcttttgaatgtctcctcaattgaatcccacactgcataagacatatgagatgctcccaaaggcaacccaagatagatggatgagtggctctgaaccttacaaccaaacaaagaggccaaaatgtcaaaatcttctacttcaccaatcggaattatcttgctcttttggaagttaattttcaaactaacacaagctcagaaaatagtgggactcattttcaatatttctgctactcgacattgaccttagaaaaaacaaggtatcatctacgaacaataggtaagagacttccatccttgcttcctctttaccttcaatcttaaagccactcaaaaactttcttgactgccttaaagattatgcagctcaaagccttcataactagggcaaaaagataaggggattgagggtctcctagccttaaaccacaatctatattaggtcatattgcctgtgagttttaggaaaaatgtaagatcataatgcctgctatttggctatgtacatcttgggctcgtgtttgtattgggccatgggtcctctatagctgcctccatgttgcatagctttagaatatttgagatctaactttgtaagcttattgtcacttgatttcatttcatcctattatcaaaaagtcaagtgaatttgaactaatggataacctttgtattgcatgacaaaaagaaatgaaagaaaaaggcaaatagaattttacaggcttgctgagttcttaatggcatttgataaggctgcaatgctttttaagtaggatttatagaagataattatagggttggttcactgttacttattggttaagttttcaatcttcctatcttttattcctgtttgttctataaatctagttgagaaaataaaggctaatcttaatagagaaaacacctaaggagggggaagagggggtggtgaattgggttttaaattttttttttcaaacataataaatcaagcaaaggaagcacaaaaataaaaaaataagatgagaagaagcaagctcagattttatagtggttcggcaacccttgcctacgtccactctcaaactcctaaccgagtgaggcttccactatacttgaagtttcaatcaaacttccaacacttttacacttggattccaactctaatgggctcttacacaatcccttcaagtctttgctcacttgaagcttttaacactcaaataataagcttaaatctctcaacctagctcaactagggttcaaatacaactcaaatgttaggatgaatcacaaaggtgcactaaggaatgtgtaaatggagatttaatgcaccaaggaacgaatgagcgctttaaggcaagaacaagtaggtagacaaataaatgcaggtgttctcttactcataaataaagtgaagctctcaatttataggtttctagcctcaggagctaaaaatgccaaaaagtagcctcgaccggtcgagctgggggtcgaccggttgactagtcgttgggcaataaatgtgtggtaggtgactgttagttctcgatcggacttcgaccaaaccttgactaggaaggcataacccttaatcgggaatgcaaggttattggaagagagaagattttttgcatctctcgacccgacctcgaccaggaaggtataatcgatcgaccagtaccctagccagttgagtcgataagctggtgtctcgatcggttaaccatttttggcccaaaaacctatatttttatgtttttttctcttctaactcttagacaaggtctttaggtaaactaatatgccaattttgaaacgatttgccttaggttctcatttgataaaacttgggttttgatgtaaatgtaactttaatgcataaattgagtttttaaagatacatgaaaagatatgaaaatcctaagtgcactcatgcattcatattacatatgtttcctatgattaaaggtctcccaattgtcttgatcttgcatccattgggttctttgatgaatttccaaactaacatctaaaattctttataattcaaacaaattagcaacttaatcatgatttattatcatcaaaatgcgattaggagaacccttgggctaacactagtgtttgttggtgtagttttattatctcaagcttcaatctttctatttatcgtcaatttgagtgggtggattgggtctcatgggagaattatcctatttgtgcatttgtatgttattcgatgcccaaattataccacttaagcttatataaggacaataagtttttaaagagacttaaaaggcacttacacatctttatgggtagagtcattggaattgtgttgctgtattatagagagttcttgtcaacttgtacaaactcgtatatagaagcttatataattgtaaagaaccatcaagggttctagagagttcctatggtgcctataagtagatgatgacctcatttggccaagctacctaacatttgagcttctaagccttgtaaagcattcttgtctggtataagctttcattattccaaactctcttagcgttgctttccatttttaggccttgttgagcattcttatctaatataagtttttattctttcaaactctatgagtgttgcttccttgttcatctctagcttgaaggttgacttagtaacttaagcatcttaagttgtctaagtaatacatggttgcttaggaaatacctaagcatgtgacaagtagctaccgatgttttaaaacctgatccagctctgaatctcataaaatggtgggtggacaagaccagttcaattggttaaaccaaaccatcccaagaggctataccagactgcgttttaagttttaaaatatttggtttgcagtttaaaaaacactattctagagttaatttttacttaatgatcaaattagtttgtgaagaatgtatgcatgtgttaattttagtagtcaaaggtcgggaaaatgaagagtatttacttcttttaaactagtaatagatgaaaaaagatgctatcttgctgatgtgaaaactgaaactttggattttttttaccctaaaatgaacaacaaaaattaaagttaggtttgttgggtgctgcctgtgttttgataatggtgataaatgaaatagggaaaaccaattgcacaggggtgttatccaagaac

SEQ ID NO: 10737 - DNA, 5684 bp, Vitis vinifera
  Intron number 14 from transcript GSVIVT01020797001 (locus GSVIVG01020797001) derived from phytozome v7.0 (chr-ID chr 12; pos 1861348 to 1867031)
tgcttggctgtcctttacaccttccttcatctaaggtgaggctaagtcagatggtcattaaacttattaatttgctttggaccttttgtgacattgtcttatagtgttctgcatttgagagatattacattgacttgccaattttgacaatgttaaaactctgttaccacactgttggaattaattcatagtaatttatttaatattatagaagttcaaaagcaacttttgaactgattcacttgtgaacttccagattctttggctcaaagatttgaattggaccacaatgaccaatgattaaaacttttgtttctttgtaatctctttttttgggttagcatgtacataagggaagacttaatgcccttgtttgattttgtagagtgggtgggatctcgttgagggcctgggtgattttgtgctctttttggattgcttgctttaggtgctccttgtatatgtcctgtgtatgttggtgtacttggcttctttttccaatttatatattataggaaataagaggagaaattgatgattttttataaaaatcgataaaaaacgaaatacaacctaggcctaaatagaaatcagaagtcagttcaaatttgaatctgaccagatttctttcgtacttctatgcaactaactttgaaagatttaaagtttacaatcattcaagtttggataacaataactgaaactaaataaacttcaaacgaaaattagataatctcctaaaataattaaacagaaaccggattattcaaatggagataatttgggattatctctagatttgattttccatattccccctcaagtttgtaggcaaatatccaacatgcccagcttggaacaaaggtcttcaaaaatgtgcctaggcagactcctagtaaacacatcggcaacttgctaagtggttgggacgtaggtcatgtaaatgttctcctcaatttttttcctttatgaaatgatgatcgacttccacatgtttagttctattgtggtgaatcaaattatgagcaatacttattttgattggaaacgacacaaagatttattgatagataaaaaagtacaaaagaaggatgaggaatcctcctgccaaagacagctaaactatagaaaaatacactgaaaaacaagcaaacactctaaaaagaccactccttatggagtacacacagctatccaatcaagatgtatcgcattaaggggagtccccttaaaaaccttggaacaataagcccaaagagaagcaaggaaaacaatagagtcccatagagactctgaattccttgctttatcctaaaaaatcctcgcatttctttccctccacacaatccgaataagagcgatgtttgcagcttgccacaaggctatccccctcttagacgaaccaaatccattgaatttgatgtacatcatgtcaaggatgctcctcgggggaacccaatccatcttagctaactgaaataacctgtgccataacccaatcgtcaaggagcaatgaagaaaaatatgatcagctgattccccatgcttcatgcacagaatacaaatatccggactaagggctttgtagggtcttctcacttgtagcatgtcattagtattcaccttcttgtgtgccactaaccagatgaaggactgcactttgaaaggaatttgagaattccaaacgaatttagaaggaaaaacctgaggagatccaaaaaattgggataaagctagaaagaaagatttaactgaaaaaagcccagaaaaagacaagggccacaatctgtcatctggaaccgaaggagataaatgcactccatcaagagatcgcatgaggccttctaagtcctcaatctcagaatctgacaagttacgacggaaatttaaattccaagagaaaggacgagtaggaccgagaactgaagaaataggtatgtttttatccaagactactctaaatagacttggatattgggatcccaaaggttggtccccccaccacaaatcttcccagaaacgaattctttccccatttcctaccacaaatcgagtaaacaaggaaaactcctgaaagacttgagaaatagccttccaaccttgttgtcacaaaataatttcataggaccattaatcggaatctatttgatactctttatttgaacaacaaactgggtactgattatcttgtgtaaagcaaagaaagcagaattaacatcatattagttttccaaaaggtataaccaagtggcatgagaacgatcattaatgaaagaaaaaaccaacaagctccggtgatatttaggatccgagtagtccaaatattagtatgaattaatgtagagggataagatgatctattattactctaaggaaaaggaacttgatgatgtttggccaagtgacaaactttacaatgaaagtcattaacattcaaattctggaataataaaggaaacttagttgttaacaaagaaagggaaaaatgtctcaaacgtaaatgatgtagctagattggattttatttaatgaaaaacttgaaagatgagataaaggtatgtgaccattgccattcactctcagcatcaagatagtagagccattcgtcttccctaacatgaccaatctccctccccatatatgttctaaaaatcacaatgggataagaaaaatgttactttgtagtttagatctttggtaacttgatgaattgacaaataatttgttgagagtttaggaatatgtactatggattttaggaaaagagatggggtaagggtaatagtcctttatctagccacaatagctaaactaccataagctacttcgattatttggtttctaggatatgagttgtaagatgagaaatgatcaaagttgtgggtcatgtggtcaatagcatttcagtctatagcttaatttccatgccaaattttttttgaggcattaaaagaacaagtgatggagtactttcttgatctaaccaaggagcatgatgtgttggactcatctagagaggtggggaaattccaaagtctttcaatttctttcttttttagaccctcaaactctaaactgtttgaatttctcatggctaagttttgcctacaaaagtgtcacatatgcttagtctcctcattgtccgagctgttgttggttccaatttccaccattcctactaagggactttggtttcccatgtaacttccaacacatctccttcgtatgccttggtttcttgcaatgattgccccataggctatccttgttacttggttgtctgaatagctttcccctaccaaaatttgtgctatgaattgactgttttgagagcttaaaatagaaaggccagaccctttgcttgttataatgttcaacattacactcctcctttctttagcccttatgatcaagaatacctcattcaaggatgctagtgaatcctttccaagtacttgatcatgttccacattaagtccaaccagaaattcaaatattcactctctttcaataaatgtatgaaacatagcaacatcctcaccattcttcattttaagattatgataatagttcaatgcaaactacaattctttgagagtgtatcttggcttttatcttgtaaatttaagcaacatcttggactttggagttggtctgtttcattttttattttttgataaatggagttggtctgtttcatttcctcccatattttctttgatgtggtctgaaacatacatgctccaatgattttgggttgcatcatgttctatagttaggacatgattgttgagtcctcttcatcacaagtggcaaacctgggattatcttcactcaacactggttcaatcaagtgactgagctttccttttctcttcagaaacgtgcacacatgttcagaccatattggatagttttggccattaagtttgaatgagggctaaatgttttgataggaactggtagatggattgttttgaaatgtagtgtttgatgctggatttttttgagatttttgacatagttgacaacaaaatagagacatcaacaataaaaaaaggctattgagaaggaaaaaatgatgatggcaatgaaggccactagaaaccaatggaatgaagaccatcaggaaaaagattagaagagaacttagagaccttgaacaagcttaccatgtggaaaataatgattttaataattgtatttatgaaaaaatggtacaatatttaatagtatgcaatcctgcaaaattagaaaactaaattacacgaagaaagtttaccaatccctagaaatactctattctacaaatcaagaaaaataaaattggaaatatataactatacaatcttggaaattggggaattatacagctatacagtcccagaaatcagggaattaattccttaatattttcaatcaaatcttagaaattagggagttaattccttggtgcctttaatgaaataagttaacatcattgatgtggtaactggcctctggatgacccttttgtttctttatccaaacttgtttcttagaggggtgcttgagtagtgaatgcttggtatgataaagggggttctagttgggggagtcctggtttctcaaggaatttctatgattgagagttgcaaatggttgaggttttcatgcagattattcctttagtgaggataatgggcattcctcatatgaaacagtgtgaaaaattccgaataatatgcctttttttttttcctccctcttttagatcttattgtaaacttctttccatgggagtttccttcaagtttcccctgaaggtgttgtgtctgaggggctaccttgaaagttgctttctcagttcaagaagcaacatgaaaaaaaaatggtgatagatcagttgataaagggcttttgggtgaactgatgttgtttgcctaaaggcaatgaggaaacaacaattcaccttctcacccattgtgaaaaagctcagatttatgaactttgttgttttctcttttttgggttgcttgggtaaaataatgcattagtttaggggttattactatgttagcatggaagattcatggggaagagatggtcgacagtttggaggatggcactgccatacttgttctggtgcattttgaatgcaataggagaacttctgattcagaagttctgaagaccctgaaaacttggattggttgttgaaaactcttttttgaatttggcttttggttgggctagatgtgttgtgggttttgagaacttttcctcattggattttgttgattatgcagagagggtctaggtcagtgtgggttttcatttgtcttcttatttttgttgttaagctctttgaatacctcttgtatactttgggtatgtcctcgcttttggtagatgccatttatgaattattcatttacctatcaacaaaaagaaaaaaaaaaagggaagagaatgtgataagagaattcagagttctcttccaccaggctttcttatatattataactgtcataaattccaggtcattcgacataatatatagtaatttcttttgtgatgttcatcattggattgttagtttaatttggaataggttgctttatttgttttgcctgttaaaatttatggcatgaccagtttgtgggcatgtatttggcttgtgtcatggcagtacttctcaggag

SEQ ID NO: 10738 - DNA, 2640 bp, Vitis vinifera
  Intron number 3 from transcript GSVIVT01031736001 (locus G SVIVG01031736001) derived from phytozome v7.0 (chr-ID chr3 ; pos 3921322 to 3923961)
gaagaggtgagcatgtcaaatatatttttcaatagataatatattgtaataaaaaaagtaaagaaacatgaggtgccagatacttatttttagatttatagattctgagattttagtagcttttgaagattgtatgtttttcgtttattagtattaattcttttgatacgtattgtatgtttttagtttatgtgctgcttgctggtcttgtttatgcaatcaagttctttgcctttcatcaagtgaagttcttgtggtgattctgttattctgagcttcttaggtgtttgctttcagctgatctttgtagctttgaccttgcagtgggaaattctaggtgtttgcacctgttttattgatgattctgtagaaatgtataactaaatatggtttcatacacgtgttttctttgatatgtagaataaggtttcatacaattagcactgctttgaatatgattgctttctagggccatggagctctaacttttgattatgagagaatgtatctcaagaagttcaagttaggaaaactagaatcacacatgttcaaatgacttatagttagatggtaacctcacaaacttgtttgcaaggagttagagattatgccttctcaaccttcagggtgcggttgctgtagagttcctatcaagaatattaaggaccttgaatgtaaaatttcccactgccttgccagtatgaccttggttatatcattttggtcctttttagtcatctagatattacttgttaggcatgcctagcagtatcctaaccatggcttataaaatgtgagtaagatactggatgaattacagatatatttactttagaacttttgaaatgtgcagtgtagaacatatagtcaatggattatttgtcaataccaaatattatgaattattctgctatcattcccatcattctctcaaggaatgccttctcaatgaaatatctttatgctgccttagaattgatgagttcaccttcttttccagcgggggtcatttggaacccttgggcaatgggctacatctaaaataaatttctttgcatgggaagcttgttaggaaaatgttttgactcttgagcagctacaaaaaagaaaggggatgggtgttggtcaatagatgttgtttatataaagtagaagaggagttaatagatcacattcttcttccttgtccctcggcaagggttctttggcagttgttgttttctttggttagtgttccttgggttctgtcaggcacaactagagagactctgttagggtagcatgggtttttcgtttgtgagaagtgcaagaaggtttggacagttgcttctttatgcattttgtggactatttggaatggaggaaatcaaagcttgtttgagaaggaggagcagtctatccaaattctgaagaacactttccttattaatttttttttgtgggtaaagatgcatataggtaatgacactttgtctctaattgatttttttttattggttaggttgtaggtaagagagagctgttttttggttttattgtcttggttgttccttgtttttttttttttttttttttggttttttttggcgccctttgtatacttcctgtgtaccttgttgtgctctttctttggcatgtgtttataatatctcatcattacttagaaaaaagaaatcattctctcatcattagtttttttctgttagatcattctctaattattctgaattgtttctgatgtcatgtatactgtcgaatatcctcaattgaatttaatggagtaactatttgaatgagtggtttatacttctagatcagtttgggccattagttaggtcttcacttcatttagggtgaaacttacttccttcagttcttaccctaacatctatattgtcaaatatcctccattaggtttgatggggtttacagtttatacttcagggtgatagagttttgggccatagtttgttctttccttcttttggtggaaatgcacctttgcattaaagaaaatgataagaggatgaaatctgacttattggtacaagcccttaaggtccctaattaaactttttcctgtttacaagaaaatttccttctacacaagaaaaaacagaaaaatgaattcagtggaacaagaatatactggggtttactacattaaaggaaaagataaaatttatgtgaccttgtaggatttatcactaaaaagaggcaagtctcccttgcgtgacaaagggaaaagaagctaattaactattctaatgaatcatatgcctatcaaaaaaactgttcaaatgaaatcatatgaaggatccaaagcttaacgatcattctaaattaactggttcattcacattatcatcattcattattataattattatcattgataagcgttaatactgtgaatatatatgctttgtttggtgcaagctatcttacgagaataacctgtcttgtagtgaatagtttttatatttgataatgataccacgtggtgccacttctctgattttcttaatgtttgacactttctatctttagcacttcttagctaaaatttgtgtccaatatttatggttttccatttattttgcagtggacaaagtacaagcactgaagcactacaaattt

SEQ ID NO: 10739 - DNA, 8348 bp, Vitis vinifera
  Intron number 5 from transcript GSVIVT01024421001 (locus G SVIVG01024421001) derived from phytozome v7.0 (chr-ID chr1 6; pos 2367086 to 2375433 reverse strand)
agggtactttccacattccccaaattttactaaattctctgtctctgcattttacaaattttccccaattttcaatttctttattgaagtgtttagagatgcaggtgagacatagattttctgatccattatggcattactttttaaagatctattggaaatcaccaatgactccttcacaaagctatgtgtgccttgtgaatttttgttatagtcacctcaatcatcattagaaacaaattctcataaaagattctaatctgtccctaagttcatcggaacattcaagcctccaatatggtttacaccaaaggagtgttttgcaataaatgatagaggaagaaatttcatcttgtgaaattgtcaaatgcctggttaattgtgctcctgattcctgcgaggttgccttgcttgatagtaatgtttattcgttcgaatcaggaaggaaagccatagcccgttgtttgtccaagcaacgcccattttttggattcgtaattgtctaacattatatattgtaaagcagagttgcctttgtaatcatctaggaaaatcatcccttttatttgatgatggggtatccctttaactctgtgcctctagctttctttatttcttcaattagttcttaaagggcgagagagatgggagagagcgagagagagggcgagggagagagtgagagagcgtgcgatggagaagacggagagaatagtgaggcgactcgaaaaaggaggaaggagagtagcttcacggtggagtccaagacgttcgagatcgtccttgatgaaagaagaggaaagccccagtttctcgtcgtggagaagaagacaggggtctcgccatgggtctgattaggatcggaaagtttagggcttttcaaggagggcctaatccactgcataaaagaccaaaaagaagggaaatgggaaaaggagtggaaagacaaggggaaatcgtatttcctaactcgtgggtttaacagagcgggagggtttctacggttgggggttgttgatttggaaagaaagagattctgtatattcataccgagaggcagaggggacaaaagaggatggacgactatggcggagaaaattcatcaaatggaaggatcgattggtagaagagcaaacatgcaggaagcaagggtcgcgggaaaatctgcaccggagaattcgtatgcggcagcagtcaaaagaacaagttggaatgattcaaactcaatcaatgtgaaggttaaaagggaggaaactataggaaatttgcagaagttggagcattgcattgttgcgagctggaaatccagaatagagggagaagaggacctggagagattgggaagattatgggcaaattcttggggcctaaaaggcaatttagggctggctaaattggagaagggcaggccttgctggaatttgaagacctgaaaaaagcaagacgcgtcgtttcctcagggagcagagtgttgggagggcttcaattagggctagaacattggaaccctaggacgggttgttgggcagaggaggagacaaaaaacgaagtctgggtcaaaatcttagggcttccaatctcgctgtggagtctgatgattttaaaaagaataagggaagaatgcgggggttttgtagcagtcgatgatcagacaaagacgatgagggagattcaatgggctaggcttctggtcaaaatgagaggagactttaggccgagtgtgctggaaattgaagtagaggaggatgtctatgtcctgtcgctatggtgggagatcaaacccgtggtgaggatgaaatacagtgaagcgtctgatcgaaggagtgacgaggttaggggtgatgtgagttcacgcgcggagaagcgcgtggggaatgagctggtaagcgcgaggctcgagacgctgaacctgctagatgatgtgaggtatacgtaggagaatgggtcgggtcgagaactgggaaaccggattcatggcccggtgatccgggaatgggccctcacagatgggcgagcgtctgggttgtccccattaggcccaatcatgggtcttaaagaggtgaagagggctaatgggcctgctgtggttaatggatttttgggctcaaaatcaaaagaagcggcaaaagaggatgatggattagaagcaagcccatcgtcaaggagatgggctatagaattgggctgccacaagatgagtgattttaaaggtatggaaagggccgacccaatcacgctagttcccaagccccaactaagggccctcaagagaaggccagcctcttggactgcttcatctccagaagtgggcccaattcaaaggagcctcttgtggtctgggaatcagaggagctcagaaggaagcaaatgagtgcttgcttctcagtgacggactgggcgcttgaagaggaaactttgaggtatgagtcgattttccattctaggagaaaaagggttttggggatatctcatcttctttctcttcattctgatcgggctccggagggggagtctttcgatcgcttagggggtatagaggaggaatcatggggtgataaaacaacatggttaacagtgtatgaggggcctactaagaatgataatgggtgctgggaattgggagaggccaatagaaacaaaaatatagtcaagggtacggagggggattttggcacgcctgaaaaccaagctgcgggaaaggagaaagaggaaaaatgggaggaaagcagtttggcaaaattcagccaatttttgggattttcaacggaggggttggaaaaggaaatcctgagcttcctgattaaaatcagaaagagaagggagaagattcatagcaaagagcttggagaagtcaaagttcgaaagggaattaaagaggttggaatgctctgtcaattatgagggggggaataagcagaaaggtccttcacagggcaaagggaattagattgtagttgtccaatgaagctaaaggttctaagttggaatgtgaggggagcaaacgaaagctctaaaaggaaaattattaagtcttttataaggaatcagagggtggatttaatttgtattcaggagacaaaaatccaggctatgtcggagggtcttgtgagaagtttaggctctggaagatttttagattggagagctttgaatgcggagggggctgcgggcggtattctgatttgctaggacaagagggctctggatattctggattgggaggagggccaattcacgctgtcttgcagattcaagattgtagaaaatggggctttttgggtgttcacgggagtttatggtccgtttaccaaagtggaaagggatggcatgtgggaggaatttggggcgattagaggcctttgggaagatccctggtgcctagggggggatttcaacatcaccctgttccaaaggaaaaggagcaatcaaaggagaattaattcagcaatgaggagatttgctgagattgcagatgatctagggctggtggaccttcctcttcaagggggagaattcacctggaatgggggccttaataaccaggcatgggcgagattggacaagtttctagtgtcccctagttggttagatcaatttagtggggttactcagagcagactatctcggccaatttctgatcatttcccaattgttctagaggggggtggaataagaagaggccctactccgtttaggttcgaaaacatgtggcttaaggttgagggattcaaagaccttgttcgaacttggtggcaggggatcgaagtcaagggcagtgctagttatagattggctactaaaatgaaggaaataaaaaagaagttgaaagtatggaacaaagaggtttttgggagactagaatgcaacaaatctttagccctgcaacaagtagatttctgggatcgggtggaaagcgagagaagcttgactgtggaggaaacataattaaaaaaaaaagcaaaagaaagctataaaaagtgggtgcttttggaggaagtccattggagacaactttcaaaggagatttggctaagggagggggacagaaacacgggtttcttccatcgaatggcaagtgctcatcatagaaacaacgctttggacagagttaaggttaatggggagtggctgtcagaggagcaggaggtgagggaaggaattgttaacacgtttcagcagatgctccctgaagatatggaatggaaggcggatattggaagacttcagattgatcacatcagccaacaagaagcggagattttggaggtccccttcacagagactgagattcatacagcattgatggagatgaatggggataaagcctctagtccggatggctttactgtagttttttggcaaaacgcttaagattttactaaagaggagattttggatatgtttaaagagtttcatgagcataactcttttgttaaaagtctcaataatacatttctggtcttgattcctaagaaaagtggggctgaggatcttggagattttagacctatcagcctcttgggggggctttataaacttcttgctaaagttctagctaacagacttaaaaaagtgattggtaaggtggtctccactacccagaatgcctttgtaacgggaagacaaattcttgatgcgtccttaattgctaatgaggtgatagattcgtggcagaaaagaaaagagaagggccttatatgcaaattggatatagaaaaagcttatgacagcatcaattggaaatttttaatggaggtcttacaaaaaacgggctttggggctaagtagttggggtggatgtggagttgcttgtcctcagccaaattctcagttctggttaatggagtgccaactggtttttccctagtactaaggggcttagacaaggagatcctctatctccctatctctttgttatgggaatggaagtgttggatgtcctcattaggagagctgtggaggggggatacttatcaggatgcatcattcgggttggtagtagacccactttgaacatctcccacttattttttgctgatgacacaatagtgttctgtgaggcaagcaaggagcaattaactcatttaagttagattcttctttggtttgaagcggcttcaggcctaaggattaatctagccaaaagcaaaatcatcccagttggagaagtggaggagattcaagagctggcagttgagttaggttgcagggtgggatccttgccctctcaatatttgggactccctctaagggctcctaatagggctacttctatgtgggatggagtggaaaagagagttaggaggagacttgcgctttggaaaaggcagtacatttccaaaggggggaggatcactctcataaaaagcaccttggctagcatgccaatataccaaatgtctattttccgaatgcccaagactgctaaaagaatagagaaagttcaaagagactttctatgggggggaggaaacttggaggggaaaattcatctagttaaatgggatgtggtttgcacagacaagaacaagggtgggctaagcttaaggaaaatagccatgctgaacagagccttgcttggtaagtggatttggaggtttgcttgcgaaaaagataatctttggaagcaagtgatcgcaacgaagtatgggcaagaggatcatggttggaggtcaaagaaggctaatggggcggttggagtaggggtttggaaggagattttgaaagaatctgattggtgctgggataatctagtgtttctagttgggaagggcaccaaaatcagattttggaaagatatttggtgcactgatacaccgttggcccattgcttcactcacctctttgttatggctacgcatagggatgcaacgattgaggagatgtgggatcaaaattctggtcaaggaggctagaatgtaaacttttttagagactttaatgattgggagttggatatggttggggatttgctttatatcttgaggggtcataggccttctttggaggaagattcagttatgtggaggcgagaaagaaatggtcacttcagggtcaaggacgcttataggttgttggccaatcctaatgacacagtttttccttcaaggtgcatctggatggatagggtgccaactaaagttgcttttttcgcttgggaggcgacgtgggggaaggtgctcactctggacaggctttaaataaaaggggtgcaactttctaatcgttgttttttgtgtggttgtgaagaagaaaatataaatcatattcttatacactgtatagtggctagagctttgtgagatattattcatggattagtagatgttaaatgggtttttccagaaactgtaaaggaggtcttaactacctggaggggcccatttgtggggaagaaaaggaaaaaggtgtggaaatccataccgttgtgtattttttggacggtttggaaggagaggaatagactagcttttagggggggtgtgttgaatataggcgaggagtctctctcccttataggctttttggagtgggtagcatccacttaaggggaggtgattcttttctggtcttgttgctcctttttgaggccttagccgctttgtatactccttgtatgctttgtggcttttagcctctttttaatgcatatcttgtttacttatcaaaaaaataaaataaaataatttacacaagcacttgtcaactttatctactgttatttatttggctaatttcatcttcactcttccatttctcatggatgatgatctaagatgacaaaatggtctcttggcgtttctagattgttgatttgcaccatttttattatctggctcctcagttttactccaattaactctacatattctggctttattatcttatcataaaatatttttggcctctgatatttcaatccatagtttagcttaaagataatgtatactccagcttcagttacctctaaactgttaagctaccagttacaccccaaagcttcttgtagtgaatgggtgacgggttaccaatgtgcattgaactaacatccttcctcatgctgcataacatgtaaatgaagggacatataaccaatcagaaacagataaagtggtaagggaacggatagacatagatgtttgcatcgaaggcctctagaaatcttgtctctgatgccatgttaaactatcacctagccaaaagctcaaagcttgttggaaatgggccatcaatgtatctcaacctaatttgcactaaatacattttttttggaggatagatttttttgtttttaattttgttttgttttgtttttatttttgttttttctttcctttgccatttgtagactgtattattatagaccagggtgcaccatgaaaagtcttctcaaatatgtttaacgagttaatctctaagcaaatgtcaaacagtagcgtaaggatgtaaggtactgaaaatgaaggttctgatggaacaaacccaatgtaatctaatgataagttttgattgaacttcagccccacaatttccaagtcctagagggaggccttcagtaggagagtgagtgtttagaagcctgcctcactttaattcataaatctctcggagagaagcagggaaaatggagagaagagttcaggttggagtgcgagagaagtgttgcagactggtggtggaattgagaatcaaaatgtggttgtaaagttcatttcaccatctgagtaccacaatagagaacttatcttcctcgatattggtcccaaaagaccaggatgcatagggtggaatacaaaggataaagatatggctagatgaggtggagacataggggtgggggctggaataatagtttccaatggagaggttgccaatatgtagagtttcatttccaacatagagttgcaaactcagaaaccccatttggatattattagaccagagctttggtaaccttctactggatatccttggggaggaaagcttggccattgatttcaaatgctggtttaagctcagttcacgtgaatatggttgattaccgtcatcaattatccacagtatgtggaatctgttgaatagtggatgctaagaatcttgtgtgtgtgggagtttggtttatccttgaattaaaacagattataattattatttttcttttattgattgcatcattgatatttaatctatagcctgttttttgttctttttcgtagttatttaatggtacattataagggttatgatgcccaagattgtcgatattcttagttttaaaccatggaagatgaagtagtgaagttgtcattgcaggctgccctttacttcaataaaatacagtgcttttg

SEQ ID NO: 10740 - DNA, 3336 bp, Vitis vinifera
  Intron number 2 from transcript GSVIVT01031146001 (locus G SVIVG01031146001) derived from phytozome v7.0 (chr-ID chr1 4; pos 1739161 to 1742496 reverse strand)
ccagtaagtagttaaatgcaatatttctctctatgaaacttatcaaaaaaaaaaatatatttctctctaggaatataattctttttggtggaaatcaaaacactaaggaatggatcaagacattcttaatgtcaagtgtgatgcatattattttcctttggtcaaagaattcatggaattgtctgtagattcatcttatttcctgttgttggggtgacgcatatttcttgttgttggggtgacaaatattgaatcaagtgtaagattaagtgagaagatgtgtcatcttggccatgaagtttagttgcttacttgcagagggatggaaacggaaaaaggcatcaacttgcattatttttctagatctttagtggacttggcaattatgaagaacatcttgctttggattaaaattttctggttctatgaagaagttaactagctttctatcccaataccttattggtcgtctcacaggagtgaagaaaccaaagcacaatgttggtcctgtacaggttttcttccttttcttcaagcatgtggataatatagagtagtttctacttcccacttggttcatgacttgattaaaggaaaaggactttgaactcccaatggaacttccctcatttaactgtctctaattcattgcaaaaacttggtcatttgggttctgtaattatgtaactgaagaaagtaaagacaagagggttggaaaaatttagtatagtagcatgggcttttgtaaatatgaaaattgacaccattatatataaatagtgaacaaaagatagatcactggtttactctacctgaactagagtcttttaatgtgatgagatttgccccataaacagcataagttattattaaattttgaagtaccatgtcatctattgtatagtagaaaagttccatatggtggttttttccgtgtaaaagaatgttgtattgatttctaattttgagtaactctctaagccaaaatgtctaaaaaaacaaaagagaaagaatatttgaccattgtaagctatttgaaccgttgagaagaagtgaaagtagaaaataatattgacacaaattatgagaagggtggcatgaatcatcatgaaaatggttaacaggaaaaatgacgagtttaagattctctcttacccacttgattattcattaaaaaaaattctttttcaccattaaaagctagaaatatcattgtgtaattttgaatcttgttagatgtcccccccatcagatgaacatgtttttttatttattttttattttccttgttattgttatgtggaccaagaacgccacatcacatggatttgttatgtagctctagttaagttttgttattcctctttttcagatattaggttgtagttagatccttaaatatgtgcaggacagagaacactctagatgatggagattagtggagaagccaaaaagtttggttttgggggggtgggggggcgagcaattatctatctacattataataaatcattcataaatttgaagaatatgatatcctccttatcatttaaggaactaattaatttaggtattgatatatatatcaaaagtgcataagaatcatcaactttccagaaatattgacaaaaaaaaatcaaaagaatttaaaaatgattagaaattggattataaaattttcaataatttttcataaaaaattttcaaaaaaattataattttttttttcaaatcactaaatataatatcaattgaaagtcatgaaatcctttacttaaaaattatctattatatggtaatatgagggtgacacctttgctaacatattaagtatcttgatatttaaagtcttaatagattcatatatcaatttaaattaaatataagtagttactaagaatttgatagttattattatctatagttcaaagtgttttattaattatattatcttcgatgactaagactaaatataaactcaattattgtgaatgaattcaaaattttcaatgattgaagagaatacaccatgaaaaatttatttaataaaatataaaatacaaaatgatcaaaaaattaattttattcaaaaaaaattacaagattaaaaaaaataagataatgttggcatatgagaaaaaaaatgataaagatatgataaaaggaaaaaataagtaaggatattaagtaaattttataaaatattttattttttatttttagttttatttaacttaataaaataaaggttaatgtcactcatttggattaaaagaatttagctctttgaggtttaacttaaatacacttggccattattaaatacacttagccattattagcttgaataattcccttatatcaaattaaaaggaaagcaagtgaaattaacaaatgaatagggtagaaaaggtatttgacaaaatttcaaactaatggtgactaattatacttagtccaaatctcaaaggaggtgagtgaaattaactttataaagtaatactttttagatttattcaaaatttataacggtatttttatttttatttttttgtagaattaaaaatgtaattatttttcatttttcaaaaattcaaaattaaatttatgtttttagggattcattttaattttttgaaatttctaaccatatataagaatatttatttatttattcttattttttaggaatttgatgaggatgttacataagttttttttttgtgggaaatttgaaggggggcatatgcccccacccctgcccccctgcgggccccttactagatccgcccctgactgggatagtggaagtttattttgtttttgataataagaaatccaccttgacagtgaggcatttatcccaatttctgttaaagcaaacctcaagtgatatgggcttactcctttacaaaaaatcaattgagtactgggaaggctagaagtcacaacctctggtgcattgctagaggtcagtaccactgagctacaactcgaggggtaatgctgaaattttatctttacaaaaatgataaagcaactcaattgtgtttatacttctcaccaaataagaaaataaaattggatgcatctttgttggaataaatctttatgaaggtcatttgtattatatttttgctccaattatatggtgtctcattggtgagtctattcccttttagttccttttttattttttgattttttgatttttttatgttattatttatatggttagtagttcacattactaccttgaccatacaatatgtctgggaagttaaccatttgattctatcagttggtgccagctgtcacagagcttgtcattgcaga

SEQ ID NO: 10741 - DNA, 11123 bp, Vitis vinifera
  Intron number 4 from transcript GSVIVT01000253001 (locus G SVIVG01000253001) derived from phytozome v7.0 (chr-ID chr7 ; pos 20565116 to 20576238)
gcaaatcgtaggtctcgtgctcaggatgtcgaagggtatgtcttattatatttctttgtttctggtattaaatgcaagtatatctagaatattgattaatttgcatcatttcatatgtccatatgcacttatgctcaggatccatgttataaccttaaacttactaatattgttaaactaagtgtcttgttttgcctgagtaggttttgtgattgtgtttctacatgtgtctcctcagagtcaccagttttttgcccttcaatatataagtgcctgaaccatggagtgattgttaagcatcaggaaatgcgtatcaatgcgtaggttatatgaggtgcctgtaaaaagtaacataaggcaattttatttatttgaagactgacgtcacttgtctctctttttttttttgtaaacttaagtgatgtttaaggtatgatctaatttctttaaattactttgaattaccaatcactactttttgttgaatatttgattcattatctaaaatatttctccctgtgtcgatgttggtggtagagatccttgggacgctgaaaacattgtttatgaatccatgtgtctagtattctcgagaatgcggagtattattgaaatcgagttatggtttgtatatgatgacggggatgggaatcatgcctgcataggaatcctatgtggatagctccatatcctccttttgtagtctattgtatacattgatcttggatggaaatatcactcttatatttgctcttatttaatatcttgtcacgttaatgtgcttcggtgtgtcttctatatagaagcaacattctcttcactactataaaatatcaaatatgacataacagtgtaatcctataccaaagctagaggatatttgaactttatgtccttgttttattatgagattttcacccttcttgttttttatttgtttatttatttatttttatttttttattgacaagcaaacaaaaaactacgataaaagcgcctaacacaaagggggcacacccatgtgcatagggggtattctagaggcgccaaacaaggagcatcaaattccctatgaagaaaccaaataagctgaactaggtatctacaattcaaattctcaatgaactccaatactgtaaaattttccatatccaaaagggctcttgactattcatttaatgaaggtctccttgtagcctttcctctgaaagttcttcaccattaaaaaaacaactgtgttggtctatccatatgcattagaacatacagaggagccaaatgccaaacttcctttcaccacttatttagtttccaaaactttcaacccaacaaaagatcttttagtgagaaaggaaatacccacttcaatctaaaaatgtaatgttcaacgacatgacctacaactatctggatctatcacaatgaattaaatatgattggctaattcttcattggatttaccaaggctacatcttttaagtagtgtccaaccccttctgataaatcatacttttggtttttcatatattgcacagaatggtaatgcacctcgttatccagaaaaaatcttttatcaataaccttaaccattttctgattattaaaaaaaaacccttagttgccaagtaaaaatacaatagcaacaaacattgagatgcatctttagaattccaaaatggttgagaagaatgtttaaaaattcttaatcttatatgattgggattatataattttaaagatgccatctctagtttgggttgttgatttgaaaagttagaattggttcttattgaagaagtgaaatggaaagcattaattatgaatttattagatttgtcttgaaaatttctaatcaaagaatgttttgtgagaataaaggagcctagacgaatacagataagaaactccccactttataaatgatgcaattatgtattgaatcaccacaagcttttagttttgcctcctcctttatttttgtcttgtatggcaattgaggaaaaatggattggataggtgaagtctcatgttccattgtcatggttcttaatgttggttaatggggcttataaaggttcttcaagagttctaaggggtttctgttaggggatcttctatttcgttttctatttactttcatcatgatgagagtgtacaataggttggataattcaatggcagttcaagacttttaggttggtttaagcattggggagtggattgagatattttgtaaatgtttttttttcttggataattgggaaacctcaccatggtagggccttttggccctacccatggttttcaatccttgaggagcttgacttcactcgccatagccaactccgggtgatttatggattcctaatggtaggaggaaatggttgctattatggcaagctcttcagatgctcataagatgtggatatttgtttatggggaatgtcaaggttcttctacccatcttagaatgggaacaatcacttgataagctgactgaaggggaggtcaccttgggcatgacaaagtgggaggttaccctccactcataaaagtgggtgatcactctacaatctttgcttcttagcccattggacttcttgcctcattaaggggatacggtgaatgaccatctccacacccctctaacaaaagaggttggaaagaacatcaccacatcgaggttattacctacacttcacttgagaaggtgcctactagcggaatgcactagatgcttcgtgcttggttgagttggaactaggacatgggaaagccaatggccttggtgcacctcggtgatagtcacaagttgcctcatcatcaaatacgtaggatggtttgaagattgatttgatggctagagcaggaggctcgttgataccagaacatcttgcacattatcaagctcgttttggctgcatgcgagaaagaatcaacacaatcagtgggacatgctgcatctttttatgaaaaagggctaccatatgccactccattggctcatgggtgccatccagtttccatttttggaaattgaaatgatggaatttcaaagtattgtgctgtgctgtgttggtttgttttgttttgcttttggatatgcaaataagaaaaaaattactaaaggtgtcaaacaaggcacaacctagtaacaaagcaattttaagtttctcattccaagaccttttcactttgtaaatgatcttcacttttggaaatgtgagatataacttcttcacatttcttgagaggattcggtttggataaagaaatttgataagtggtttttgaaaaatgtgcccctcacccaccctttgttttgtttcctttttgaaaacaaagatttatatcaacacattttttaacaatctaagagaaatttgttttgttttatttcataagtggtttttgaattaatcaaagttaaatcattttaagcgaagatgaagggaaaaagattgaaagagtttaggatgtggaaggtcttgtctcgattggatatgagattatgaattagaaaattgaaaatgtttagaaggggattaattcatgttctatggttactatctttgaatgagggggattcataggaaattgatgaaggtcttgtttggtaccccttttggcctctatttagaaaatttttgaaaacacatatcgggtccctcaaatttttttaataactgctcctaaccattcacaataattgttgtcaacatattgccccttcatgtctctttctatctctatcctatgcaagtgtaatccataaaatatttatgtgcacttcaacattttgaaatgacctaattttatttatctccttttggtataagaaacaaattccataatttagcaataagccatggttgtaataattatgttttcacttatcatctgtttaaattgttaattatgccattaaatcatacagtcgacaaatggagcctcaaatgtaaatgatataaatgtcaaattattttagacaatttagaaggaaagaaaatgaagagcgttggaaaatgtggattagccggttcaatatttgaagagctccttcattagaagcttgtcattgtgggttaggatgtacatagcaaaaggatcaatatctttaattgattttgtagattgggtaggatttagctaagggagggagtagttttttgtgttttcctgcctctaggctttgcctttctttatccattatatacgatctatgtgccttgctgtatagttttttgaagctatcaatatatttgtttatttttcaaaaaagaaaaaaaagaaaaagaaaaagaacaagaaaaagaaaaattgatttatttgtgacatatatgggtgttaccttgaattgaacaatttcattgtatgccacaatagtcttgttttgggtgaataaggaagaaataggcccttggaaatttgattggtggctttgccatatatttattctgcatcaaattttttttttttttagagatataatattgaaagtgccaaaaggggcgcacaaaggtacatatgatctatacaacgactgccaaaaaacgctaaaaaagggacgaaaaaacaaaaaatactccctctctcaaactgcacccatccaatcaatgaaatcaaatatggataacaatctttctcctataagcagcttggaccaagaaatttattttgcatcaaagttggcgtgctcattctatgaattccttgcttagctagttacatcttggatatgtttgtgaagtaggtagccaaacatttgaacccttttgtgggggatttgctacttgctttagtaattattttctaatccctttactccatagggccttctccaataggggtggttctgtcaaatgacctagcctcccttggctcttccaccgttcgggctccctttcctccctatgctcctaccacaatttactcctacaacccttttgctagactagacagtctatgttagtaacaccatcctccccgccagttgtattggtgggttgtcccttggcattttgttagggtatggattatggaaacaaacatagttaaatgggacaacaagggggttgtaactactttcaaatatgcaatgacctaaactttctagagtatatggtttttttttctacttttgatcaagtttatgatggtctatggggggaaacttttcttatccttctatgtacttattttatggcaatggaatgtttgtttcttacaagttccatttcattacgtataatggatgagagctgacaagtatacaagctgatattactctaaacacctctagttaaagacctacttcattatatatatgagtgtgtgtgtgtgtgtgttaaaaacttcttcatggtacacctttccatgtgaacaaatgaaggaagtgatggacgaaagcatgtgagagtccaaggatgctactagtaatgtttaatagtaaaatgagttgaaaaaataatgacaatcatgagctatgagagtttttcaaatgtatcttatgtcgtatttctatagaaagttagaaatagagttacaagatattttaatgacaagatgattttataagcttggggggcaactgaaagcatcacgaacaacaaaaaaatgcttaacatgcttttaggagtgaaataatttaaaacttcaataaaaaaacagtcttacaatcatttgcatgtgtttagtcttttgttaactttgaaagaaattagaaaaaataaaaaggaaaatgtgggtgtaggagattagtgctaagtcttgcaacttacaatgataagatgatagttgtgaaagaagtttttaaatttccttgatggtactcttctaaaggagatttggttgtataaaacacaagtttgatgtggatggaattaggtatgacctaaccatgtgtgaaaatggtctatgcatatcttgatgtattggaaatgttgtgcacaatgtttcttttttgttagtgtgtatgggagtactctccccctaaggagatttgatccttcaacaatgtatcttttcttgttgtgtctgggtgctcttccgaaggagatctagctatatttgacatgtgttgaatgcagatggaacaagatatggaccgaccatgtgtcagatatggtctatgcatatgttaatatgtgttggaattgttgtgcatttatcctacaataacttttcttccttttttggtggttttcctttcttatgataggggtgtgtgtgagagagagagagagtgagagagagatatggactctataatcgatttgaagaggagagtgataaagatggactctataattgatccaaagaaaagggagagagagatggactcttttattgatttgaagcagtcatgggctcttcaaaggcgaaagagaagcttctcagcaccttgtttgtcttggatcactccagagcttctttctctcgagtaaaacatttttctcatttttatttttggtttttttacaatttttttttattgattttgaagagaaaaagagtattggatctctccatgacatctttgtcttaagtaaaacatttttctcattttcttttttttttttctttataaagattctcatttcatttgaagattgggtttagatctagtcaattttgatggttgtttgcaaggaaggcaaagctagatggggattgatggtgtttttagagatcactagattgatctttttcaattttaatgtttgtttgctaggggatccgtggtagatggggattgatggtgtttttagagactacaatggttgtgggtgattaaagctttcaaagtcatcaaattctaggttagctattgatgcttgcattttagcttgggaaagggaggatgctttagatgcaattgcttggatttggctactcttattcttagatgcttaggttgccaactaggtagcagatcattggcaaaacaagaagcctcattgttagaggcatctattatgaccttccttccctttgagtattcgtctatgactatttagggatgtggagttgttggactaaagcaaattttcgcaatttgatggttgtttgctagggaattgaggcaagatgaggatcaatggtgtttttagatatcacaatgagactaggattagagctttcaaagtcacctaattttggtttggccattgatgttgacattttatcttaaaggacggggctattgggatgcattacttggatttggctactcttatcttagatgcttagatctactcacaggcaccttatcattggaaagccgagaagcctcaccgttagaggcatctattagttcatttctttccccttgagtgtttgttctaggacttttagggatgtggagcaattgggtcaagctttgggagagtctttccttagatctctatctctatttaaatggtctattgactctttacaaattctgaacccttctatcttggatttaattgattatattaggatggttagttccttgtgggaatttttgttctcccttcatttttagatgccctctatatacttcctacgtactagggttacatcccccctttttagttagacatcttttagtatattcttatccttggtttataaaaaaaaatgtcttggtctttggatcccttgctggatctaatggcagtttaggttaaagctttctcttggtccttggtctaatttgcaatcctatttcttttgatgaattaatgaattatttgtttcttacaacccaaccccgccacctcaaatcgcatcttctataaggaaaaagaaaacattctcctggatttcaaccttttgggcatgtgatcatctttgaagctgatgatgattagccattgttcaagaaatgatgtggtaagaatagcgacatatgacctagaatctcatcatcttaatttgaccaaattttttttgacatcggatgttgtctctttggtttcatgtgatggttcatctggttctttaatttttttttctattcgatgatctagatatgtttttagcaagtatggattgaaagggattgtggtgacaatttgtattatgcctccttgtttacatatgtgtttctatttaatggtttccttttttatttgataggcaataaaacagaatatttgaaaaggtgcttaacaaaaaggaagggtgcaacccatgtacacatgtatacaagcagtgcaaaaaacaacttaggacactgctaatctaactaattcccttcctgtctatagagtttcaagaaaggcaacaaattatagcccatatccctgctttaccaccaaagtaaggatttgagaatttcagttccacagaaaaccatttcagatcttcaaatgtctttttattgcactaattccatgcaaccaaaagatgcacaagagaaccatcctccaagttgccttgcacttagatcccacaaatgaaccatgttgagtaagaagaacatttcaaaccaggtggggaaacacctaggcaatgctaaaagatgacaacaatcacccataggggctgtagcttccagatcttcattacagaataacctattcatgaagctccaacctcttttgatgagttggtctaaagttgagatccccccccgcccaaaaaaaaaaaaaaaaagaaagaaaagagaagaaaaagacccacagcaaggaatccactgttggcatctctgtctctaaaatgttccttctgaacctgggattccagttgctcccatcccagaaatctgccacccaagcatccttgtgaaccaccatgatgacaagctccacaaaatgatcctttaaaggagtctcctctgatcaagggtcatcccaaaatcttatggtcattccaaatagagggccttgtccttgaggaaaaaatataagcccacgcttcctaatggctttccaaaagtttgagccatatgcttccctgtctattgtagaacaccatcccctctccatttcccatacttccctgctatcatctttccccttaggtgatttcatttcttgagtagtcttgtggagtttataaagccaaaagtaaacagggctgttataacaggtattagaattaatttttgtatgtttattgacatatcttatgtctttccttgtttaatagttaattttgatttcaagagtaactttattagatatgatttattttttagaaattttttattgaatttacatggaaggtcactacatggaaggtcactaatggcagctgaagctggaaacaaatggtgtttctttttggagtgttgaataataattttaatttactgatacggtcaattttagaatccttttcacttgcattccttgaatttataaggaaggccactgtatccatctggagttgggtgagtggtgtttctcttttgagtttcaaataatcatttactttattatagatggtcattttagagaaatattcacttgcctggaaacatctgaattttggcttgtccctgtcccattttaaggattgaatactcatagtttcaatgtgatataatttgttctttggcttctaatggtaaagcacattctaattttctctgtctgtattttcttttgcattgcaggtctcaaggtaatctattgcattctatttcattgagttggaacttttacacttcctgaaaacaagatgaacctgtgcactggtgcaaagatcctttttcttgagagaaattactttagtttgcaaaattccattcatcctgattttttattttatttttttatttgcagcaatattgtttgctccttttccccccttatttctgatactggtattgtattttgattggtgtgaagtggaacttataccccttgtgttgtgttgatgtgattgagaggctatattttatatatgaacattacaaaaattatagcacttcatatctcatgatttttctttgacctattaaaaataataataataataatctcgtggttttcatcaatgaaacgttggtgctttttcagtggtaactatgaataggatagtcaccatgaaaggaatgaatgtggggcagggaattgtgtgtgtttaacatttaactttattttgtgtggaactttatttatctctgtgctatctagggccatatcttctatttgtatttgctatctaggtgcattttttgtgcctactttaacccccatatttttgtctccctttccctggagcaccttgaacctaaaccatgccagcagattgtcatcctttgagtggggttgaggctggttgttggaatagccaattgaattcttattttgaggtactgggggtaaactcccagtagagtggatttgtcctagctcaatggggaccatcttcaattgtgcttaaggaatgcgtttgtgcactttgtttgtatgggtgtggtggtggtggttttcttcttttcccttttttttttctggtgagggtgtggggaggtgtgtgaataggaagttgatagtttggtaggaaaagtgtcttcatcctgccttttattgcaaggataatctcttatgtgggactaaagaaaataagctccacaatggctcacttcttatagatttcctatttgattgcctctggtttcttctttgggtggtgggatatttaaaaataacttttattaggaagaattcagactaatggccacaatgcaataaatcatttgatttttggcatacctttgctcggcattgacatccatggattatggtccatacaatgtgtaagagtgtggaatgtctcccatttgaaggacaagaaccatcaatttttaatgaaaagaagaccaatagcacttacggaatgtgacctgacattgagaagggatcaagtcgaaaaaatatttttgatacagcaacttagaccttaaagatctatagaaatccataaaacatgttattatttgtcatgaaatttgagaaatctggcctgttggtgttttcccataccccccctcctttttgtgtttgttgtaacatatgctttgtatggtcttgaaggatgatttaacgctttaggcccatattggacatcataaagttaggtactgtgtggttccttggcaggctttttatatttgaaacctacta

SEQ ID NO: 10742 - DNA, 680 bp, Vitis vinifera
  Intron number 1 from transcript GSVIVT01033598001 (locus G SVIVG01033598001) derived from phytozome v7.0 (chr-ID chr8 ; pos 19440264 to 19440943 reverse strand)
tcttcgttcctctgaacttgaagaattcgtcagaggtaagttttcttccacagaaccctacaattaaaaccaggttggttgttgataaagtacagaaaaattaaggacatttagagttttcaatggttttggaaattgagaaatcaagaaaatccttggacaatgtggacattgtctggttggacttttttccttcattttgcggtgattgaaacatgcaaagcacgagattctgctgttttttttttcctaaattttaatgccatccaaataagtggggtaaatttttggttctcaatttatattcagttttcttttgaacggtaatttttccagtcagcaattgatcaaaaccctaacagaatctcaactacgagaattagaagaaaagcaaagaaatcaaacatttgaatatttcattttcatttatttatttggaacctgagagaacaaactttccccttaagtgctccgaatttcaactatttcacttagggagagttttcactttctttctaagtcagattcaaatttctatttattttgtttagtcatttttcttagcaaagaaaatgaggttagtttttctgtgcacattaaccatatttttatgatttcaatctgtatttcttcttatgcaaacaggtgtttcatttgatctctctgataaagagcttttc

SEQ ID NO: 10743 - DNA, 1843 bp, Vitis vinifera
  Intron number 5 from transcript GSVIVT01000249001 (locus G SVIVG01000249001) derived from phytozome v7.0 (chr-ID chr7 ; pos 20527788 to 20529630)
ttagagtttggtgcactaatttggtatgtcaaattacacatgttctgcttaccattcatttcttctattcatcatattcatatttgatgacatgtagaaaccacatgaaattgaaattattgttgtatagttccattgtatttgagtgtggaaatgacctatgtttatctaggtgtcagattttttgaactccaaaatttaagctaaaagcaactggtcaagaagaatccaaaatttagatatggatgcgaggatatggcatagtagaaggaaaaagggaaaaaccaattagacagcaattataaataaagatatctttcttctttaatctctgacttttctcccttatcttgaaatattcttaaattatctcttttttcaatgtaataatctactaaggaagttgaaaataaaaaataaataaatcaaaatcaaacaaccatatctaaagcaaagtaggagtatccaacaaggatcccatacatacccatgtcatgttgtgacaacatggggacactgggtgaaattggagagtttgggtatcataggaaacaacaatgaattgaagttattgcatctatagttctgtgcctttgaacatccaagtttgtcttggagaattgtctcattagaaggacttatgacaatgaaaaaacaaagaaagcctattcttaaaattttggaatgactcaattttgataatgtgttgagagaaagtcaactgattttagatgatgtggaaaaaaaatactaatggttaatagcaacatgttgcagtgcctaagttagacatggtaatattaaagttagcatgggatattaatttgaccagggctgttgatgtggggcccaattgaggccatatacagtatgttttagatgccaattgccttcacatggtcacactcatgctctccctcacttgttctactttccacaccatttctgcaatgctagatcactgtcttcacaatgcaccttgaccctgaagacctatctcagttcctacaaacgagccctaaatcaccaacattaaatgccatggtttcccaatgtggtaagccctgcccactaatgcatgactagaacttccacgtttgttttatgctacaccaattgttgcaagttaaattgattgacaatgatcatctatcaacaaaaacttcaattctttatggcatgttggtattagtagtactttgtcatatttgatctccttgaataggatatatgaagattttaaagtacttttggctgtcaattactttccattctgctggtcttaatctgttgcattgcaatgtatgtcccttgtgttaaagagtgattatggaatggggtcaagcccatcataagtttgattcttatcaaaagtggattagctcaacatataaacagtgagagaaggttttgtttaatttctttttgttatgttaacctgtaacggctactctctctcatgtagatattgttcactttggatctaatgagtcctcacgattttaatacatgtctatctacttaagtgaaatctatttcatatacaaagttagcaactttttgccatatgacatatgggatatcacaatcacttctaactcaaaacgcataattttggtgcttgttagaagtagagtgccccagaaaatgaataatgcgattacgctgatatacaaatagagatgacaaagcttttcttttggttctgaaataatgaagcaaagtattcgttttctttcatcgcgtactcttccattttcctgttattcctcatgtattttccctcaatgattttgttgaataaccaggtacagtttaagctacatccccttcgcgaggtcca

SEQ ID NO: 10744 - DNA, 4179 bp, Vitis vinifera
  Intron number 1 from transcript GSVIVT01020549001 (locus G SVIVG01020549001) derived from phytozome v7.0 (chr-ID chr1 2; pos 4588747 to 4592925 reverse strand)
cgccctaccagaaggccgccgcccttgtcgatctggttggttcttgtttttcgattttaggttcatttctgaactttgtaattcttttttgctttaaatatgaattgttgtggattcggttctggtctatcgattctctcaatactcaggtgaagtggaattgagattggcgttgtgtagagtgtgatgagaggtgatgcgtctggtgtgatctgtttttggtgagcttgaatctggtttaaataaatttcaaaactgtggtaaagttactcttgtggcccaagaagaagatgcaaaattgagagatttgagagaacaattttttcttattaagaataattcatcacggtctttttttctcattacattccccctacgctacaaaataaaaatagaaaccaatagaaactcatcctaatagaaactagaaacctattaaaaatagaactcttcctaataaaaactattaatcctaaggattcattattcctactaaatagaaaccaaagatgaagagattctagggatcctttattcaggtcgtaacagttacctatgatataaagaagttgcagtagaagaattcgtaaaatcacactttgggagtgaggttaatgtgtaagttagcaattgtgtggtaaacatttgagacatggttgaattgagttctttggaattgaatttcaagagaaggctttgcgtgagagatctaagatggtctatcgtccaatcaaaatctgaggagagatttgagatcaatgtttcttttgtgaagattttgtcttcttttttggtctactatctcgagcttgagcctcaacagccttaacttgaagatgagacttttcgattctaaatgcactcaacttcatgcatgagcctaaatgccattgagaacactttctaggtcataaggtctttgatggtggtgttctgcattcaaatacttgtcaaaaaacctttgagtatgaggagcaaaagagaacccctaaagtcaccaaatgagcgtttaaaaactcaggggaaacaaggggactggatgaatgaactcggaccggccaattggtgtcaacctgctacaagactgccaaaatgacactaatgcccctcactgacgagaaatgccagaatcactttttaacctaagaccaagctaaatatgatcaaccatgttaaaatgctcacacatgcatgcaaaaatatgcttttgataacatgaatggagcctctaaaaacctgaggaaatcatccaaaaatttaagctgaaatacatagcttgttaggggtcttcaaccattaaaactcaactgtaagtcacccaaggtcatgaaattgccaacactgtaagactttcttccctctgcacatggaaatttttccatctgagctttggtaaactgatggttctggttatatcaggcttccaggtaaaatatgcttaacatcgttccttaagagaatcgtgctgttggcggcaatggtggattgctggtgatagttttttacctctgttgttgtctcatattcatccaccacaaacatgactgaaatggttatgatggaagtaataagggcaacattggtttttaaatcaaactttcatggataaacacaagaagcaaagaaaatcattgaaatgagaccctggcttgcacagaatccagtttatgaagccagttccctttcactaattggaaatggacttcccagcaaaaggtttcttgtagaaggctgtttcatgttgtttgccaaacattgatttttccctttattttgttgaaaggatttctagaatccagaagcccattttaagctgctaggaatgtttgacaaattcatcataagcctatgatgatatgcttattgttttttcccatttgaattggacatacttgttttttttccttctgttgaaactcaattttaggattgacaaaatgttcaatactatgacaaaggatgaacaagaatacatgcttacaatagaacattaaaagtaaatttgacgcaaattgtcttgaaagtaagaatgtttatatttgaaaccattgacctctcttatggcatctcatgcctgtgatgcaatatctttgtgagaggggttggtcattaactcccttcagcctcttctcctcaaagtccttctattttgacatcttcaaaagtcatcttccatccatcgacatggaggccttttttttttttggaagtcaatagttccacttacagttgagtcttttcatggttcatgcccatgaagaaggtcaataccaatgttttcttatggactataatgccttataaatccatcaactcaaagtgttgtgatttttgtttagtctgtggagagatactatctagttgcattatggttgtggtagagcttgtttagattgtttggttcttggacctttcgaaagtcattgtagatatgatgggaatagctttccatggttttgggctaaaatctaggggcgaattatgtaataggaagccatgcatgcaattctttgcatgatatggttcaagaggaatggcatgatttctgaagatcaatggaggactacaaaggaccaggctgagggggcactctaccttactttactttgttttgttgctacagtgtttcagagtgttctctgctgtatgattatgatagactggagaggtaaccagaaatgattgcttgagacctaagagagctagagttaagtggatgttcgctcccctatgatgccttaaaacgaaattttcttggtcgttctttgggcaactcagggcaaatgggaattaggaagagtttaggaaccatgatgacagggtgatggagtgtttctgaaccactggttttggcttagctactgaagtaaaaatcttccactttactggaaaggttggtagtgaaatcctcctggggtgctagtggtcttctggtggaagggggttccagggtggtgcttttgtgagtgtcacaagaaaggagggttcttagaaactgggtttttggattttctaaatttgttgatctctgtagaggcttgtggttctgcttcagttgaagtgtaggttggcaaaccagattgcagatagtttggacaaatgaagagcctcttctttagagccttctattagggatttcctaagcctctgacccataatatttttatgggtaaagatatattggtttaaggctgaaagaaataggattgcttttgaaaatgaggagcttttgattcatgggatgaaaaattcttttatatgtaatttttggtcttggactaagccatttatagatgaaggacctttacctttaatcaactttttttattggttgggttctagatgagggctggtgagattttttgtatctcctgttcttttttgttcttgcctttaggtgcgttttgtgtactccctgtatgctttgggttggcctttgagcacccttttctctttttatttataaaattttctgtgagtttacctaaaatatatatatatatatatatatattgatttaaaggctatataatgagtgctgatatattgatttaggggctatatattgagtgtttgaagatagtaataatcaagttactttggttttgtgtctgattttaaggatcactaattgtttctttcgtttgctccttttttattaatactttctataaaataatgttacaagagactgacagaaagcctcaatttaggatcttggtcgcctctatactattccatggtttccccccaaaataatataaacataggtatgggcataatatctgaacactatagttagcaccaagaatcatttccttctccatctgctcatttaatgagcatgagttttcaagaattcttgattgatgttctataaattcaatccacatgagagaaagaaacatttaagtcatttttttttatatctatttaattttctttcctcatatggtttgtgcttgtctgtaagggccttggaatgttgccttgcagacacaaagatagtcatgtaactcaaatctctgtctacagcaatatggaacttggaagggagcatcaattcttctacaaaacttttgatctgtttttttttccattgcttcttaacggtatggattttttccattcatgagatggtcatgaccattgattgagagcacatttttcaggctgagg

SEQ ID NO: 10745 - DNA, 12794 bp, Vitis vinifera
  Intron number 7 from transcript GSVIVT01015549001 (locus G SVIVG01015549001) derived from phytozome v7.0 (chr-ID chr1 1; pos 4761705 to 4774498 reverse strand)
agatagaccttccaagcttgtacaaaaaggtaaactgccataatttgttttcactggactgttggatagctcagggatcttttaaacctactgatgtaatgacgtttgatacttgaaaatctacaaaatattcatgcttaagttgatctgttttgcattaagtagtaataacttgtgcaaaggcatttgtgtagcaaggacacactttttgtctttttatttcctcttgaattagacacaccttttatctgttagacaggggcctccatattgtggcataattgcattctattcctgatcgttggaggttactttgccaaaaatgctataccgtgtcttacactaatactcttgatgatctgattaaacataacagggaattaattttccatgatttttgagatcgtatacttgtatggaattaattccttaattttcaagattttgtagttggatgctttcctgttttattttcctcatttgtggagtagacaatctctagaaatcggtcaatttcctgattttgtgtaatttagtttccaaattttgtaggattgtatactataaatactttattattttgtcagaaatgcatggatgttattttttcacatggtatcaaagtttgttcgaggcctctaagttttcttttatttttttcctaatggtcttcattatcaccaacttctaatggccttcattgctgctattttctgcctcaagtgaccttcattgttgtcattgtattttttcctctcttctcagcggccttctttactgtgatcatttctagactgttgtcattcaatagtttttttggaattcagaaattgcacttaagtttggtctacttcaatgcctgctatgttgaaaagctcagaaaacaaaaccttaggaatccaaacttagacactgtcttcttgaactaactacctatcggtaaatatcagaactttcaaccctcattcaaacttaatgaccaaaactgtttggtatggttgcaacatgtgcacatgtttttgaggggaaaaaggcaagctcaaccacttgataggaccagcatcaagtgaagatgattccaagtcttctccttaggtttaggaggactcaatgatcatgttctggctatagaacacaatgcaatccaaaatcagcagaacatgcacgttcttaaccaggacaaaggaaatctaggaggtagtgaaacagacctattccaaagtcgtagatgctactcagatttacaagataaagaccaatattcactttataaagtaaggtaccttatccatgattaagtactataatattataaaaggattgtgatttgaactagattattaccaaaaacttaaaatgaatactagtgtggatgttgctatgttcctttagtttattgaaagagcaaatattggaattattggctggatttaacgtggaatatgatcaagtatctgctcaagattgtggaaaacaattaggaaggagtggatttatttgagtggtaggttggcctactaagtgggtaatgggcagagagtgagattctggatggacaaatggtgtggagatgagccactttgtgagtcattctcttctttattttccatttctttgtctaaggaagcttgggtttcagatgtttggaaccttgatggtgatgggggtggttggacccctcttttctcaagggtgttcaatgattgggaggtagagttggtggagcattttttgcaaaagatccaagcttttagggtgcaaagggaggtggaagatagagtgatttggacagcttcgaggtgtggcacctttacggtcaagtctctttattctattttggagcccgaagattctcctttgttccctagtggtagtatttggagagtgagtgtgcctcctaaggtgcctttctttgcttgggaggcttcttaggggaaagtcttaactttggaccaactttaaaggaggggacacttgttggcaaataggtgttttctatgcctcttttgaagtagaaatggtggatcgtcttcttcttcattgtcaaagacttgggttttgtagaatcttcttttctccctctttggtgtggcctggattctctcttgtttagtgaaggaaactcttcttgggtggcatggggcttttgtggggaaagctcgtaaaaaggcttggcaaatgacacccttatgtatattttggacaatctggaaggaaaggaatatgttagcgtttggtaataaggagctttcgctccaaagattgaaaaattcttttgtatgtaatatttgatcttaggttagggtgtctatagttttgagcccttcttcacttgtaagcttcattgattggttaggctctaagtaagggtaggtgatgtttcttgtttctatcccttccccttcggtttgagccttttggcttcttttgtttactccttgtgtactctgagggcactgcttttggtgcttcctcttttctatatgtacatcttttttatctatcaaaaaaaaaaaaaaaaaaagtatctactcaagtacttgggaaggaataattaacacccttgaatgagatattctcaatcataaaggttaaaaaatggaggagtgtaatgctggacaatatgtaagtgaaggttctactcttattgtttcaagctctcaaagtggtccaatccttttgcacaatttttggtggaggagagatatctaggcactcaagtaacaaggataactgttggtgtactcattgcaaaaagccaaggtatacaaaagagatgtgttagtagttatgtgggaaactgtagtccttcaataggaatggagggaaccaaaactagaattaatcagaataaggagaaacccaaccataagaattcaaacagcttagaatttatgggactaaaaggggaagagattaaagacttcggagttataaactctagtgccattggctacttgacctataactctcatcatttcttgtcctctagctaatgtcatggaaaccaaaaaatcaaagtagctggtggtagtttagctactgtggctggataaaggactattacccttaacacatatctttccctaaaatctgttctacacattcttaaactcttaataaatcttctatcaatttatcaagttaccaaagacctaaattttcaaagtaacatttttctcatccctctttgttgttcaagaccttgatatggggatgatgatgggtcatgcttgggaacaggatgggctttactatcttgatgctgggagggacaatggtagtgatcatatacctttatctcatctttcgaggttttttatctaataaaatccaaatctagctgcatcatttacatttaggacatccatcttttctgttattaaagattatgtttcttctgttatttcaagatttgaatgctgatgacttctattatgaattttcttaattgacaaaacattattgagtttctctccctttgagcaataatagaacatctaatatctttacattaattcatactaatgtttggggagcctctcgaattctaaatatcaatagagctcgttagtttgttcttttgatcaatgattgtttttgtgccacttgattataccttttaaaaaacaaatctaatgttagttctgctttctctactttccacaagatgattagtactcagtttgatgtttaaataatattttaacctgaccctattttcttacctagaagagagagaataaaacatgagtcatcatgtaaagatacttcacaacaaaatggagttgtagaaagaaaaaattctcatcttcttgcttcattaattggttaccttctaaggtattgggaaacaaagccttagtaaatgttccctttgaattctttcttgattttcatggatttagcaaaatcccacctaaaacgtttgaatgtgtctccttgtccttcttcatgctcaaagtcgatgtaaacttgatccttgagctcttgaatgtgtcttcattggtcattcaccaacaaagaataggtataatgttatcatcctatttctatgaatttttgtttccatttccttggatgccacttttgttgaacaaacaatcctttttcactgattctaatctttagggggagtccttgtcattaaacaaagattagactaacttgagcttacttgatctgccaaatttatctcttatgacccctattatatgtagtctagatatttccccattagcaatcattgaatctactcctatggttagacacatttgaacttgagaatgaggacgagagaaatggtaacattattgctatgccgctacaagtctacttaagaagactaacaaaccttattcccatgcaaacccaagaatccaaaactgtgataggtattgaatctaatcctagccgaagacctaaatttgctaatagcttttaggaaaggaatcagaaaatgcaccctacaccttatttctaacttcatatcttttgatatattatcctcacaacatcgagtcttcattacccaattaaatcttattcaaattccatcaattgtccaagagacaattaggaatgagaattggaggaaagttgtgttaggtgatgagtgctcttgaaaaaaacttaagacatgggaatttgttgaattactctaagggaagaaaccagtaagggtataactgtataagcaggtatttactgtataatataaggtagatggaaccttggagagatataaaactaaacttgtaaccaaaggctacactcagacatatgaagtggattatcgggaaacctttgctttggtagtaaagatgaatactaaatgaatattgttgaagttagtagctaaccttggttggtctttgcaatagtttgacattaagaactctttgcatggtaacctagaagaagtggtctttgtggaagcatttccaagttttagtgatggattcaaggcagaataccgactaaaaaaggcaatatatggtctaaaacaatcttctaaagtgtagttttgaagattggttaagttatgggaaattggaagttctgacaaaggcaagggaatcatactctatttatcaaatggtcaacaattggtaaagtcacaactttaattgtttatgtgaatgatatgatcgtgactagggatgatattgaagaaactattgaccaaagaatttgagataaaggacttgggcaaattcaaatattttttaggaattgaagtggctaatttaagaaacaatatttttatttcccaacaaaagtatattctcgaccttctcaaagaaacttacatgctcgaatgtaagcctattgacactcctattgaacatgttgaatattatgtatttatagtgtataatctttccttgttaatataggtcacatgtatggtagttcctagccttgtatatatatatatttctcaattgtaagtagatatgacatgaatgagaattaaggtctttcttctttttctctctctctcaacatggtatcagagccaagggagaaaacctaattcttttcagtttcccgtgtcatcaactccgggaaactttccggtgaccgtgtttcattccggtcaccttccccatctcccaatactttccggtcagtcggatcgtcgtcagaaaacactcaccgccggcaaacttttccggcaaactttccggcgacgtctttttccgacaccgaccataccagaaggaacgcctggaagagatctccaacttttgtgaaggcaccggaaccaaaagatcatccacgcgctagccacgcgcaatttttcgtccggttactgcatctcatgcgccggcgcttgagggcgcgtgaggactttcccggccacgcgcctcctcctccagcctcgcttgacactgactatccttccttcatccttggttctgccatccgagccctgcacgtaccttttttggggttttttgcctccgtcgaccctccaaacagtttttccggcgagcttcagctactttttctccatcctaatccctgcacgtgcctaaggaagtgttcgtccacctttccggtggtgccatgccgtgatctgaagctgtctccctttccagtggtgccacgccgcgatctacagccgtattagggctctcttcgatccaaatgtacttcattctccagataagtagatatggctactaaaacttccattttttcctctgttatatctggatctcctatgattacttcggagaaattggttggcagtgacaattatctttcctggtctgcctctattgaactttggtttatgggtcaaggatatgaggatcacttgattacacaggaagcagatatccctgaggttgaccgcgtacagtggaggaagatagatgcacagttatgtagtgtattatagcaatcggttgatcccaagattcttcttcatcttcgggcctacaaaacttgttttaaattttggactcaggccaaaggattatatacgaatgatatccagcgtctttataaggtggcttctgctattgtccatatcatccaacaggacttggatctatctacttatattggccagattgcctctcttaaggaggagttcttgactgtgatgcctcttactcctaatgttggggctcaacaaacacagcttgacaagttcttcatggttcttactcttattggcctccgtccggatcttgagcctgtccgcgatcagattcttggtagttcatcagttctgtccttggatgatatgtttgctcgcctcctccgtatctcctccactcagactttgccatttgatagcacttcagattcttctgtgttagtttctcaaactagctctcgaggaggccgcagtggtacccgaggtagaggtcctcattgcacctattgcaataaatttggccacactcgcgatcgttgctatcagttacatggacgacctcctcgcactgcccatgtggcctagtcctctgattcttcgctgcctcagcctccgagctcttccgcatctcaggcttctgttgcctctgttgcccagcccggtaatgcctctgcctgccttacccacacatctcctcttggaccctggattctagattctggagcttctgatcacttatctggtaataaggatcttttctcctctatcacctcacctcggattcatctcctgcagtttgcatttccactgatgctcctctccttattcacaatcgtctgggccaccctaatctctccaagttccagaagatggtccctcgtttttccactttgtcgtcgcttccgtgtgagtcatgtcagcttgggaaacatactcgtgtctcgttcccaaagcgtttgaataatcgggcaaagtctccttttgagcttgtccacactgatgtttggggtccttgtcggactgcgtctactttaggatttcagtattttgtcgctttcattgatgactattctcgatgtacttggttatttttaatgaaaaatcgagctgagttattctctattttccagaaattttatgctgaaatccaaacccagttcaatatttctattcgtgtgttacgcagtgacaatgccagagaatattttttaggcccatttacttcgtttatgtctcatcatgggattcttcatcagtcttcttgtgctcatactcctcaacaaaatggggcagctgaacgcaagaatcgacatcttgttgagacagctcgtactatcctcctccatagtaatgttccttttcgtttttggggggacgctgttcttactgcttgttatttgattaatcgtatgccctcctctgtcttacacgatcagattcctcactcccttctcttccctgaccaaccactttatttcctttctcctcgtgtctttgattgtacttgctttgttcatattctcactcctggacaggacaagctttccgccaaagccatgaagtgcctcttcttgggatactccagacttcagaaaggttatcgttgttattcccttgagactcattgatactttatctccgttgatgtcactttctttgaggactcaccattcttttccaccacttctgagtctcttcctgtttctgaagtcttgcctattcccattgtctccctacctgatgctatgcctcctcgaccacttcaggtttatcatcgtcgccctcgtgttgttgctcctctcccttttgctgaggcacctgctgactcacttcctatcccttcggcttcacctgccccagctctgccttctcctaatgacttacccattgctgttcggaaaggtactcgctctactcgaaatcctcatcctatttacaattttttgagttatcatcgattatcttcaccctattttgcttttgtttctgctatatcctctgtttctcttccaaagagcacccatgaagctctttcccatccaggctggcgataggcaatggtggatgaaatggctgctctgcactctaatggcacttgggatcttgttgttttaccctctggtaaatctaccgttggctatcgttggatctatgtagttaaggttggtcctgatggtcaggttgatcgccttaaggcccgcttagttgttaaaggctatactcaggtttatggttctgattatggtgacacattctccccagttgccaagattgcttttgtctgcttgcttctctccatggctgctatgtgttcttgacctctttatcagttggatattaaaaatgccttccttcatggtgatcttgccgaggaagtttatatggagcaacctcctggttttgttgctagggggagtctggtttagtgtgtaggttacgccgttctctatatggcctgaaacaatctcctcgagcatggtttggccgttttagttatgttgttcaagagtttggcatgcttcgcagtacagcagaccattcggttttctatcatcataactccttggggcagtgtatttatctggttgtttatgtggacgacatcgtcattacaggcagtgatcaggatggtattcagaaactaaagcaacatctttttacccactttcagaccaaagacttggggaaacttaagtatttcttgggaattgagataactcaatccagttccggtgtggtcctttcccaaaggaagtatgcttttgacatcctggaagaaactggtatgttagactgtaaaccgatagacacacctatggatccgaatgtcaaacttgtaccaggacagggggagcctttaggagaccctgggagatatcgacgactcgtaggtaaattgaactatctcaccattactcgtccagacatttcttttcctatgagtgttgttagtcaattcctacagtcaccatgtgatagccattgggatgccgtaatccgcattcttcgatatatcaaacgtacaccaggccaaggtgtgttgtacaagaacagaggtcatactcaggttgttggttacatagatgcagattgggctggctcacccacagatagacgttccacttcagggtattgtgtttttattggaggtaatctaatatcttggaagagtaagaaacaagatgtagtggccagatctagcgctgaagccgagtatcgagctatgactttggcaacatgtgaactcatatggttgagacatcttctttgagagttgagatttggaaagaatgaacagatgaaactcatctatgataaccaggccgcattacatattgcatccaatccagtctttcatgaaaagaccaaacatattgaagttgactgtcatttcattagagagaagatcgcatcaggatgtgttgctacaagttttgttaattcaaatgatcaactagcagacatcttcactaaatctctcagaggtcctaggattaaatatatttgtaacaagcttggtgcatatgacgtatatgctccagcttgagggggagtgttgaatataatgtatttatagtgtataatatttccttgttaatataggtcacatgtatggtagttaggactcctagccttgtatatatatatatttctcaattgtaagtagatatgacatgaatgagaattaaggtctttcttctttctctctctctcaacagaacaaatcatgagtttggagaaacatctgaaaacacaaccataaacagggaaagttgctagaggctagttgtgaaactcatttatttgtctcacatgaggcctggtataaccaatgttgtgattgtagtagccatttcatacgctctcttgaagaggctcacttacaggctgcacacaaattttgtgatacttaaattccatttcaggtaagggaatactctccaagaaaagtgaagagaagtttgtaaggctacattgatgtagattgagaggattaactgtagattgcatatcaacttttgggcattgtactatttttagaggaagtttggtgacattgcaaaataagaaacaaattgtagttgtcaggttcagtgcagaagtagaaagtcatggcatgaggaatttgtgaactacttgggctcaaaataattcttagtgatctagaagtgaagtagaagaggactaagaagctatactacaataataaactagcaatcagtattgctcataatccaattcaacatgattgtacaaaacatgttgaagtgggttgatgctttattgtagagaagctattgtagactgatctatactccttatgtttcaatagatgtacaatttgttgatatcctaataaagggtctattgagtaactcatttctaaggataactagtaagttggaaaagaataatatccactaattcaaaggataactagtaagttggaagagattaatatccactaactagcttaaggggtagtgttgacaacattctctaatttttgagattgtataattgtatagaattaattccctaatttttgaaattgtatagttgtatacttccctgttttattttcatgatttgtagggtagagaatttttaggaattagccaacgtcttgattttgggcaatttagtttcttaattttgcaggattgtatactaaaaattctatattattttgtcagaaatgcatgaatgaaaaatcattcttcatatttctttttcttgatttgtaaggtagaggatttttaggaaatagctaatgacttgattttttgtaatttagtttcttaattttgtaggattgtatactataaatactgcattattttgtctgaaatgcatgaatgaaaaatcgttcgtttccacagatacctatgaccgtttgatggttaacttgttgggcacagcctgaagtgtgaaacccttctcagtagcataaatatgtactgtggaacatttgatcagcagacttgaccgtgcacccctccccaccccaagaaaaaaaaagaataaataccataaaaactccttcaaaaattgctagctgcctctctgaaaacaagacctaaaaaatgagggtttccctagtgatgcatggggctttgaccctgaacaatgtttgaatggctgaagttttattgtgtgttgatataaaagcatatattcaattaatttgttcaaaaaacaaaatgctgacataagtactccatctatattggccagtagctcactcaaattaaaactccattgtgttaaaaacctccaaactcactaaaacacattagtttgaaaagaaagagcctcacttataccactttttatgatttcattgtcatcctcaattttttttaataaaaaaatgtctgaaatttcttgttggataaccaattttttttataggcgtaacaactaatcaatgtttttttagggttttttttttttgtattaaaagtttctaaaatttctcgctgaaattttttatcacctgttaattctcttattattattattatgtttattattattattatttgtataacaaagattttctaaagttttatgaaattaaatattttctttaattaattatgcaatcaaatgggagatcaatagatgaaggatagattctatatattgatacaaacatatttggcggtcaggtctaaggagcagggttttcagaattgaagtccttcaactggctggtaggggagaaggttccttccaatggtctcttttctaagttggctaatttcagtagccatgtggtgacgctggtcaagggatatgaaaaggagattttctcccttttgaggaagatggagacaaggagggggtgtggtgtcactgtctcagggtaaaaaggaagctaaacccaacttcctgttttgagagggagatctgaaaattggagtgttcagttaattacaaaagctctcctctgttagttaggggcagggggaggagcagcgaggtcacagatctcattgcgcgaggattttttgggtttcagatgttggctcaattgtttttttagacctagaaaagggttgttttggggtgttgagagatgtgggggctggtgaggcggctggggatggatttggttttctgagttgttagggtggatttgttcctcacttttctctttctctttctcttatttactcatcaagaaatgtttgatgacattgacaatgacagtaaaaacatatcataatggcagtaaatttattgaatcaaaatattctcaatcaatatttttgtatttacttactgtcatcaaagatttccctttggagcaaattcctggatcccccactgggtggagcaagcatcattaggaaacttctaacgtgtactctgctttgtttgcagatca

SEQ ID NO: 10746 - DNA, 2435 bp, Vitis vinifera
  Intron number 1 from transcript GSVIVT01037954001 (locus G SVIVG01037954001) derived from phytozome v7.0 (chr-ID chr1 0; pos 11507601 to 11510035 reverse strand)
ggatctcttcaaagcttcaagattcagagatccaggtactcttcttttctcaatcaggagtgggttggcctgggaatttctattttctttttgtgctttctttttttgggattatcttgtattgggtttctatcaaaacccattatcttttcttctttgacctctggagggttggaagttagattaagatccatgtgacatgttctgggattgatttaccattttatagctgcttaaatgctcattttgaagcttggtttaatcacattattggatattggaagaatgtttgagtaaacgtttacgataatttaaaccgttcaccgtttatcatctgtttggaattgggtctggatggaactgctttctagtgaaatggaaagagttgttagaatttcatcatggagggagaagaaaatatagagaaagaaaagtaaatgcagaggaagaaaaagttttgatcaagatttatatggtggaaatattagttggaaccttgatattttgaggggagaagttgtaaataaatacttcatattttggttatagattgatattttcattggaatctttctgtctttttaaaaccttggtaggagcagtcctgctttggaaaatcttggtttttgaaattttgtgggctcaagaacctgtttctccttagtagttcagttgtgtagtatatatgtttagcatctatatgatgggggtagatgtcatttagttgtgctgattaacctccttgaatatgttacaatgtggacaagtcatagacaatgacgaggattaaaaaagtcctctcagggaatcaatcagtatttattctttggactgaaccattaaaagaatcatagagccatcacttcaaatcatggtaaaaggtgaattttttttttgaagcacttaaattgatcaaataatatgatttttgtgatagtgtctgtccttaatttaataactccatttgaattacagatgttatctgtaaatgatgtgatgtgctgaagagaagatattactcatcagactacagggaatatcatcaaaattcaaaatctgttgtctatgactctatatatgcatatttacgttcagaggcactgcattatatgcttttacttctgtgatgacctcttacaagtgaatattagaatgcttatcatattctctctcatctacaatgcacttcagctattcttttttctagttttcctttttgcatgttcattaatttgagagaacatatgcattttttgtggaggtaactgcctaatccatgcctcctttatgaggacataattgcctagttgtcacctgagtgccttcagctgttttcatgcaaatatggtggttaaaaattaacttgtccatcctggttgatgagatatgcccccaaagtatggtaaagctaagataaaatttgagtggatgctgaatagtcattagtggaagcaggttaatttagataacatacatgttttgtttttgtttttgtttttatttttttgtttttgggttttctttctttttttttttgataagtttggttttgtttctttgcctttttttcttttttgtgtgaacttgattccatcagaaagctatatgaagtgagctacattgtttctttagcattcaggaagtactttgttccccaatcagctcagtcaataaaaacaagtccagtagttcttagacatcatcaactatgcttctgcacacaatcctaacctctctgccctagagcagcccgtttaagatcttgggctcaggaagtttcacttgtgctcattttattagagaactgaatggataactcactgattttcaattacagtttggattagagaccagtatctatttatctaatgtgcaatttgagggtgctcatttcaaactggaatctatctgttaccaaaattttcatgatggttcttatttaaccagatcttgttcaatgctatctcttttgataccctcaccattcacatccctgttactttcttccttcaatgtcataagaaaattaccatcatcaatgcagtctcctttaatgccttaaactgaagttgatgttgagcgctgtagtaatacttttccttgattccttcctgagattactgatagaagattcataatttctgaacctagacttggtttcatattttgtagccacctttagagaatcttcttccatatgaaatagatttcaatcccttgaaaggggatgaaaagtttctggtttcttttgtatggttgacattaagtgctgttgatggtttgttatttggaagaaaagaattaaaacattgttaattaaaacattattcttctacaagctgaattccaatttttcaaaattttatctgcagaaatgtttaagtatattactacttttttggaccagctaaggagaaaatttttctttcttttag

SEQ ID NO: 10747 - DNA, 9368 bp, Vitis vinifera
  Intron number 4 from transcript GSVIVT01024571001 (locus G SVIVG01024571001) derived from phytozome v7.0 (chr-ID chr6 ; pos 8753954 to 8763321 reverse strand)
gttaatagagagtttcttaagggtgctttgagaaggtaaatgctgatctcttcattcaattagatattgaaaaccagagtgcttataatccattatctgcattaatgaaatgggttgatgcttttcagattggccttaacctgttcttcttttgtgttttaattgagtgaatttgaacaaactgactgtgtcaaggaaaagaccatttttcataggcaaatgaaaaataatttattgcgaattgtctaatggaactatacatggacacctaaggatgaagaaaaagataataaagaaaaaagaaaagacaaatgactgcagctttgaacccctaaacaaattcatcaacaataccaaagaatgaaatatcggcaattcctgctctatattgttttaaccaagaattaggaaaaaacactgaccagtcttcttaggtgtagtgaaagaaaagttcagttctaagtaccaataggataaggaccaatcctaactgcacatcttctgcacatgttttggattggaaaatattaagaaaacaaatgaaattttaagaaaaggagttttcactggttgtttgtgcaaagaaaagaccaaccccaagtaccaatctttaatgtcaattaaaataaacaatttaaagttccaaatggactttaagataattcttacaagagatgtgcagtgtgcttgagaattgagaagactgggccaattaacctagtttttcaaaatctgaaggatatggcataggagagtagaaaaatgaaatggattgtatctttgactacgtttggccgagagagttggttttcaacttattgccctagcctgccaatctatttcttgttggtttttgctattcttagaaagttgagaaagggattttctttggggaggaggcctatcagatattaagatccatttagtgaggtggttaactgtttgttcaaataaggcctctgatacttgagaaaagtggttttgtgtaggtatgggaaaatggagggagtttgatcatgaggaagggaggtgtgactttttcttgagaacaaacttttctcttggaaatggtcaatcaatagatcaggttttggcataacactaggtgttgtgaaacactgttggaagattttttccccttgttatttaatatagcagttcatggagagacttaggtttctgaatattaggatgggaacagctgaagtccaagcattagaacaaacttcttgaatagtggctttggtggtggaatccttgttgctgtggatgaattctctgtcagtggctagtggttggtggataaactggtttggaagattttccaagaatggatttctcaatcagatgttattctttgactctgagtatgtcctctctttttccagctaaaatgacttgaacttctaaggcttcatctaaggttagcttctttatttgggaggcgatttggatgaaaatcctcatgattgatgaattagtttctgatctgatttggcaggctacattctgattcactgtgagtaggcttctagcctttggtctttggttttctccatgtttgtagtgacttaggttgttccccaatctgttaagtaagcttgattaagctggtatgatgctttggttggaaccaggtgtgaagcagtttggaaattgatccctttgcacctgttctggaatatctggaaagagcacaaactcagaacctttgaagggatggagaagttgattatggcagtaaagaattcattcatgaaagctctttccttatggtctaatggagaatgagaaaaggttacactcttttattgattttgtaaacatggttggagtgggctagcagatcaaggtttcttttcctcttttgcgcatcttgtatgcatggttggatacatggcttgcatagagtagtgtcatgccccaaaacctactccatgggcatgacggtcatttcacacctcaaacccgaaggcttaaagtggaaacaatacaaacattcatcttgtaactggaaattaccagttaccaaattcctgttcaaagtagtaaaataaataaattctataatcctcaattctcaactttaaaaactaacacatctacccaagtgttattgtccaaataacttcaaactcaaataatccaaataggcattaaattttaacatctaaacaatgtctaaaataaagtttgaaccaaaatcttaacaaagaaaaattccccagcctagccatcactactcgcccgaattgatagtacttgaaaaattatcaacaaaagggcatgagcttaaagctcaataaggaacatcaatgcattttcatggatcaaacatttttaattgcaattacaaattggagatacaacatataattattttcataaaacttttgagttcaaaatgctaatacaatcaaactttctcatatccattccaaaacaatttctcatcaaaacctaatcaaatatgttgaatataatgaatttgtagtgtacaattttttttttttttttttaatataggtcacatgtatggtagttaggactcctagcattgtatatatatattttctcaattgtaagtagatactacatgaatgagaatcaaggttttcttctctctctcttcacatggtatcagagccaagggagaaaacctaattctttccagtttccccgtgtcatcaattccgggaaaccttcctgtgaccgtgtttcattctgatcaccttccccagaccccaaacctttccggttggtcgaatcgtcgttagaaaacattcaccaccgacgacttttccgacgacgtcttttttcgacaccgcaaggagcgcctggaggagatctccaatttttcccaaagcaccggagctagaaaaccacccctgcgccggccacgcacgttttttcggccggcgactgcatctcacgcgccggcgcgtgagggtgcgtgagccactttccggcgacgcgcttcctcctccagtctcgcctgacgccgactagccacccttcatacctgtttctgccatccgagccctgcatgtgcctcttttggggttcttttgcctccgccgaccctccaaacagttttccggcgtcctccagctattttttctcaaccccaatccctacacgtgccttaggaagtgttcttctacctttccggtggtgccacggttgtttttcttttctatttggtctctcacacgggcaattcttcggtttttcctttttcagccgcatctgaagccgtattagggctctcttcgatccaaatatacttcattctccagataagtggatatggctactaaaacttccattttttcctctgtcatatctggatctcctatgattacttcagagaaattggttggcagtgaaaattatctttcttggtctgcctctgttgaactttggtttatgggacaaggatatgaggatcacttggttacacaggaggcagatatccctgaggttgagcgcgtacagtggagaaagatagatgcccagttatgtagtgtattatggcaatcagttgatcccaagatccttcttcatcttcgggcctacagaacttgttttaaattttggactcaggccaaaggattatacacaaatgatatccagcgtctttataaggtggcttctgctattgtccatatcagccaacaagacttggatctatctacttatattggccagattgcctctcttgaggaggagttcttgactgtgatgcctcttactcctgatgttggggctcaacaaacacaacttgataagttcttcatggtccttactcttattggcctccgtccggatcttgagcctgtccccgatcaaattcttggtagttcatcagttccgtacttggatgatgtgtttgctcgcctccttcgtatctcgtccactcagactttgccatctgatagcatttcagattcttctgtgttagtttctcacactacctctcaaggaggacgcagtggtaaccgaggtagaggccaacgtcctcattgcacctattgcaataaacttggccacaattgcgatcgttgctatcagttacatggacggcctcctcggactgcccatgtggcccagtcctctgattctcaactgcctcagcctccgagcttctccgcatctcaggcatctcaggcttctgttgcccagcctggtaatgcctctgcctgccttacccacacatcttctcttggaccctggattctagattctggagcttctgatcacctatctggtaataaggatcttttctcctctattactactacctctgctttacctactgttaccttagctaatggttctcaaactgtagctaaaggtattggtttgacccttcctctgccttctctacctctcacttctgtcctttatactcctgaatgttcttttaatcttatttccatcagcaaaatcactcgtactcttaattgctctattaccttttctgataaatttgtgaccttgcaggaccggagtacgaggaagacgattggcacgtctgaaggcctctatcacctcacctcggattcatctcctgcagtttgcatttccattgatgctcctctcctcattcacagtcgtttgggccaccctaatctctccaagttccagaagatggtccctcgtttttccactttgtcgtcgctttcgtgtgagtcatgtcagcttgggaaacatactcgtgtctcgttcccaaagcgtttgaataatcgggcaaagtctcattttgagcttgtccacactgatgtttggggtccttgtcggatttcgtctactttaggatttcagtattttgtcactttcattgataactattctcgatgcacttggttatttttaacgaaaaatcgagctgagttattctctattttccagaaattttatattgaaattcagacccaattcaatatttctattcgtgtgttacgtagtgataatgccaaggaatatttttcagccctatttacttcatttatgtctcatcatgggattcttcatcagtcttcttatgctcatactcctcaacaaaatggggtagctgaacgtaagaatcgacatcttgttgagacagcttgtactatcttcctccatagtaatgttccttttcgtttttggggggacgctgtccttaccgcttgttatttgattaatcgtatgccctcctctgttttacatgattagattccccatttccttttcttccctgaccaaccactttatttccttcctcctcgtatctttggttgtacttgctttgttcatattctcactcctggacaggacaagctttccgccaaagccatgaagtgcctcttcttgggatattccagacttcagaagggttattgttgttattcccttgagactcatcagtactttatcttcgctgatgtcactttctttgaggactcaccattcttttccaccacttctgagtctcttcctgtttctgaagtcttgccccttcccattgtctccccatctgatgttgtgcctcctcgaccacttcaggtttatcatcgtcgccctcgtgtcgctgctcctctcccttttgctgaggcacctgctgactcacttcctatcccttcggcttctcctgccccggctctgccttctcctgatgatttactcattgctattcggaaaggtacttgctctactcgtaatcctcatcctatttacaattttttgagttatcatcgattatcttcaccctattctgcttttgtttctgctatatcctctgtttctcttccaaagagcacccatgaagctctttaccatccaggctggcgacaggcaatggtagatgaaatggctgctttgcactctaatggcacttgggatcttgttgttttaccctctggtaaatctacagttggctgtcgttgggtctatgcagttaaggttgattctgatggtcaggttgatcgccttaaggcccgcttagttgctaaaggctatactcaagtttatggttctgattatggtgacacattctcccctgttgccaagattgcttctgtccgcttgcttctctccatggctgctatgtgttcttggcctctttatcagttggatattaaaaatgccttccttcatagtgatcttgccaaggaagtttatatggagcaacctcctggttttgttgctcagggggagtctggtttagtgtgcaggttacgtcgttctctatatgacttgaaacaatctcctcgagcatggtttgactgttttagttctgttgttcaagagtttggcatgcttcgcagtatagcagaccattcagttttctatcatcataactccttggggcagtgtatttatctggttgtttatgtggacgacatcgtcattacaggcagtgatcaggatggtattcagaaactaaagcaacatctttttacccactttcagaccaaagacttagggaaactcaagtatttgttgggaattgagatagctcaatccagttccggtgtggtcatttcccaaaggaagtatgctttagacatcctggaagaaactggtatgttagactgtaaaccgatagacacacctatggatccgaatgtcaaacttgtaccaaaacagggggagcctttaggagaccctgggagatattgatggctcgtaggtaaattgaactatttcaccattactcgtccagacatttcttttcctgtgagcgttgttagtcaattcctacagtcaccatgtgatagccattgggatgccgtaatccgcattcttcgatatatcaaaagtacaccaggccaaggtgtgttgtacgagaacagaggtcatactcaggttgttggttacacagatgcagattgggctggctcacccacagataaacgttccacttcagggtactgtgtttttattggaggtaatctaatatcttggaagagtaagaaacaagatatagtggctagatttagtgctgaaactgagtatcgagttatggctttggcaacatgtgaactcatatggttgagaaatcttcttcgagagttgagatttggaaaggatgaacagatgaaactcatctgtgataaccaggccgcattacatattgcatccaatccagtctttcatgaaaggaccaaacatattaaagttgactatcacttcattagagagaaaatcgcatcaggatgtgttgctacaagttttgttaattcaaatgatcaactagcagacatcttcactaaatctctcagaggtcctaggattaaatacatttgtaacaagcttggtgcatatgacgtatatgctccagcttgagggggagtgttgaatataatgaatttatagtgtacaatctttcctttttttttttaatataggtcacatgtatggtagttaggactcttagccttgtatatatatattttctcaattgtaagtagatattacatgaatgagaatcaaggttttcttctctctctcttaacaaaatacattcaaaatatctttactctggttatcaaataacaaatgatgcccaattaggtgagacttcacaaatgagtgactagtttcaaatttgttccatttaaggtgaacaaaaccaaaagtcaacaattacaactcgttgactagggccatagaaatgtcaacaattataacttgttgactagggtcatagaaactagagtcaaacacttcatttcattaattcaaacttacaaaacaaaatattatatctccacaattttcatttttcataaacaaaaaaaatactcaaaacatatattttttcatacaaaacatatatttgatccatgtataaaaataaaaataatatttttacacatttcaaaatataatataaaaagaaacttatttccttttacaaaatctgcattaatttctcttacctcaaagaagcactcaaaaacttgaagaatttacttctcacctaacataatatcatacataacatttattattgattatttatctagagataatattattttcaacttcctaaacaataataaattaatttaataagtttccaaatttttataaaattcatattcctccctaattttatcctgactatttatttctttatatacttaaattaaattaaagcttatacaaaaaccattattattattattattattaatcccaatatcctctcttacttaacaaaccacccatgcacttttaacaactctaacaaccccaccaactccactcattattattattgttattttaatttattccactaccactctttcaccctttggctctcatggttagattgattttttttattttattttattttttatttttttgagattgttgccccaacatacctcctcaaattccaaaatccagaaacctttcaattcttcttcttcttcttattattattattttcttttttcaatctaaagcctccacaagcaatttatttatttattttctaaatctaaaatttctcttcttccactaatttttcatttatttattttttattcaattgaaaatttcctattttcatcaataaattaatctgcaataataaatttccaatcttttggtctaaaaaaattaaataaacaaaccctaatttagattgggatttctaaagtattcagatctaattaatgaatataaaatactaatccgatgattaaaatcttacatgaaaaagtgatcttcaaactctaaacttccaaatctttagttttatgctctctaatctttttgatctccgtgtaaaagggttttttgaatagagaagataggtaaaatctaatttatacctaagacttttaaaagcgaaaagacttttctacccttattagattaattaatttaattaattaatttttaaattacgattttacccttaaattgggtttggggtattacaagtagagagtcagaaaacctatcaaaaaaggggagcagagagtaggaaaacctaaaaagaaaacaagttctttgcttttaataaagaagaggttgtttgacattttttttcctacatgaagctgcaacatgataatgcagaaacatgatgggtattgcaattgcaatatgcatcaccaattgcataatgtatggctcgatctatttatttatttacttcttcttcttattattattatttgattcctggttgtttccgtcaaattacttatcttttagtatagtttgttgtatactttatttcttattttttattgtagtttgttgcacattttatttctgaaccagagcattacttgatttatgttggttgttttgctttctcagattttctcagttctttatttcacctttagtgaaaa

SEQ ID NO: 10748 - DNA, 4953 bp, Vitis vinifera
  Intron number 3 from transcript GSVIVT01014044001 (locus G SVIVG01014044001) derived from phytozome v7.0 (chr-ID chr1 6; pos 9936425 to 9941377)
atatcaggtgaaggtcttatgattaaatgctttattacttgttgtccatttacaatatggaatttgtttggcatcactttgtactgtgcaatgcagtgtgcaagaaaactctttcttttcttcatacatataccgaggaactgtcattttctaacaccctgcctttatagatttaggctcaaggtcccttggtctacccaaaaatttggtcctcgatctctagtctaacagaaacctgggttaataataacaacaaaagtgttgtgtattttacattaaacacaaaaaaattagagtccacaaaaagtggccggatgcaccaacccaggaattttcgggtctagcaaggtcttctttgaaccatttggatcttggtccagacctcaacccacccatttatgatcagactgtctggagaggcttcagtgacttcagagtttatccatgcctcgccccactccaccccaccccacccctcaaaatattcataaattaaaacactaattgttcttgcccaatgaaagacctgcattttgctgatttggagagaattttctctgtacatttacttcacagattgtacaatatttataacagagaagaaaaaaatatacaaggattaaaaagttgtacaaggaagaatataaaataaatccctataatctattcttatattgtggcaataataataatcaaattcatgtcatcaatgagctaaatatgacagctacaaatatgctccttgtttatggaaattaaaataatcaatccctaaaataaagggtcaactagaatcaaatatgaaatttagaaatttagaaatcttctaatatacttgtcaacaatcaacactctccctcgagttggagcatagatgtctcaaatgcccaacttgtcaagtatcactttgaaagtcccttttaatactccttttgttaaaatatctacaagccaattcttgttctttacaaaaggagtacaaattaattcttgtgtcaacttttccttgattaattgtctatccaattagacatgtttagtgatcatgctggactggattataggcaatgctaatggcaactttgttatcacaaaaaagcttcattagaccctcaaaaataaaacccaactcctttaataaaaactgcaaccataacatctcacatataccatgaatcatagctctaaattctactttagcacttttagctacaatagattggtttttgctatgctataagtgttcctgaagttgatcttctatccattatagatcctactcaatcaacatttgtatatccctctacttccaaatggccatgtttagaaaatagcaaacctttatgaggagcaaattttcaatacttgagaatcctatgtgtagccaacatgtttgttttctcacaaggagcatgcataaaatgacttaccacactcaccacacaagctatatcagagcaagtatgagccaagtgcattagcttccaaactaacctctagtatcgctctttgtctgctagtgtaccttttagacttttgcttgacttgtggtttggttcactaggagtataaacaagcttacaagccaacaatccaatgatgtaagtccataatatatttcctttgagaaataaagatcccctacttcaacctaccaacttcaatacctagaaaatatcgcagaatgttaagatctttgatctcaaattttgccgccaagtatgtttttagttgactcatctcctcactatctttacatgtcaccacaatatcatctacatacaagatcaagacagtaatctttcctttaagtgcatgtttgaaaaaaagtgtgatcagattgccaatgatggtattcatacttttgcatagcctgagtaaatctaccaaaccaaactctaggtgattgcttaagttcatacaagaaattccttaatctatatacctttcccccttttattaggttaacacgtctagatctccatgaagaagtcaaattgttgaagaggccaatctaggtttacaaccaaggataagaggacccaaaagggtatttatctttgtcactgatgcaaaagtttcccaataatctacctcatatgcctatgtataacttttagccatcaatcttgcttgaacctctccacagaaccatctaccttatgtctcattgtgagtagccactttcaaccaactgtcttctttccctctagtagctcaagtagttcccatgtatcattttttataatgctttcatttcctcaatcatggtagtagctttccattttgggttatcaagagcttcttgtaacttattaggaataaacacgaaggataacgggtttgaaacattttataagatggagataaacaatgtgaagacataatgagagaaaaggcatttaatagtacaacttgcaaaaccattaagggatggtggttttcgctctctaaaaggataatgagtcttgttctttagagttaattgagttgactcttcaatagaagtatcaatagagagttagaagaaggaattagctgttgtatgagcatctaattggtaatcgggttgataaagaggtggttgagtcttctcccttcttcaatataccgatttatatggctcaagaaatccttttgaagtgggtgcaacagtttcaaatgatgatagcacatcctaagatttgtcttctcccttacgagaagcatctacatctccccctgaattgtaagcctgattatcaacaaaagtaacatccatggaaacaaacatcttttctgaaggtgggtggtaacatttttatcctttttttgtggtagcgaaccttaaaaaaatgcacttgagtgcccttggatcaagcttattcctatgttatttgtgtatatgaacgtaacgagcacaaccaaacactttaagggggagatggagacaagttgggataagatgtgctttggataaggattggagaggggttcgaaactgaaggacttttgaaggcatttcattcatgagatatgtagcagtaaggactgcatcatccaaaaggatttaggaacattcatagcaaagagtgaggatctagctttctctaagagatgaagattcttatgctcgactacaccattctgttggggtgtgtcaacacacaaagtttgatgaacaatgccatgagattaaacccttattcaagtagtcccctccattatcaaatcataaaacttgtattttagtgttaaattaggtaagaatcatttgatgaaagacttaagaggatgaaaagacataacttttctctttcaacagatagatccttgaaacatgagtccaatcatcaataaaaaaaaagaaaccacttaaggcttaaataattaataacacaagatggtccccacacatttatgaataattgagaaaggcattgaagttttttttttatcttgaagaatacaaagtttgatgatgtttggcttacacaactatcataatgaaaattagatacttgaaccatggaaaataaggatggaaacaatttgtgcaaatggctaagtgagagatgtcccaatcttcagtgccataaccaaatttgttcttctgatattgccctgcccgctatgtgatttgtgtgttgaatccaaatcttgccaattcatatccaactagtatagaccacctcatcaataaaaaaagaaaccacttaaggcttaaataattaataacacaagatggtccccacacatttatgaataattgagaaaggcatcaaaggtttttttttatcttgaagaatacgaagtttgatgatgtttggcttacataactatcataatgaaaattagatacttgaaccatggaaaataaggatggaaacaatttgtgcaaatggctaagtgagagatgtcccaatcttcagtgccataaccaaatttgttcttctgatgttggcctgcccgctatgtgatttgtgtgtcaaatccaaatcttgccaattcatatccaactagtatagaccacctttctctctaccaagaccaatcttcactcttgtaacaagatcctgaaaaaaacttgatatacagaggggccattgtgatcctgatgttggaggtaatgatcatctcttccatctacagaggggccaaaccacatgaactcttgcctgtctcttttatttcttcaggattctgcagttagatctagtgttttgtttgacatgtttgaagttaataataagtacattttaggcagcatcatttgttctgcactccacacttttgagtgcaagggaaaacatgaatacaagcaggtttgattggtcaaaaagtggatcccaaatatcacaactcaaaatcttatgaacccataggtgctatattggatttgatattgtatttcttatttaatgttcttatgcttacttggcatttgggcttgttttgtgttcaaggttttgagcccatttatggtgaggatacattggtgttcaactgtcatttgggtgatttgcccaaactgttgacagcactagcaatatttgttaatctggtccaattgcttcttgaaacttggttaattcaaatggctcattgatactctagtgtgacaattatctcactcagatctaccctgtagatcagccatatggtttgactgttcagtctggcagtcacatcttaggtttctcataatccaagatgatggaccatttgcgatgtactgatatttaatgagatgtcaaccatatatgaaagatgctgagccatgacaattttcatcttaatatctgaatttcatgttccacatggcaccaaatacagcagtcaagcgtgtatgtttttttctggatctataaaagctggaaaaatttttgaaaaccagatatttgcatgtgcatatgggattaataaggatggtgatactaactctttcttaacttgtggtgctcatgattcagt

SEQ ID NO: 10749 - DNA, 6586 bp, Vitis vinifera
  Intron number 7 from transcript GSVIVT01018468001 (locus G SVIVG01018468001) derived from phytozome v7.0 (chr-ID chr1 6; pos 14621976 to 14628561 reverse strand)
tttagggctcaagagtgctgaaggtgaagttcattgtgggtaatttccctcagttttgcttatgaaggttactccttcaaccattgtggtaatctttgtggtatactctctttctcttctttgtatttctgagaagaagattttccatctccatgctagtgagaactttgtatgcctatttttagttaaaatggaagaaggattctctatggttttttatctcctcttggagaaatttttttcatattacatatggggtcacataacaatgtgaaatagacaattttatgaaattaatggccaaaatatttgcatctctttttgtgtcaccttgacttataagtgatatatcgttgaaaaatcatgatattttaaaccttgatcatgaattattatgttattgcattaggttgtttagtttaagttgatattttgttccatttatccttacttaggacttttctaatgtaacacatctatttttctgatgtatcaaatcaaaatataactctttaaaaaatatttcaagaagaacaataatttgaacacttgatgaatttaatttcatctatatataatttcaaccatatatcttgacctctaagtactttcaacatcttgattttcattaaattagtacgtaatccaacaaaggattcaaaaaacttaagttgtgagtaaggatgaaaatatcaataattacagatatatcagtacttacattttactgatatatcggagatatatcgatggatattctgacacaaaatatcgatgaatctaaaattaatcagaaattataaaaattgaagaaaaaactcttaaaaataaaagtataagtataatagaattgtaattgatatatataatataatttattatatttgataataatattgtatatgttaataaaaaaaatatgaatttcataagtatacatttattattaaattatatcaaatatcattcgataataatattgtaatatttgattataatatgtccaatttaaaaatatatttaatattaaaattataattcatttaattcaattgtattaaatgatataaaataaatgataatatatgtataatttttaatacttaattaatatattaatgatattaaaaactctatgaagaaagttatcaagataatttttatattttttatattcaaatagatgaaattttttcatttaattataaaataattataattaatttgttctttaaaacattttttaaaaattatgtttatatgttgaatttgagtatatatatatatatatatttggtgcagttgatatattaagggacaatcttgccccgatggctggcacaacacattgcaaatcttttggtggggattcgagccctatataatccctggttgttaggaaccaaattaatagttagagggaaaaaaaatagtacaagttgggtgatacattatgaagccacctaatttttttgacccataagggtgttaaatatttcctaatatatcaaatttgaatttggaaggtagttttgcaatacgattgcatgatgtaatagtattgaaaatgcagtgaggagtgcaaatcaatgagttgtggacaaccccatatctaacactacaaaataaagtggaaaacgtcagagtaacagctctttgattaatcgaacatgtgacaaccctctatgtaaaatattaaaactcaatagagtggaagttacaaatgcatttttatagttttctacgtgacctttcatcacatgggcggccacctcataaatgaatcttatttttcttctcctgaatcaatgctcaaatacatcataatcaatgtcagagttgtgagatactttttacgtatttttatagatgttaataaaaatgtgaaattatcctaattatcttgaatatatgtaaaaatatgaaaaaaaaattatatttgacatttatatatgtgtataaataaattagatttaatatactgttttgaatatgtgtgaaaatatgagaaaaaaaattatatttcatttttgtatatgtgtataagtaatttcttttttttttttttaactttggaaaacaaacaaagaaaataaaaaaaaatgtatataaattcatgatttataaatttgcattatttaattaaagttcaaaaataaaatattttgaaatttcaaaacaaaatataataataataataataataataataataataataatcaaaatttaaattaacaaaataaaaactataagtattaaatagatttttaagaaagattttatttattactttttaaattttttcttaaaatcttaatatattaattatcataagtaattaagaataaattttaaaataataaatagttgtaatactcaaatgtcaccattcatcatccaattgtattaatttttaagctcaaatatgcattttatatggacgttaggccaaaaccatttgctcgaaaaagatatgtccctttttaaaaaccatattaagggtatgtcaagtatttttgggtaacaaattgttcatatatcctccagactaattttaaaacttattctatccttctattccaattggacaaagtatataccatttaccgatattttaacctaaccatttattgtaattaccccaattaaatattaaattttaagaaaactatttttatattgttgaaagaaaaatcattcaccttctgacgagcaattggttattgggttgtgttgtgtttggcctacagtgcatggctatgtccaaaatcgggctatcttttacaaaaaagaaaagaggggaaaagtgggcattgaaccatcaattcttatgtaaccgtctgattcactgatttaaccattagttcagacgattcataacgggttcaatagttaaacagtccaaaaggacgaatcgaactagaaaggccaccagttgatggtttgacaagtcgaatcgtgcaattttcaaaacaatgtaaatacttgaaatgataaaagatatttatataaaaaaataagttatttttcaaatatgagaagggtcaaatttacaaatataagattatttcatctcttttaactaattaattcaatatattataacattttttattttgaaatttatgataaatgatatcaaatataaattctaacaaatattacacatccataactaggggtctccaacgggcgggccgggccggcggtctttttgaaataagctaaaatggctttcaaaaaagccaaagggaaagaagggagagggggggattcgaaccctcccctcatgtttaaacttcaaggttctaaccaactaaacgacattctttttatgtttattaattgagttagttatatatatataaaaataaaatatattatttttgtagtttttttttaaaaggggcgggcctacgggcggggccggccctccgggcctaaatttaggcccgcggcccagcccgcccataaacgggctcgggccgggccaggcctaaagcaggccgtgggccgtgggctttatggagacccttatccataacaataagagaaattgaactagcatttaattaatacatgcgcacactatatttcctaattgtagtctaatttaatggtcaaataccatatatgcatataatttcatctttttaacatatactttatttgatattcaatatttatattgaattggatgcgcattggataattgaaaattggaaaatgttaattgggtcactaattttacatggtaatattgatgagaagtcaaaatcttttgcatttaatttatttaaattcttatcatatcatatcaacacttgtcatttaggcatgcctagagtatgtcattgaaacaaatgatacatgtagagaactcttttaaaatgtcattaaattaaagtaaggatggtgctacatccctctcatcaccttcaccatctctttacgtataaattgatgattggggatattagtaatacaaagtggtcggtccctccattcacaattgataaaaatattaattgtctcacactttaataaatcatttttatcatgtatggtagataattgaataccaaaaccaacttttgtacttaataaaaacatatcacctttgtatcttgcatcccattatcacttatcatataagaaagatgataaaaattattatgatgataaagtgggtagtgcatatagtcctaactaaagttaaaattcatttgtgtgtaatattttttattaaaatgcttttagcctatagtatttttattagtagtgctctcattaatgaattttctaaaattcatttgggtgtaatattttattgaaatgtttttaacttgtagtatttttatagtagtgctttcattaatgatttttttttaagaaaattcattcactaattgaaagttacttttggaagtgattctgaaaaagtgtttttaatttagaaaatgtttttttaaataaaaaaattagatgttaagcaaaatttaggaaatatttttaaaacatatgataaaatcacttatagtggtagaaaattacttataatgttttctaaaaaaacatgtgataggttattcttctaaaaacacttctaaagaaaacacttctattaaaaatactttgaataaaagcactatcaaactcactttaaatatttaagaatatttttagtaatattttatataataaataaataaataaatatgatatttagaaggatcatttatcaaatgattctccaaaaatcatttctagtgatttttttttagatttttgaaagtcattttcaaaaatttttaaatctaataattattttttttaaaatcatatattagaaaacatttctaatatctctcaaaatccttttaaaaaagctcttaagtggtatttgttttttggttaaatagaaaaaatcaaaatatttaattttttttattcaactaaaaataacatattaatattgatcaatataattaaactgaatttattaaaaacaagttcactataattatattaattaatattaccatattacttttagctgaaaaaaaatcaaatattttaactttttttattcaaccaaaaaacaaacactaccaatctccctttttttttttaataatttttatgatagattttgtaaataacaagttattagaaagtgactctaagcttaataaattggaatatggctagagtgatcagcacataagttagcaacggtcgatataaaatattaatctttagaatattacaactcaaaagttctatgggcttttgtaatattctctatctttttctgtgtgtatatctttcatgacgtggaccaccacctcacaaatgaatctcatttctattctccggaatcaatattcggatacatcacaatccacttaagttagcaaccaaataattaagccaaaaggcaatgcatatagtaaggtaattaaagcatatacatagataggaagcgtgacggtggatgagctttcatgcaaatgattaggcatagccaactccatttcattttgtgaaagcacccctcgagctaatgcaataatggagacgttagaaggcacgaccggcccctcatcagcatccgatcaaaagtggggttggctcagttatagcaatgaaaaatccaatcaatcctgcttacaaagatgatgataaaaaagctaagtcacattcttttaaaagaaacgttaaaagtaagaataaagtttaggagattatcataaataattgtataccatgctaacaaaaagtgcacatattccaagtattgtatagccatcgacaagatgcacatttaccaattccatgctctattttaacaaaatttgtatgttgtgcttaccatgtgaagagatcttgagaagacacgaagatacccaaataatttattgtcctaagagactccaccatgaggggaacatggtgtttttatttgttggtttgactttctcgattggtgatactcatgggaagtaaacgtatgtggcaagaaaaaatatggataccgataaataagactaaacccagtaaaattattgtgtaaaagagagtacatgctacaaaaggccttcttgtgacttttgtcttgtgcttgagagtgattggcaccccttacgaccactgaccccaatggctgtgcacgggtctctcgtgcccaatgaatattattttgtagtcttttagaaacagaacctcagagccatccaattttttactctcggataaataaagtagatcaacccgtgaatgattgaaacaagcaatcaacgagtccatagctagaaccaaacaaactccaaccagagaagattgctcatatcatctatctttgctgttcttctttctttattggcttggcttcttacagagaatcttccagccactttttatacttctgggctctccctctcttcttcactactcctagccattaattatggataagttttggtatttttggtgtatgattatactgttagagtctttcaaattggttgattctaacagagaattagtcataaccccaccattgcctattctacctcttccc

SEQ ID NO: 10750 - DNA, 11617 bp, Vitis vinifera
  Intron number 3 from transcript GSVIVT01022435001 (locus G SVIVG01022435001) derived from phytozome v7.0 (chr-ID chr8 ; pos 2984331 to 2995947 reverse strand)
aaagggttcaaccgacaaaagtgaaaatcccaaaggtaacatattttaatacatgttatggttttaatctgatcttattctagttttgtgttttaagggaatcactagattactatggataacatgttggtagattgccactggatcctgttgaaagcttgttgagttcaaaaaccatgacagctaaaaattgttgttctgcttgctgaaattaaaagaggctaaataaccagcaagtatttccaaaaactcgcataatatacgtcatgaaaatacgaggatcctggcaatagaaaatgtggacaggggagtaattgacaatgtttctaaatccataggctaattagaaagtgaaaatcaacctagcaagttaggagttctatcatgaacatagtgtggaacccgtgcctcttaaaactgcccccactgaagttgagacaaagtagagcaaaaacccaatgtttctgtttcactcaaaccaccccctgaacattaaatccagaaaaaaatccttgattgcagtcttaaaccatgggcttctaaggatttatcaagaagggggcaattacaaccccagtggcaatgatattggttcccctggatacttggagcctatttccatttactattttagggaagattaaaatagtactcacacaaatagcctcaagagaatagggaaccataggcttgtagccacaccttagctttggtctgaattttttaatttattgtattttatcttttagtttcaagaaagtctattcataaccacactattcaaaactaacatcaattatataacttcttgtgattttgctttttctattactggttgtcatatagtgacattaattaaattggctttgaaacctgggttagattatggcagtgaaagttttcaatttttggttaatctttgtatcctcctgttaagtagtcatggattatgaaaggacaaataattttctagcaaacataacccgttttgatcatatgtttgcatgtgccttcaacagcacttaaatgctgccctttttgtgaaaccaaagagcagcactctttggtttttttttctctcatcaaaagaaactgtttgcatgtgccttcaacagcactcaaatgctgccctttggtttcacttgtttcagcatgtactttgttatagattgctgtggtacaaaataagaaatagtctctccaacacataaacgattggaatttcatgtcgtcaccatctttgctaccaaatacatatctcaattattgtcttccatgagtaggtctccttttgagcaaaagctctatgtaaatctgttactcaattcaaaattcttttatttatttatttatttatttttatcagaaacaaagagaaatatattaatagaaggaaagatacaggagaaagaaaagaaaaaagaaacaaaagaaaccactagaaggatgagaggtccttcctacacaatctgaacaacagaaaaaacacccaacaatagctaaaaacaaagagaaacccccacaaactcaaactcttgaagcgcaaacctctctccagttgagttgtaacacatttaaaggaactcctctaaaagctgcagaacaagaagcccaaagagtggagtagaacaaaatcaaatcccataatgtctcttccgatctccccttatcctcaaaaatcctattgtttcgctcttgccacactatccaaaccaaagtaaggcaagcaacttgccaaagagtcttgcctcttaaagagtttcccaagcctttaaaagcaataaccaacatatcctcaaaactccttggagggacccaatccaacccagctagcttgaacaacttgttctagagtccaatggtaacaggacaatgaagaaaaaggtgatcaatcgactctccatttcctttgcaaagaatgcaccattgaggacagagggacttgtagggtcttctcaattgcaacttatcattggtgttcaccttcccatgagctactatccaagcgagggccttaacctttgaagggacttttgaactccacaaaaacttggccggaaggaacaaaataggattagagacttttgacaaggccaagaaaaaaaatttcactgaaaacaagcctgatgaagacaaagaccacgctctagaatctgccagagaaggagagaaacgcactgaactgagggaggacattaatctctgaaggagatcaatttctgaatcggtaagattgcgacgaaaatttaaattccaagccaatggaaaggaattgccaaggacatttgaaacagtgaggtttttcacagaaataactctataaagatcagcaaattgtgagcacaaagattggttaccctaccaaagatcttcccagaaccgaattctctccccattgcccaccactaggctaacaaaaggggaaaattcctggaaaacttgagcaatagccttctaaggacatctgtgtgaccatctaaccaccatgttggcgtcccatccattaggatgtgtcccatatatactcactataaccttatgccaaagaccactcctttctctagggaacctccaaagccatttccctaagagagcagtatttctcaaagaaatcttcccaaaacccaaacctcccaactcctttggtctgctaacaacctcccatctgacaagatgatctttcttcccttcccctgccccagaccatagaaaattcctttgcatcttctcaatctttgaagcaattgaagctgggattttaaagagggagaggaagtaactagggatgtgagacaaacaagactgaattaacgtaatcctccctcccaaagacaaataggcctttttccaaccatccaatcttctcgaaattctctcaaccaccgggtcttaaaagcttattgtctttgggttccctcccaaaggaagacctaaataagataaaggccattcagacactctacaataaaaaaccgaggccagactagacaatagctcctgcctagtgttaatacctgaaatggtgcttttctctaagtttatttttaaaccagaaacttgcccgaaaaccaaaaggataatcttgaggttttgaagatgttccagagagactttagagaaaaagatagtgtcatctgcaaactgtaacaaagacactcttgtcctatccctccccacagaaaaaccctcagtaagcccaatttcctctgctctgaacaacatcctacttagaacatctgccactaaagtaaaaaggaaaggagagagagggtctccttgtctcaaacctctagaagccttaacccaaccctttgcattcccattaactaggattgcaaaactagaagaagacaaacaaccccttatccacgatctccatttctagctgaaccccttcctttgaagcacatgatctaagaagccccaatccacatgatcataggccttctcaaaatcgattttgaaaacaattccttccttccctgaccttcttctctcatccaccacttcattggctatcaacacagcatctagaatgtgtctcccttcaacaaaggctccttgagaaccagagattgtttcatgaagaactttgcgtaaacgccctgaactagagattctttatgcttttcttgtatttcattgtttattgattctaaggtttcctcttactatgaacaatttcagtttgttgttaagatcatacattgtatttgtagttgttatgttgttaaattacaagaagttcaattccttgtttacctttattcccttgggtagtcgttcaagagcaaggaaaggccattgttccacactaaatagaaatcaaaacaatttatagcatttgtcgaggaacacacctaagcttagtgaacttgtaatggaatatggtggttttcacatgcatatgatcaatttggaaatgacttatcctattataatgcacacagtcatcacatgttggaggcatttttatctacttgggaagccctcttgggaaggtattgtttgaaaagcctcctcttgttggagaaagattatttgcttatgtcttggaaaataagggatcacacacctacgaaaagaaaagaaggaaagttttcttgcatcattttgtgaatgataatttcttgacaaagttgatatttttcctttaaaaggaatgacttgagaaggggtttccaaggggcaaaataatcttatgaattttctttaattttagaacgtttattatgaatgtggaaacatctatgatatctcttctagacacttttttttttttttttgatagataaaaagaaaaatatattagaaagggccaccaaaatagcagcccaagctatacaaaatgtatatagctaccaacaaccaccaccacaataagccaaagttacaaaatagaagacatgagatatctcttcttggcacttggggaatagtttaaaatgccttttagggaggaggtggctcactcgaaggtggtgatggtggcacaagctatgctagaccaagagattgacgtgagggccttgagcgtgagcaatgtgtaatggtgagttttattagcacgcacgcatggacataatgtcatgagtgtggtgcagtccattgatgtaaggacatgaaatgcgactgtgacacacagtataggctatgcatgccttggatggaaggatctaacaaggttgacacacatataccaataatgtaataaacataggctatgggctaagaagagggtttagcatatcaaggcaatgttgcataagcatgtaggccaagagagagcttggtactcatgggatgcctagatacacattaatgggttagatgaaacccttgggctcaatagcatgcaatacttgacactagggagagtccaagaaatgtttgacactaagacatgacatatggaggcataaggggtttcttgcataacaagagcatgatactcactaggttgagatgtgctaaacacatgacatgagccaaacaaatctttgcaaaaaatgtgcaggtgacataaaaggggtgcgactaagttcctatgaaggtaacatagcaagtgactgagctattgagcttgggaacaagtggcaagaatagaggcaatcaatacatgtagctagacaagtggcaaatggttgaaatctttgaaagagtccataaaacaggtggcaatgactaaaacatttaatttcaaacttgaaagtgtccacacgggagatgagagagagttgtttagttggtctatgtcatgtgggtggggtttggatgcctataaatagtgtgctttgctagacattctttgcatgaactcaacaaagaatgttatgtgagtcttattcagaaaagccttaactctttatcgtatatctttatagagtgatacaagttccagtgtttccttgtaattgtatgtgttgtgtgcttttctcttggtgcattttgtgttggttggaaatagttgacttagagggctttcaagtgttgcataaacacaaaaacttttaagggggaacttcatatatgtgatagttggtattagaaccttattcctctatgatgatggctagtggaagtgccatagaggcactacaaggttgggttactcgcattaaggcatttgttgaggaaggctcttatgatgttgacgccactctctttgcaacagttgatgggaccttcaacaaacatgaagttgagaggaagtttttggaggggcatcacaagtttgttgaggaaagggttgctaggcttgtggtagatgtcaaggctatgatggaggagttcaaaacaatttagttggggattgtcaagtatgacttcgcttgaaggtggttgactaagtttactatgcctctctaatcccttaagttggtacgtctttgacatgtcgttaatctcttatgcttggttattcactactttcatcttgttgttgcccctacttatcttcaaacctagcctagttgcctctttaatgacagcaaaattgtggggtgtcccattgtcaaccatggccacaagtttttgacaatcaccaacaattcgacatgcaccagccccttatgagccattggtttagcctaaatggtgtgtaggagttatagagggattcacccaacttggtgcctttggttcattgtcaaccctctttgtttgcaaaagcaatgaaagcatttagtttctccttgtgacaatccttggcctaatgtgaaccattgcagatgaagcatcttgagacgttcttcacttgcacctttgtggacttctccaccactttggctcgagactcgtctatttttttgcctttatttcccctattcttattagaacatttagattcttcctttcgcttttgttgctgctgccccttttccttgtgactcaaggaagaagaggtgcttagtttgtaatcaataagacaacttgctgctgccgccatggctgcaagcatatcccttactccttagggcctcgacctagtctaagtccatccttgcaggctagacatgaagttgaacaacttttccacctcttacatatctttgatttcaaagattagagaattggactccttgacatagtcttcgatagatatgatcttcttgagtttctttagagactctttggccatccaagccgtgtttgttggaagtgattgatcctttagttctctctttagggtctctcatgtcgtgatttggggcattccctatttagcatcatcatcacttgttctagcgtgccatcatagctttgcatctctcaacaggtactttatggtgatagtaacttgctcattttggggcatactaatagtaatgaagtattgttccataacccataagaagttctgcaagtccttcacgatacataccttgctaaagggcttgaagtggaggcctagaagctttgttgaggctacttctataacacttgatctgccttggatgatagctggtttcagcaatgtgacctcttaaagcaactgtatcttagctttgaactcttccattgtagccttgacaccaaccatgagcttagcaacacttgccttaacaaacttatcatgcccctccaataacttcctctaaacttcaagttcattgaagtcctcatccactctacagagagattgatgttagcataattaaagccttcaccaacataagcctcaatgtaagtaacccattgttgtagtgtctttatgatagttccaccaaccattgtggtagaggaatgagactttaataccaactatcataagtataaagttttcccttcaaagtttctgtgtttgtgcgatgtttagaagccctctaagccaaccttttccaactaatacaagatgcatcaagagaaaagtacatagcacaaacgattgtaaggaaacatcccaacttgtattactctatagagattacaagaaacagtcaatacttctttgaataagattcccacaacactctttgatgagttttagcaacgaatgcttggcgaatcacactatttataggcatccaaatactatagatgtgatagagaccattcaaccaactctctttcatctaggaagtggattctttcaaatttgaaatcaaatgcttcaaccattgctacctgtcttgtggactctttcaaaggcatcgaacatttgccatgcataagcacctctaatcttccacttgttccaaagagaaacatctcaatcgccatcccatcttcataggttcatagggacttagtcgtactcctttcatgctatttgctcctttgttgtagagattttcttggcatgtgccatgtatctagcccattttagcccactaggtgtcatgctcttgttgtgtcaataggtccttgcttgggcttttcccaatgccaaggtgccacacccttgtgcctccatatgtcatgccttgtcagcccttgctttggctctctctaatgctaactgttgcatgttgttgatctaggagtgtcatccaacccattgttgtgtgtataaacagccctctcttggtccacatgcttgtgcaacatttgctttggtgtgctaagccctctttttattagcctatgttcgttgcattgttggtccatgtgtgccaaccttgctagatccttccacccgaggcatgattagctcataccatgtgtcatggctatgtctcatgtcatattgctcatgggttcaccaaatgaatggcattgcacccatgtgtgcttgctagcaaggcacactatcacacctttctcatgttcgaggccctcatgtttcctgctcttggtatggtatatcccgcgccaccatcatcaagtgagccaatccattcctaaaatgccaaaaggagatatcataggtgtttcctcaggtatcatgaattttctaaagttaaagaaaacccagaaaattatttttctacttggaaacccttctcaaggcatctcctttaaggaaaattagcttccataaatcccgcatttaaatttttgtcaagtaccaggccattgccttgaactcatgacatcactccctgacatgatccttagtgttggttgtgaccatgtctcacccatggcatgttgctccacatgtcataggcactcatgggtgcaaggtgccaccacataaggccttgatgtcatgtcaaccatgtcaagtgctaacaaaccacaccccactaaaaggaggcctttagagtttcaagtgggttagagtcttgctgaaatttttgctgcaaatttggaagaagatcagcaaaaaaacgagtacaaggggcttgatccttaaatatgatggtccctttgaagtaatgaagaaaattggtgcagtggcaaataggtggaagctcctgaattgactgagaattcatcttctgtttcatgtgagcacgccgcctgattatttgaaagcagtttaggcaagacatttataggatcttagatcatcaaatcatgtggggaagcaagaaaaatagaagggctgatttcttgtaataataaaaatggaaccaaaattcttttagtttctaatttgatatgaagaacgtggggagcaagtgtaattttattacaaacatgtgttggattgacgatctaataagaaatttatgtaaaattgttttttgagaacacttcaattgcagatcagtatctgcatcatatgatgcatatggtatttcacacttcaagtgtagacttatcattggcagtgcaccattcattctgagctgcaccaaacctaattttgctcacgtggttgggaaattcagttttgaaactcaaagaactagatgactaccatatacaaagcacttaattacttgagaggcaccagtgattctaaaccagagtttagttcattttcttgtacacaaggaggagtacgatgttatgaactggatctctgcttagatgaaatgaaacagatttgagtggttttgagttcattcttgctggggctgcagtatcttttagaaatcttccaagcaaatgtatgcaccttggtctaggatggaattggactttattgcattggagaaggaatattccgagggtaagcagctcagaaacctcacagatttccataactagagctaaaataaaactaaatttagacataaacatacaccagaatcataacattttgaatcaataatttcagatggaggcaattttccttgattttgggagctcaaagatgactttggtggatgctttgaaaaaaagaaatgaggagaatggtagtaaggatgcggttggagaagattcagagggacttcctgtgggggggaggtgctcttgatcagaggcctcatctggttaggtggaatttggtttgcttggaaaggaagaaaggtggtttgggggtaagacacttagcgttgatgaataaagctctcttaggtaagtggaattggcgttttgccattgaaagagaggtgctgtggaagaaagtgatcagtcacaaatatggtgtagaggaggggggttggtgtactcgggccgaaagagggaggcatggtgtagggctttggaaagctattagaaaggagtggttgggtatgtatagcagtttagccttccgtgtgggcaatggtcggagagtgagattctggaaggataagtggtgtggagatgagcctctctacgaatccttcccctctctttttgccatttctcaggctaaagacgcgtgggtatcggatgtgtggaacccagatggtgtaggggatggttggacccctttgttctcaagggcgcttaatgattgggaaattgagatgatggaacagtttatgcttaaaatccaagcttttagggtgcaaagggagaacgaggataagatggtgtggacaacatctaaaagtggtgttttctcagtcaagtcgctctactctattttggagcctggtggttcagctatgttcccttatattggtatttggaaagcgagtgtgccgccaaaggtagcttttttcgcgtgggaagcatcttggggcaaaatcttaactctagaccaacttcagaggaggggttattctttggcaaataggtgttttctttgtcttgctgaagcagaaacggtggatcatcttttactccattgtgttatgacgaggacattgtggaatcttcttttttctctctttggtgtggagtgggttctctctggtacagttaaggaaactctcctggggtggcatggagcgtttgtggggaaaatccgtaaaaaggcgtggcaaatggcccccttatgtatattttggtcagtttggaaggaaagaaattcgttggcttttgggaacgaggtgttgtcaatccaaaggttgaaacattcttttgtatgtaatttgtggtcatgggtgaggatgtttatagttttgagcctgcggtctctggttagctttattgagtggctcggtttttgttataggtaggggttttggctcgcttccttggtttagattcgaggggctgcttttgtataccctttgtatacctagaggacactagtttggtgtttcctctttcattttaatatacttctctttacttataaaaaaaaaacaagggaaatgaacccatgcccttaagaaaactgaacatgatgattattttaacagaaattgagaagaaggttgagaatttacacctgacgaatttcatatctctcatgaagtggtgtgtctggctgcaatagttctcacctatatggatatggaagtgggttcacttgccatgagaatttagttaggttttctagagccgtcatgagaatttcatatctatgcatgttgcatggtctattcatgtgaacctgtcttgtacaacacagatcccatatgacaatgagtagttaatttttcaccatgttttttgtaggtcatgacttgctaaccctaaccatagatttagttcaaagtcaccagttccaatgaattgagttcttatgtttctgcagatactctggttaatatgtgggagattattggatttatagttctggcccttgtgggcatttgtttgattgggatcatttgtgattctatgctttgttgttaactttgcagagcttaggtgggtcacatccatcggaaagtgcagt

SEQ ID NO: 10751 - DNA, 12519 bp, Vitis vinifera
  Intron number 4 from transcript GSVIVT01035172001 (locus G SVIVG01035172001) derived from phytozome v7.0 (chr-ID chr1 1; pos 12682113 to 12694631)
cagtcaggacagtttaaaggagaagttaggttcaggtatgggagcgtatttcattattctgttgttgttttcctattgctcatgtaatatatttcaatagcacaaggttagtattgtaatcagattatccatttttttttggtgcatcttcttgttatgtgtatatgtgtgtgtatatgtatgcatgtatattgtatatatattttatatctcataaaaacaaagtgtacaaaatcaataatattaacaaccaaaaaaagcaaactgggaagaaaatattaaactttcaaggaggaaataatctaatacatgcacaatgacagcactatttttttgatgtcctatatttttattgccttgtcaatctttttgttggtatatccattgtttagggcagttatttaaaataccaaaaacttctgtccaaatatcgagacatatattgacatattagcaatgttatcaaagtatgcaggaatgcagccagaagcctatgatcacaattgttctagagttctatcaacattttactgctgatatgtgtcacttttaggatgacattagtccaataagaagtcacaaaacctcccttcttctcaagttggatgaagtagattgggatgttgtatactcatgcagtcacagccattataagcctctaactctagccacctaaccaatacctgatccattttagtggggcaacattggggatctagcttgctgttggaaaacaccaaaccttggttgaatgcttcttttattatgtttgtctaaaaaacagtgtgcagagaaattaaaagacttcgacctactagtttggtattaggatttataagttaattgtgctagttctagtttagagaacgtgacaggctttaagaaggctgatagtaggatcacgtgatgcccttttaagggctggggtttgagtgcaccagatagtgagaaagcgtatgatcattaaggtttactcttttacttgcttacattggtagggtataacagatatggattgattgaataaaatcgatcatttcagctgttcaatcctttgtccttgttagtgggaccttgatcggcttcttcaagagtttgagggtccttcaataggggtttttctgttccacttcatcattgtgatggaggtactcagtagtaaaggtgcttatatggagagtttctgggtcagatgtaggagtggttgtttttcacttaatttatggaaacaaagtagatattgactaaatgagatatctctgacgcatgctactctgtttcacatttcatggcaaatttagtgaagagcaaacttatgtctctggaactggtgtgggatgttcataatttggcaacacttatttggacaaaaggtggggtttctgccttctatcaatttgaatcttagattgagatcataaaactaaggaagtgtggaattcagttgtggagagattggtggaagattgacaagctggaggaggcaaaatgtccatctttcccttttaccttattgttgttatcaactcaattttggtaagggattggaaaagctgtcaagagattttttatgggctgatctagaggatgagagtaaaattaggcttggaggaaatggtggtgtgctctcctaagaattgggggaggggttttgtttgtttgttttttcttgatgggtaaaaagtagaaatttatggtgttgtttgtttggccttactttttcattatggtgtgtgggcggtgattttaatgttataaggagaagttcagaaaaattgggtggttctagttttacttctagcatgagggattttgatggttttataagagattatgaatgtgaagagagagaaaaagggagaatccctaattattgttattgaaaaactgtaaagaatacacattggacttgggtatatatatacatgttaatgggacccacaatacaataaggaaaggaaaggaaaaaggaaaagtaaataacctaaataactatacactatttaacactccccctcaagctggagcatatatgttatatgcaccaagcttgttacaaatgtatttaattctaggacctctgagagatttagtaaaaatatctgctagttgatcatttgagttgacaaaactagtcgccacacatcctgatgcgatcttctctctaatgaagtgacagtcaacttcaatgtgtttggtcctgtcatggaagactggattggatgcaatatgcaaagcggcttggttgtcacagatgagcttcatctattcatcctttccaaatctcaactcccgaagaagatgtttcagccatatgagttcacatgttgccagagccatagctcgatactcggcttcagcactagatctggccactatatcttgtttcttactcttccaagatattaggttacctccaataaaaacacaatacccggaagtggaacgtctagctgtgggtgagccaacccaatctacatctgtgtaaccaacaacttgggtatgacctctgttatcgtacaacacaccttggcctggtgtgcttttgatatatcgaagaatgcggattacaacatcccaatggctatcacatggtgactgtaggaattgactaaccacacttataggaaaagaaatgtttggacgagtaatggtgaggtagttcagtttacctacaagtcgccgatatctcccaggatctcctaaaggctccccctgtcctggtataagtttgacatttggatccataggagtgtctactggtttacagtctaacatatcggtttcttccaagatgtctaaagcatacttcctttgggaaagaaccacaccggaactggattgaactatctcaatccctaagaaatatttgagtttccccaagtctttagtctgaaagtgggtgaaaaggtgttgcttttttgaataccattctgatcactgcctataatgacgatgtcgtccacataaactaccagataaatacactgccccgaagagttatgatgatagaaaacggaatggtttgctgtactgcggaacatgccaaactcctgaacaacagaactaaaatggctaaaccatgctcgaggagattgtttcaagccatatagagaacggcgtaacctgcacactaaaccagactccccctgagcaacaaaaccaggtggttgctccatataaacttcctcagcaagatttccatgaaggaatgcatttttaatatctaactgataaagaggccaagaacgcatagcagccatggagagcaatagacgaacagaagctatctttgcaacaggagagaaagtgtcaccataatcagaaccataaacctgagtatagcctttagcaaccaagcgggccttaaggcgatcaacttgaccatcagggccaaccttaactgtgtagacccaacgacaaccaactgtagatttaccagagggtaaaacaacaagatcccaagtgccattggagtgtaaagcagccatttcatctaccattgcctgtcgccagcctggatgggaaagagcctcaagggtgctcttgggaagagaaacagaagatatagcagaaacaaatgcagaatagggtgaagataatcgatggtaactcaaaaaattgtaaataggatgaggattacgagtagatcgattacctttccaaagagcaatgggtaagtcagcagaaggaggcagagccggggcaggagaagccgaagggataggaagtgagtcagcaggtacctcgaccaaagaaggaggaacaacgacacgatgacggcgatgataaacctaaagtgggcgagaagacactgcatcaggtggggagataatgggaaggggtaagactttagaaacaggaaaagactcagaggtggagaagaacggtgagtcctcaaagaaagtgacatcagcggagagaaagtagcgatgagtctcagaggaataacaacgataacccttttgaagtctggaatatcccaagaagatgcattttgtggctctggtagaaagtttgtcctgtccaggagtgagaatatgaacaaagcaagtacaaccaaaaacacgaggaggaaggaaataaagtgattggtcagggaaaagaagggaatgaggaatctgatcgtgtaatacagatgatggcatacgattaatcaaataacatgctataagaacaacgtccccccaaaaatgaaaaggaacatgactatggagaaggagagtatgagttgtctcaacaagatgttgattcttacgttcagctaccccattttgttgaggagtatgagcacaagaagactgatgaatgatcccatgttgggacataaatgaagtaaatggtgtagaaaaatattccctagcattgtcactacgcaacacacgaatagaaatattgaactgggtttggatttcagcataaaatttcagaaaagtagagaataactcagctcaatttttcattaaaaataaccaagtacattgagaatagtcatcaatgaaagtgacaaaatattgaaatcctaaagtagacgcggtctgacaagaaccccaaacatcagtgtggacaagttcaaaaggagactttgcctgattattcaaacgctttggaacttggatagactagggtggcccaggcgactgtggatgagaaggggagcatcagtggaaatgcaaactgcaggagtggaaggcgcggtgaggtgatagaggccttgagactcacgtcctatgccaatcgtcttccccgtactccggtcctgcaaggtcacaaatttatcagagaaagtgatagaacagttaagagtgcgagttattttcctgatggaaataagattaaaaggacactcaggggcataaaggacagaatggagaggtaaggaagggagaggatgagcgaaaccaaaacctttagccatagtttgggaaccattagctaaagtaacagtaggtaaggtaaaggtagtagtaatagaagagaaaagatccttattaccagatatgtgatcagaagcgccagaatctagaatccaaggtccaagagaagatgtgtgggtaagacaagcagaagcattaccagtctgggcaacaaaagcaacagaagctgacttggtggcctgatagcggagatagtcatcatactcactatcagtgagggaaataccctgagatgtggaagaactgggaggctgaggcgactgaggatcagatgactgggccacgtgggcagtgcgggaaggccgcccatgtaactgataacaccgatcacgagtgtggccaagcttattgtagtaggtgcaatgaggacgttagcctctacctcggttaccactgcatcctcctcgagagctagtttgagaaactaacacagaagaatttgaagtgttatcagatgacaaagtctgagtggaggagatacggaggaggcgagcaaacacatcatccaaggatggaacagaggaactgccaagaatctgatcgtggacggtctcgagatctggacggaggccaataagcgtaagaaccatgaagaatttgtcaatctgtgttcgttgatccccaacatcagtagtaaaaggcatcatggtcaagaattcctccttaagagaggcaatctggccaatataagtagataaatccatatcttgttgtctgacattgacaatagaagaagccaccttataaagacgttggatatcattcgtgtataaccccttcgcctgattccaaaatttaaagcatgttttgtaggcccgaagatgaagcagaatcttaggatcaactgattgccataacacactacataactgtgcatctatcttcctccattgtactctgtcaacctcagggatatccgcttcctgcgtaacaaggtgatcctcataaccttgacctataaaccaaagcttcacagaggcaggacaaataattttcactcccaatcaatttctccgaagtaatcataggagatccagatatgatagaggaaaaagttaaacttttagtagccatatctacttatctagagaatgaaatacgtttggattgaagagagccctaatacggcttatcgcggacttcctaagacacgtgcaaggctcggggtggagaggaagtcaccggaggtcgccggaaaggaggtttagagggtggcggagacaaaaaaccccaaaaaatgcacttttagggctcagatgacacaagcgcaaatggagggtggctagacggcgtcaggtgaggctggaggtggaagcgcgtggccggaaagtgcctcaagcgtcggcgcgtgagattcaagccgccagagaagagacacacgtggccgggattctccctccggtgctttgagaaaagttgaagatctcctccttgcgcacctgatggtatggtcggtgttggaaaaggacttcgccggaaaaagtcgctggcggtgagggttttctgacggcgatacagttgatcggaagctttaggagatgggaagggtgaccggaatgaaacacggtcattgaaagatttcccagaatggattcacagataaaccggaaataattagggttttttttttctccctagtgtcacaagatgcttcaaatgaccctccccatgggcttatataggaggagggaagcttctggagactcctggagccatctacactaagtcattggtgggaagagtgtggaaggttctagaaatgcctagagatgtccacacatctctacactatggtgaaaggcatgggaggagtccaaggctttctagagacttctaggaatctcttatatattcttgtacatagggttgtacatagaatagggtaggatgttctagaatattcttgatttgtaaggaaccctccaaggttctagagagttcccctggtgcctataaataggtgagggcctcatttggccaaggcaccacccaaatcacttcctgaccaagcaagtgagcttccaagcacttgtaaaagcttctttgagtaataaagagcttccattctttaaggagttgcctaccaagcttcttaagcttttgagtcgcgagggtcttagccgagcgagctaagtattgggagcaaggctgacttagcaagatcaagcgtcttggcttgtctaagtgccgcacgagcttagtgaacgactaagtccgtgacactaggttctgataccatgtgaagagagagagaaaaagggagaatccctaattattgttattgaaaaactataaagaatacacattggacttgggtatatatatacatgttagtgggacccacaatacaataaggaaaggaaaggaaaaaggaaaagtaaataacctaaataactatacactatctaatagtgaattacttgaccctcctttacgggaacgtcccttttacttggtcaaacatgcaagagtcacctgtgtgcaagagattggattggtttctttactcaaatgagtgagagcttttcttccctcaaagccttcaagaagttcttcctagatggacatcggatcattggctgattgttttggataccaatcctttcaagtggggcccaacacctttttaggtttgagaatatgtggttgcaacatccaagtttcaaagagtgctttagtagttagtggagagaatttgaaggaaatggttgggaaagtcacaagttcatgaggaagctacaatatgttaaggcaaaattgaaagattggaataagaattcttttggaatgctaaaggaaaggaaaaaaagcatcttagatgaaatagccaacattgatgccgttgagcaagaaggggttctttcttctaatctttaagctcaaagagctttaagaaaaggggagctagaggaattaattttgagggaagaaattcattggagacaaaaagttaaggtgaaatgggttaaagacagggattgcaattcaaagttttttcacaaagtggctaacggcagacgaaataggaatttcatcaagtatttggagaatgaaagaggtttgatgttggataattccgagagcatcacagaggagatcttactatattttgaaaagctttacttgagtcctcctggagagtcttggagagtagaaggcatagattggtcccctatcttagaagagagtgtttctaggctggattccccttttgtcgaagaagagatctttaatgccatttttcagttagatagggataaggcgccggggcctgatggttttaccattgcaatgtttcaggattgttgggatgtgatcaaggaagacttagtgagggtgtttgcagagtttcacagtagcgggattattaatcaaagcaccaatgcctccttcatagtttttttgcccaaaaaaagctagacaaagaagattttagattttagacctattagcttgatcacttgtctctataaggtaatagccaaagtcctattagggcgattaagaggagtactatatgaaactatccattctactcaaggtgcttttgttcaagggagacaaattttggacgcagttcttatagccaatgagatagtggatgagaaaaggcgatcaggggaggaaggagtttcaaaattgactttgaaaaggtttatgaccatgtgaattgggattttttggatcacgtgttggaaaagaaggggtttagtcctaaatggaggaattggatgagaggttgtctgtcttcggtcttctatgctattctagtgaatggaaatgctaaagggtgggtcaaggcatctagaggattaaggcaaggtgaccctttatccccttttctgtcgtagatgtgttgagcaggatgatgttgagagctgaggaaagaaatatgttagagggtttcagggtagctaggaatagaacaagggtgtcccatctgcaattcgtagataataccatcttcttttctaactcttgtacagaagaactgcaaactctcaagagtttattgttagtgtttgggcaaatttctaggcttaaggtcaatcttgacaagagtaatctttttggcatcaaccttgatcagaatcatctctgtaggttggccttgttgcttgactgcaaggcttctgattagcctatactctacctgggtcttcctttgggagggaatccaattgcttgtggattctgggatccagtgattgagagaatctcgaggagattagatgggtggaaaaagacttacttatctttcgatggtaggataactcttatccactaatgcctttcccacattcctagctactttctctccctgtttaagattcccgcttcagtggctgcaaaaattgagagattgcaaagggatttcctttggttaggggttggggaaggtaaaagagatcatcttgttagttgggatgtagtgtgtaagccgaggataaaagggggattagggtttgggaagatttctttaaggaatctcgctcttttagggaaatggttgtggaggtatcctagggagagtacaactttgtggcatcaggtcattctaagcatttatgggacacattccaatggttgggatgccaacacttaagtcagatggtcacatcgttgtccttggaaggctattgcacaagtctttcagggtttttccaagtatactcggtttgtggtaggagatggggaaagaatttgcttttgggaagatttgtggtggggggaccagcctttgagatcccaatatccaagactatttagagtagtcacggataaaaatattcctatatcttcaattcttggttttgctcgtcctttctcttggatttttaactttcgtcgtaatctttcagattatgagatagaagatctagaatgtctcatgcgatctcttgatggtatgcatttatccacttcggcttcagatgcgtgatcctgacctttatcttcttcaggattgtttgcagtcaagtctttctttatagccttgttccaaatacccgatttatctccacttttccctactaagtttgtatggaattctcaagttccttttaaagtcaagtcctttgtctggttagtggcacacaagaaggtaaatattaatgacttgctacaattgagaagaccatacaaagctcttagtcctgacatttgtaagttgtgtatgaggcaaggagaatcaacatatcatcttttcctacattgttctttggcaatgaggttgtggcacatattatttcagctagccaagatggattgggttcctccgagaagcatttccgacatgatgtccatcaattataaaggctttgacatttccaagagagggatagttttgtggcaaaatgcatgcattgctttaatttgggttgtgtggtgggaaagaaatgttaggatatttgaggacaaagctaggaacttagagaatctatgggattcctttcagttctttgcttctctttgggctttttgttccatggtttgtaagggcattccccttaatgtgttacaactagattggctagcagtgtgtagttccaacgggatggtctggccaagagagtagttttcatagtgtagtttcttgttcttttattgtgttgtttagttttatctttgggggaggattcctcatccttcttttgtactttttttttctatcaatatatatatttgttgtttcttataaaaaaaagtagaaatttataaaagagaaacatcaaaagaacactccaaaatatatgggaacattaggaagtattcaaaacacaactaaaggcatcacataaaacagagggggatactaaaaaacaactgccctcaacccgaacccaaccagtccacaaagtctatggtggaaagaggactaggaactatatgcaacttacaccacacccaaagattacaaaggaaagaaaatttaagcccttgaacctacccactcctcattttcaaacgccctattgtttctttcctaccaaattgttcaaaaaaggcataagggtgcctaccatgcccttttcctttttttacccacaaaagaaccttgccatcttaaacgtgtccctctaaccgaagaagggagcacccacaacacgccaaaaagggagaatagaagatgccataaaacccttgctctgtcacagtggagaagatagatttgaatctgctaactaagacactgttagaaaaatgactttcaagatgtgcgcactgtggaggtataactcatgaaggttagggaataggaattgttgctcagggaaagtgaggggtctgcatgaggggactacggaagagtatggagatggtgggacattttttagatacttactcattttgcagtaggggatgggcaaagggtgaggttttgagatgttttgtggtatgatgataacctgctgaagatgtgggctttccagagatttatggtatttagaaactgagaaggcaaagtagtggatcattgttaatagttggaaacagggaaattctgtaacattaatctcatcacgaaccttcatgattgggagctggaggtgtttggttactttttgtggatcaaatttgttgttaggagcttagttggggaaggactggcgatatctaatggtagttagccaaataaggaatatttcactcaaatcttctattttatttttataaaactcatgaaatgcaaatatcaagtttccaatctcaaaagtaataatagaagatcttgaccgttgaccagttgatgagaagaatgtctctcacaaactggtgttgcatgtgcaacagaggtgtcggatctatctattatttattgctccactgcttagtggcccaagatctgtgattgatttggccttttggtgtagcatgaattgtcctagaccaacaatggaggtgatcttgagctggtatagtaggtttgtcaaatgaaattggagagaaatacagaaaacagccacctttttgtgaatcttatggaaaaaagaaaagtaggtgaatatttgagttgagctcccaggtaggaagttgaaagaacatgatttggttctctctgtgtaaacagttcgtgccatggttgacaggagagttcctcatggttgacaggagagttcctctttttttttttttttaaatttatgcctatacttttctttgttccacagggagtagtttgtaccaatatggcctgtattatgttggctaagtggattcaataaaaggaatctgtttcactttacaatagcatctctcaattatttgcgttctgattaagttcgcattttagtgtctaatgcggtgtctgatattggtttgtttgattgaattattttatttgtatttatatttatttattaactaaagacatcttttagcactcatgaaacaacctgcaatagaagctggaagctctggacttatcattatattcccagataatgcaacttgtaatgtaatcatcctcatagagattagctatggatcatgttggtagattttacactatttctatcatgtggcatataatgaaattagatttggtttttttttgtttttttctggttctacagagttg
